United States Patent Application Publication US 2017/0114356 A1 - sequence listing, part 17

SEQ ID NO: 21841 - DNA, 4525 bp, Zea Mays
ggttctttctccaccccgatgcccctccccctcccccgtgtgatcccctctccagatcgatgtctgccccggccgtaacccccgcggctcaccgcacgaaaccgccgcgagatcttggagctcagcctctgacgatggctacgactacctcgccaacctccgcgagctctgtccccctccctctcctccaccggcggcgggggatccttggccatgttcctcccgaggcgccggtccacgcgcttcggcctccgcgtggtcatcaaggtcctaccaccgcctcacctcctccttgccgccgtgcggttgagcgccgacgacgttcgggctccggcggttcctgcatggaccggaagagccatctcatactctttctctacagcctttctgatggctcggaacagagccggagccgacggagatgaccgtcgacgagctgaagctgcaggcaagggccagcggcggccacgacctaaggaccagttccccgtcggcatgcgcgtgctcgccgtcgacgacgacccgacctgcctcaaggtcctcgagaacctcttgttccgctgccagtaccatgtgacaacaatgggccaggcagccactgccctgagctgctgagggagaagaaggaccagtttgaccctgtgatcagcaacgtccacatgccggacatggacggcttcaagctcctcgagcttgtgggcctcgagatggaccttccggggattaacagctgaaaacctcgcccgatttgtaaagaagttttcttgttcaatgcggcattgaatttgggaggaatgacaagtctcatgaaaacttctgtatgccctacacgtgaccactaaaagaaagagttagacaggacaaaaggctgcagcggcagaagaagagcttttacatacccttacaatgctgattttgatggagatgaaatgaatttgcatgtccctcggacggaggaagctcgcactgaagcgcttaattctcataggggttcaaaataatttatgtactcctaagaatggtgagatactggttgcttccgcgcaagacttcttgacctcatctttcttagatatgttttcgaattagattgggatggaaattcacatttgttatcacattttctgttagcaagcacaaccattgtgacattattttgcatgcactcagcctctcaccatggctatgagaatgaaattcaacttatagatataccaaaatgttatagaatcaatataattagatatgtcaagatgacaacacatatttcattcaactactatggatttttcattgataaaatacatgcttgatggctgcttgtctaaaatttatttgtttaatattctttgtttgtaagcccaagaatttgtaaaccaggaaataattccaatgaaagatcggtgcggggcggaattttcttggctttttgtagtggctaccgtagtacatcaacttgggcacttggcgacatgtccggtgcccagctccatcacatatcaatctgaaattaaacatgtgtctgagttctgaatgaaaaaattcagctaacagctaacactacgcactactaacagacctcaagcataatactgttgatttgatgtccttatatttatcttgaagcattgcattcatgcagtcatgtaaatagtactttatttatcttctgaccaacacactaataaccaacctttgcagtgatgggggatacttcaatgcaataatgagcttcccacaaaattacccaaacagcccaccatcagtcagatttacctctgaaatgtggcatccaaatgtctaacctgatgggcgggtttgtatctctattcttcatccacccagtgaagatccaaacggttatgagctcgcaagtgagcgatggacacctgtgcacacacttgtaggtactgatcacagcacattcaactccacacagattgtccatgtttctttcagtcaccatgatttatcactaggtcattgtgtttgtggccaacgagtattgttctaacagttatgttcccatagctagctagattcattgttgtgttttgttcagggtactttcaccacttctggtatggttctgtctgtaatgtgccagggattattatattgtttttggtttggatttggaatggtttggggtccacaacgatgatgcgtcagagctgttccaaggattggatgatttccattcccctgctgccaattcgactaggctcgccgtctccgctctgcccaactggcaccaagcagccaatggaacttgagcagccaatggatgatttccattcccctgctgccaattctccgaactgctttgacccttcaactcaatccgcatgtacccagtaaatgttcaatctgaatttggatcattgctagcaggattctttgcttgctcttctacttctgaaaattcgcaaaatggatagataattccagttaattttaatccattacagcctattgtggcagcaaacagcgactgggtgcggaagccggaagggagaggcgcttggttgacccagaacggacgacaagacaccgccgggggttcgctgcaaccgcacgcgtggtggccggtgtgggaaggagcccactgctcaagcagcgacgacttccgtaacttctcaggccaagttgtagggagggagggcagcaaagaaagcaagcaagaaagaagccgattccactggtggttaaggttttggattaaaggagagaggtgcagagaaaaaaaggttgcaactccctgggccaagcagtagcccagcaagttcagcaccaatggcagccatatgaaatataaggcaaagcagataaaaagcttaatttttttcaataaggtaaaggcaatgacagaaaagtgaggagggtcagaggtgtacagataaggatgagggctgaaaagaggagcaggaagggcatgatgaaatcagtgtttgctatttagcctccttcacaactaagatcatcctacataatagatttagacaacaaaaacttatggagtttgctgaaatgccctttcaggcatgctccatctgtgctacaaggttatgggcttcctgcttgctgccagcagtcttttggtgcttttatattgctattaatttgtttgaaatttattatggtgatgactgggaaggtctttttgaggctattactggttatggccttggtggctctttggccgtgttggtggtggtatttataccaaggctgctgatgttggtgccgaccttgtggggaaggtagaaagaaacattcctgaggacgatccaagaaacccagctgtcattgctgacaatgttggtgataatgttggagatattgttggaatgggatcatatctctttggctcatatgctgaatcgtcatgtgctgctcttgttgtggcctcgatctcgtcttttggaatcaaccatcaatttactccaatggtgtatccccttcttgtcagctctgttggtattatagcatgtctcataacaacgctgtttgcaactgatttcttcgagataaaggctgtgagtgaaatagagcctgctctcaagaaacaacttataatatccactgttgtgatgaccattggcattgcgctcatgttggcttggtcttccatacaccttcaccatttataactttggagcccagaagacagtgcaaagctggcaattgttcttgtgtgtggcggttggtctctgggctggcttagtcattggttttattactgagtactacacaagcaatgcctacagccctgtataagatgttgctgattcctgcagaactggagctgccactaatgtcatttttgggcttgctctgggttacaaatcagtcattatcccaatttttgctattgcgtttagtatcttccttagcttcagccttgctgccatgtatggtgttgttgtggctgctcttggaatgctgagtaccattgccacagaccttgctattgatgcctatggccctatcagtgataatgctggaagcttaagtctgtatgggtgcatcttatcatttatatgtatatctgaaagcttaagtatttttttaaatagaagatgtctggaaactttagtaacgacatgagtttcaggctttcagctatagcagtcttattcgcttttaagacagagaagatttttatttagagtttagaaagagtaggtgctatgggtgcatgttatcatttatgtggggaacatctctggtggaaattaatcagtaacgacatgagttaagacagagaagcttaagtattttttcagctatagcagtcttattcgcttttaagacagagaagcttaagtattttttgaatagaagatgtctggaaactttagtaacgacatgagttaatcagaagagatggaagggtagtttatcaacatgtatttggcacttcgccgaaaatgtcacttggactatcttgcaaactgaattttcagattggcttcttctgtctgaacattcagttcagtcttgcaggatttatttggtgtgc

SEQ ID NO: 21842 - DNA, 5200 bp, Zea Mays
ggttctttctccaccccgatgcccctccccctcccccgtgtgatcccctctccagatcgatgtctgccccggccgtaacccccgcggctcaccgcacgaaaccgccgcgagatcttggagctcagcctctgacgatggctacgactacctcgccaacctccgcgagctctgtccccctccctctcctccaccggcggcgggggatccttggccatgttcctcccgaggcgccggtccacgcgcttcggcctccgcgtggtcatcaagcctttctgatggctcggaacagaggtcagctatgcgatgtggcgtggcgaggttaccgcgggcgccgcggaggtggagggggaaggggaggacgagggcacgggcaagagagcgcatcgctgtggacggtctcgtgagagggaccttgggtgatccgggtgcttggtttcttggttctacggctttcgctgctgttggatttgccgagccggagccgacggagatgaccgtcgacgagctgaagctgcaggcaagggccagcggcggccacgacctaaggaccagttccccgtcggcatgcgcgtgctcgccgtcgacgacgacccgacctgcctcaaggtcctcgagaacctcttgttccgctgccagtaccatgtgacaacaatgggccaggcagccactgccctgagctgctgagggagaagaaggaccagtttgaccctgtgatcagcaacgtccacatgccggacatggacggcttcaagctcctcgagcttgtgggcctcgagatggaccttccggggattaacagctgaaaacctcgcccgatttgtaaagaagttttcttgttcaatgcggcattgaatttgggaggaatgacaagtctcatgaaaacttctgtatgccctacacgtgaccactaaaagaaagagttagacaggacaaaaggctgcagcggcagaagaagagcttttacatacccttacaatgctgattttgatggagatgaaatgaatttgcatgtccctcggacggaggaagctcgcactgaagcgcttaattctcataggggttcaaaataatttatgtactcctaagaatggtgagatactggttgcttccgcgcaagacttcttgacctcatctttcttagatatgttttcgaattagattgggatggaaattcacatttgttatcacattttctgttagcaagcacaaccattgtgacattattttgcatgcactcagcctctcaccatggctatgagaatgaaattcaacttatagatataccaaaatgttatagaatcaatataattagatatgtcaagatgacaacacatatttcattcaactactatggatttttcattgataaaatacatgcttgatggctgcttgtctaaaatttatttgtttaatattctttgtttgtaagcccaagaatttgtaaaccaggaaataattccaatgaaagatcggtgcggggcggaattttcttggctttttgtagtggctaccgtagtacatcaacttgggcacttggcgacatgtccggtgcccagctccatcacatatcaatctgaaattaaacatgtgtctgagttctgaatgaaaaaattcagctaacagctaacactacgcactactaacagacctcaagcataatactgttgatttgatgtccttatatttatcttgaagcattgcattcatgcagtcatgtaaatagtactttatttatcttctgaccaacacactaataaccaacctttgcagtgatgggggatacttcaatgcaataatgagcttcccacaaaattacccaaacagcccaccatcagtcagatttacctctgaaatgtggcatccaaatggtcaactttttattagtgaaaatagtatttatttactccatctacagttatgttttctgacatcatgcataatatttgaggaaacgccagtctaacctgatgggcgggtttgtatctctattcttcatccacccagtgaagatccaaacggttatgagctcgcaagtgagcgatggacacctgtgcacacagtatggcttcgtatactttgtttacatatcttttccccattgtaatgttactcatctcccttttatgtgtatactttttagagagaaaattaccttgtagtctcattgtttcagtttatggtccaatttacaatggcttcactgtaaatgggaaaacaactcggtaggaatgcttttttgaattataaattatttctatttcatacgatgcttataggtatgtgatgagtcctccaatctgagaagtagagcatggtaaagcactccaagctgctctttcatcgggaaatttataggtgacacttgtgtcatacattgaactatggagtcaaacaaattacatattatccttcaacatttttcaccagtgggaactgtagttattgcgtagaatagatggtatattaatcgttgagagccaatgtttacattaactgttatgcagaagacaatttatgttttattttatatctaactgtactttgttgcagcttgtaggtactgatcacagcacattcaactccacacagattgtccatgtttctttcagtcaccatgatttatcactaggtcattgtgtttgtggccaacgagtattgttctaacagttatgttcccatagctagctagattcattgttgtgttttgttcagggtactttcaccacttctggtatggttctgtctgtaatgtgccagggattattatattgtttttggtttggatttggaatggtttggggtccacaacgatgatgcgtcagagctgttccaaggattggatgatttccattcccctgctgccaattcgactaggctcgccgtctccgctctgcccaactggcaccaagcagccaatggaacttgagcagccaatggatgatttccattcccctgctgccaattctccgaactgctttgacccttcaactcaatccgcatgtacccagtaaatgttcaatctgaatttggatcattgctagcaggattctttgcttgctcttctacttctgaaaattcgcaaaatggatagataattccagttaattttaatccattacagcctattgtggcagcaaacagcgactgggtgcggaagccggaagggagaggcgcttggttgacccagaacggacgacaagacaccgccgggggttcgctgcaaccgcacgcgtggtggccggtgtgggaaggagcccactgctcaagcagcgacgacttccgtaacttctcaggccaagggagggagggcagcaaagaaagcaagcaagaaagaagccgattccactggtggttaaggttttggattaaaggagagaggttgcaactccctgggccaagcagtagcccagcaagttcagcaccaatggcagccatatgaaatataaggcaaagcagataaaaagcttaatttttttcaataaggtaaaggcaatgacagaaaagtgaggagggtcagaggtgtacagataaggatgagggctgaaaagaggagcaggaaggcatgctccatctgtgctacaagggtcagaatggacttgataggacatttgactatacaacatggaagttatttcaagatatccttttttaactatgctgtcgttgctgatcatttgcatttttacatttttcacattatactatagttgaagatacattcctgaggacgaatgggtgcagttatgggcttcctgcttgctgccagcagtcttttggtgcttttatattgctattaatttgtttgaaatttattatggtgatgactgggaaggtctttttgaggctattactggttatggccttggtggctctttggccgtgttggtggtggtatttataccaaggctgctgatgttggtgccgaccttgtggggaaggtagaaagaaacattcctgaggacgatccaagaaacccagctgtcattgctgacaatgttggtgataatgttggagatattgttggaatgggatcatatctctttggctcatatgctgaatcgtcatgtgctgctcttgttgtggcctcgatctcgtcttttggaatcaaccatcaatttactccaatggtgtatccccttcttgtcagctctgttggtattatagcatgtctcataacaacgctgtttgcaactgatttcttcgagataaaggctgtgagtgaaatagagcctgctctcaagaaacaacttataatatccactgttgtgatgaccattggcattgcgctcatgttggcttggtcttccatacaccttcaccatttataactttggagcccagaagacagtgcaaagctggcaattgttcttgtgtgtggcggttggtctctgggctggcttagtcattggttttattactgagtactacacaagcaatgcctacagccctgtataagatgttgctgattcctgcagaactggagctgccactaatgtcatttttgggcttgctctgggttacaaatcagtcattatcccaatttttgctattgcgtttagtatcttccttagcttcagccttgctgccatgtatggtgttgttgtggctgctcttggaatgctgagtaccattgccacagaccttgctattgatgcctatggccctatcagtgataatgctggaagcttaagtctgtatgggtgcatcttatcatttatatgtatatctgaaagcttaagtatttttttaaatagaagatgtctggaaactttagtaacgacatgagtttcaggctttcagctatagcagtcttattcgcttttaagacagagaagatttttatttagagtttagaaagagtaggtgctatgggtgcatgttatcatttatgtggggaacatctctggtggaaattaatcagtaacgacatgagttaagacagagaagcttaagtattttttcagctatagcagtcttattcgcttttaagacagagaagcttaagtattttttgaatagaagatgtctggaaactttagtaacgacatgagttaatcagaagagatggaagggtagtttatcaacatgtatttggcacttcgccgaaaatgtcacttggactatcttgcaaactgaattttcagattggcttcttctgtctgaacattcagttcagtcttgcaggatttatttggtgtgc

SEQ ID NO: 21843 - DNA, 4384 bp, Zea Mays
ggttctttctccaccccgatgcccctccccctcccccgtgtgatcccctctccagatcgatgtctgccccggccgtaacccccgcggctcaccgcacgaaaccgccgcgagatcttggagctcagcctctgacgatggctacgactacctcgccaacctccgcgagctctgtccccctccctctcctccaccggcggcgggggatccttggccatgttcctcccgaggcgccggtccacgcgcttcggcctccgcgtggtcatcaagcctttctgatggctcggaacagaggtcagctatgcgatgtggcgtggcgaggttaccgcgggcgccgcggaggtggagggggaaggggaggacgagggcacgggcaagagagcgcatcgctgtggacggtctcgtgagagggaccttgggtgatccgggtgcttggtttcttggttctacggctttcgctgctgttggatttgccgagccggagccgacggagatgaccgtcgacgagctgaagctgcaggcaagggccagcggcggccacgacctaaggaccagttccccgtcggcatgcgcgtgctcgccgtcgacgacgacccgacctgcctcaaggtcctcgagaacctcttgttccgctgccagtaccatgtgacaacaatgggccaggcagccactgccctgagctgctgagggagaagaaggaccagtttgaccctgtgatcagcaacgtccacatgccggacatggacggcttcaagctcctcgagcttgtgggcctcgagatggaccttccggggattaacagctgaaaacctcgcccgatttgtaaagaagttttcttgttcaatgcggcattgaatttgggaggaatgacaagtctcatgaaaacttctgtatgccctacacgtgaccactaaaagaaagagttagacaggacaaaaggctgcagcggcagaagaagagcttttacatacccttacaatgctgattttgatggagatgaaatgaatttgcatgtccctcggacggaggaagctcgcactgaagcgcttaattctcataggggttcaaaataatttatgtactcctaagaatgtgatgggggatacttcaatgcaataatgagcttcccacaaaattacccaaacagcccaccatcagtcagatttacctctgaaatgtggcatccaaatggtcaactttttattagtgaaaatagtatttatttactccatctacagttatgttttctgacatcatgcataatatttgaggaaacgccagtctaacctgatgggcgggtttgtatctctattcttcatccacccagtgaagatccaaacggttatgagctcgcaagtgagcgatggacacctgtgcacacatctcattgtttcagtttatggtccaatttacaatggcttcactgtaaatgggaaaacaactcggtaggaatgcttttttgaattataaattatttctatttcatacgatgcttataggtatgtgatgagtcctccaatctgagaagtagagcatggtaaagcactccaagctgctctttcatcgggaaatttataggtgacacttgtgtcatacattgaactatggagtcaaacaaattacatattatccttcaacatttttcaccagtgggaactgtagttattgcgtagaatagatggtatattaatcgttgagagccaatgtttacattaactgttatgcagaagacaatttatgttttattttatatctaactgtactttgttgcagcttgtaggtactgatcacagcacattcaactccacacagattgtccatgtttctttcagtcaccatgatttatcactaggtcattgtgtttgtggccaacgagtattgttctaacagttatgttcccatagctagctagattcattgttgtgttttgttcagggtactttcaccacttctggtatggttctgtctgtaatgtgccagggattattatattgtttttggtttggatttggaatggtttggggtccacaacgatgatgcgtcagagctgttccaaggattggatgatttccattcccctgctgccaattcgactaggctcgccgtctccgctctgcccaactggcaccaagcagccaatggaacttgagcagccaatggatgatttccattcccctgctgccaattctccgaactgctttgacccttcaactcaatccgcatgtacccaggattctttgcttgctcttctacttctgaaaattcgcaaaatggatagataattccagttaattttaatccattacagcctattgtggcagcaaacagcgactgggtgcggaagccggaagggagaggcgcttggttgacccagaacggacgacaagacaccgccgggggttcgctgcaaccgcacgcgtggtggccggtgtgggaaggagcccactgctcaagcagcgacgacttccgtaacttctcaggccaagggagggagggcagcaaagaaagcaagcaagaaagaagccgattccactggtggttaaggttttggattaaaggagagaggttgcaactccctgggccaagcagtagcccagcaagttcagcaccaatggcagccatatgaaatataaggcaaagcagataaaaagcttaatttttttcaataaggtaaaggcaatgacagaaaagtgaggagggtcagaggtgtacagataaggatgagggctgaaaagaggagcaggaaggcatgctccatctgtgctacaagggtcagaatggacttgataggacatttgactatacaacatggaagttatttcaagatatccttttttaactatgctgtcgttgctgatcatttgcatttttacatttttcacattatactatagttgaagatacattcctgaggacgaatgggtgcagttatgggcttcctgcttgctgccagcagtcttttggtgcttttatattgctattaatttgtttgaaatttattatggtgatgactgggaaggtctttttgaggctattactggttatggccttggtggctctttggccgtgttggtggtggtatttataccaaggctgctgatgttggtgccgaccttgtggggaaggtagaaagaaacattcctgaggacgatccaagaaacccagctgtcattgctgacaatgttggtgataatgttggagatattgttggaatgggatcatatctctttggctcatatgctgaatcgtcatgtgctgctcttgttgtggcctcgatctcgtcttttggaatcaaccatcaatttactccaatggtgtatccccttcttgtcagctctgttggtattatagcatgtctcataacaacgctgtttgcaactgatttcttcgagataaaggctgtgagtgaaatagagcctgctctcaagaaacaacttataatatccactgttgtgatgaccattggcattgcgctcatgttggcttggtcttccatacaccttcaccatttataactttggagcccagaagacagtgcaaagctggcaattgttcttgtgtgtggcggttggtctctgggctggcttagtcattggttttattactgagtactacacaagcaatgcctacagccctgtataagatgttgctgattcctgcagaactggagctgccactaatgtcatttttgggcttgctctgggttacaaatcagtcattatcccaatttttgctattgcgtttagtatcttccttagcttcagccttgctgccatgtatggtgttgttgtggctgctcttggaatgctgagtaccattgccacagaccttgctattgatgcctatggccctatcagtgataatgctggaagcttaagtctgtatgggtgcatcttatcatttatatgtatatctgaaagcttaagtatttttttaaatagaagatgtctggaaactttagtaacgacatgagtttcaggctttcagctatagcagtcttattcgcttttaagacagagaagatttttatttagagtttagaaagagtaggtgctatgggtgcatgttatcatttatgtggggaacatctctggtggaaattaatcagtaacgacatgagttaagacagagaagcttaagtattttttcagctatagcagtcttattcgcttttaagacagagaagcttaagtattttttgaatagaagatgtctggaaactttagtaacgacatgagttaatcagaagagatggaagggtagtttatcaacatgtatttggcacttcgccgaaaatgtcacttggactatcttgcaaactgaattttcagattggcttcttctgtctgaacattcagttcagtcttgcaggatttatttggtgtgc

SEQ ID NO: 21844 - DNA, 5195 bp, Zea Mays
ggttctttctccaccccgatgcccctccccctcccccgtgtgatcccctctccagatcgatgtctgccccggccgtaacccccgcggctcaccgcacgaaaccgccgcgagatcttggagctcagcctctgacgatggctacgactacctcgccaacctccgcgagctctgtccccctccctctcctccaccggcggcgggggatccttggccatgttcctcccgaggcgccggtccacgcgcttcggcctccgcgtggtcatcaagcctttctgatggctcggaacagaggtcagctatgcgatgtggcgtggcgaggttaccgcgggcgccgcggaggtggagggggaaggggaggacgagggcacgggcaagagagcgcatcgctgtggacggtctcgtgagtgagtgctgctgcctgcccctctctctctgcctgcgttctcctggtgctgctctccctctcctcccctgcttcgacctcccgcctttccccaccgtttcttggatttctaggatccagacaaccgcccttgtgagcctgccttcctgcctactacctgcgtacgtacaggagggaccttgggtgatccgggtgcttggtttcttggttctacggctttcgctgctgttggatttgccgagccggagccgacggagatgaccgtcgacgagctgaagctgcaggcaagggccagcggcggccacgacctaaggaccagttccccgtcggcatgcgcgtgctcgccgtcgacgacgacccgacctgcctcaaggtcctcgagaacctcttgttccgctgccagtaccatgtgacaacaatgggccaggcagccactgccctgagctgctgagggagaagaaggaccagtttgaccctgtgatcagcaacgtccacatgccggacatggacggcttcaagctcctcgagcttgtgggcctcgagatggaccttccggggattaacagctgaaaacctcgcccgatttgtaaagaagttttcttgttcaatgcggcattgaatttgggaggaatgacaagtctcatgaaaacttctgtatgccctacacgtgaccactaaaagaaagagttagacaggacaaaaggctgcagcggcagaagaagagcttttacatacccttacaatgctgattttgatggagatgaaatgaatttgcatgtccctcggacggaggaagctcgcactgaagcgcttaattctcataggggttcaaaataatttatgtactcctaagaatggtgagatactggttgcttccgcgcaagacttcttgacctcatctttcttagatatgttttcgaattagattgggatggaaattcacatttgttatcacattttctgttagcaagcacaaccattgtgacattattttgcatgcactcagcctctcaccatggctatgagaatgaaattcaacttatagatataccaaaatgttatagaatcaatataattagatatgtcaagatgacaacacatatttcattcaactactatggatttttcattgataaaatacatgcttgatggctgcttgtctaaaatttatttgtttaatattctttgtttgtaagcccaagaatttgtaaaccaggaaataattccaatgaaagatcggtgcggggcggaattttcttggctttttgtagtggctaccgtagtacatcaacttgggcacttggcgacatgtccggtgcccagctccatcacatatcaatctgaaattaaacatgtgtctgagttctgaatgaaaaaattcagctaacagctaacactacgcactactaacagacctcaagcataatactgttgatttgatgtccttatatttatcttgaagcattgcattcatgcagtcatgtaaatagtactttatttatcttctgaccaacacactaataaccaacctttgcagtgatgggggatacttcaatgcaataatgagcttcccacaaaattacccaaacagcccaccatcagtcagatttacctctgaaatgtggcatccaaatgtctaacctgatgggcgggtttgtatctctattcttcatccacccagtgaagatccaaacggttatgagctcgcaagtgagcgatggacacctgtgcacacagtatgtgatgagtcctccaatctgagaagtagagcatggtaaagcactccaagctgctctttcatcgggaaatttataggtgacacttgtgtcatacattgaactatggagtcaaacaaattacatattatccttcaacatttttcaccagtgggaactgtagttattgcgtagaatagatggtatattaatcgttgagagccaatgtttacattaactgttatgcagaagacaatttatgttttattttatatctaactgtactttgttgcagcttgtaggtactgatcacagcacattcaactccacacagattgtccatgtttctttcagtcaccatgatttatcactaggtcattgtgtttgtggccaacgagtattgttctaacagttatgttcccatagctagctagattcattgttgtgttttgttcagggtactttcaccacttctggtatggttctgtctgtaatgtgccagggattattatattgtttttggtttggatttggaatggtttggggtccacaacgatgatgcgtcagagctgttccaaggattggatgatttccattcccctgctgccaattcgactaggctcgccgtctccgctctgcccaactggcaccaagcagccaatggaacttgagcagccaatggatgatttccattcccctgctgccaattctccgaactgctttgacccttcaactcaatccgcatgtacccagtaaatgttcaatctgaatttggatcattgctagcaggattctttgcttgctcttctacttctgaaaattcgcaaaatggatagataattccagttaattttaatccattacagcctattgtggcagcaaacagcgactgggtgcggaagccggaagggagaggcgcttggttgacccagaacggacgacaagacaccgccgggggttcgctgcaaccgcacgcgtggtggccggtgtgggaaggagcccactgctcaagcagcgacgacttccgtaacttctcaggccaagttgtagggagggagggcagcaaagaaagcaagcaagaaagaagccgattccactggtggttaaggttttggattaaaggagagaggtgcagagaaaaaaaggttgcaactccctgggccaagcagtagcccagcaagttcagcaccaatggcagccatatgaaatataaggcaaagcagataaaaagcttaatttttttcaataaggtaaaggcaatgacagaaaagtgaggagggtcagaggtgtacagataaggatgagggctgaaaagaggagcaggaagggcatgatgaaatcagtgtttgctatttagcctccttcacaactaagatcatcctacataatagatttagacaacaaaaacttatggagtttgctgaaatgccctttcaggcatgctccatctgtgctacaagggtcagaatggacttgataggacatttgactatacaacatggaagttatttcaagatatccttttttaactatgctgtcgttgctgatcatttgcatttttacatttttcacattatactatagttgaagatacattcctgaggacgaatgggtgcagttatgggcttcctgcttgctgccagcagtcttttggtgcttttatattgctattaatttgtttgaaatttattatggtgatgactgggaaggtctttttgaggctattactggttatggccttggtggctctttggccgtgttggtggtggtatttataccaaggctgctgatgttggtgccgaccttgtggggaaggtagaaagaaacattcctgaggacgatccaagaaacccagctgtcattgctgacaatgttggtgataatgttggagatattgttggaatgggatcatatctctttggctcatatgctgaatcgtcatgtgctgctcttgttgtggcctcgatctcgtcttttggaatcaaccatcaatttactccaatggtgtatccccttcttgtcagctctgttggtattatagcatgtctcataacaacgctgtttgcaactgatttcttcgagataaaggctgtgagtgaaatagagcctgctctcaagaaacaacttataatatccactgttgtgatgaccattggcattgcgctcatgttggcttggtcttccatacaccttcaccatttataactttggagcccagaagacagtgcaaagctggcaattgttcttgtgtgtggcggttggtctctgggctggcttagtcattggttttattactgagtactacacaagcaatgcctacagccctgtataagatgttgctgattcctgcagaactggagctgccactaatgtcatttttgggcttgctctgggttacaaatcagtcattatcccaatttttgctattgcgtttagtatcttccttagcttcagccttgctgccatgtatggtgttgttgtggctgctcttggaatgctgagtaccattgccacagaccttgctattgatgcctatggccctatcagtgataatgctggaagcttaagtctgtatgggtgcatcttatcatttatatgtatatctgaaagcttaagtatttttttaaatagaagatgtctggaaactttagtaacgacatgagtttcaggctttcagctatagcagtcttattcgcttttaagacagagaagatttttatttagagtttagaaagagtaggtgctatgggtgcatgttatcatttatgtggggaacatctctggtggaaattaatcagtaacgacatgagttaagacagagaagcttaagtattttttcagctatagcagtcttattcgcttttaagacagagaagcttaagtattttttgaatagaagatgtctggaaactttagtaacgacatgagttaatcagaagagatggaagggtagtttatcaacatgtatttggcacttcgccgaaaatgtcacttggactatcttgcaaactgaattttcagattggcttcttctgtctgaacattcagttcagtcttgcaggatttatttggtgtgc

SEQ ID NO: 21845 - DNA, 4912 bp, Zea Mays
ggttctttctccaccccgatgcccctccccctcccccgtgtgatcccctctccagatcgatgtctgccccggccgtaacccccgcggctcaccgcacgaaaccgccgcgagatcttggagctcagcctctgacgatggctacgactacctcgccaacctccgcgagctctgtccccctccctctcctccaccggcggcgggggatccttggccatgttcctcccgaggcgccggtccacgcgcttcggcctccgcgtggtcatcaagcctttctgatggctcggaacagaggtcagctatgcgatgtggcgtggcgaggttaccgcgggcgccgcggaggtggagggggaaggggaggacgagggcacgggcaagagagcgcatcgctgtggacggtctcgtgagtgagtgctgctgcctgcccctctctctctgcctgcgttctcctggtgctgctctccctctcctcccctgcttcgacctcccgcctttccccaccgtttcttggatttctaggatccagacaaccgcccttgtgagcctgccttcctgcctactacctgcgtacgtacaggagggaccttgggtgatccgggtgcttggtttcttggttctacggctttcgctgctgttggatttgccgagccggagccgacggagatgaccgtcgacgagctgaagctgcaggcaagggccagcggcggccacgacctaaggaccagttccccgtcggcatgcgcgtgctcgccgtcgacgacgacccgacctgcctcaaggtcctcgagaacctcttgttccgctgccagtaccatgtgacaacaatgggccaggcagccactgccctgagctgctgagggagaagaaggaccagtttgaccctgtgatcagcaacgtccacatgccggacatggacggcttcaagctcctcgagcttgtgggcctcgagatggaccttccggggattaacagctgaaaacctcgcccgatttgtaaagaagttttcttgttcaatgcggcattgaatttgggaggaatgacaagtctcatgaaaacttctgtatgccctacacgtgaccactaaaagaaagagttagacaggacaaaaggctgcagcggcagaagaagagcttttacatacccttacaatgctgattttgatggagatgaaatgaatttgcatgtccctcggacggaggaagctcgcactgaagcgcttaattctcataggggttcaaaataatttatgtactcctaagaatggtgagatactggttgcttccgcgcaagacttcttgacctcatctttcttagatatgttttcgaattagattgggatggaaattcacatttgttatcacattttctgttagcaagcacaaccattgtgacattattttgcatgcactcagcctctcaccatggctatgagaatgaaattcaacttatagatataccaaaatgttatagaatcaatataattagatatgtcaagatgacaacacatatttcattcaactactatggatttttcattgataaaatacatgcttgatggctgcttgtctaaaatttatttgtttaatattctttgtttgtaagcccaagaatttgtaaaccaggaaataattccaatgaaagatcggtgcggggcggaattttcttggctttttgtagtggctaccgtagtacatcaacttgggcacttggcgacatgtccggtgcccagctccatcacatatcaatctgaaattaaacatgtgtctgagttctgaatgaaaaaattcagctaacagctaacactacgcactactaacagacctcaagcataatactgttgatttgatgtccttatatttatcttgaagcattgcattcatgcagtcatgtaaatagtactttatttatcttctgaccaacacactaataaccaacctttgcagtgatgggggatacttcaatgcaataatgagcttcccacaaaattacccaaacagcccaccatcagtcagatttacctctgaaatgtggcatccaaatgtctaacctgatgggcgggtttgtatctctattcttcatccacccagtgaagatccaaacggttatgagctcgcaagtgagcgatggacacctgtgcacacagtatgtgatgagtcctccaatctgagaagtagagcatggtaaagcactccaagctgctctttcatcgggaaatttataggtgacacttgtgtcatacattgaactatggagtcaaacaaattacatattatccttcaacatttttcaccagtgggaactgtagttattgcgtagaatagatggtatattaatcgttgagagccaatgtttacattaactgttatgcagaagacaatttatgttttattttatatctaactgtactttgttgcagcttgtaggtactgatcacagcacattcaactccacacagattgtccatgtttctttcagtcaccatgatttatcactaggtcattgtgtttgtggccaacgagtattgttctaacagttatgttcccatagctagctagattcattgttgtgttttgttcagggtactttcaccacttctggtatggttctgtctgtaatgtgccagggattattatattgtttttggtttggatttggaatggtttggggtccacaacgatgatgcgtcagagctgttccaaggattggatgatttccattcccctgctgccaattcgactaggctcgccgtctccgctctgcccaactggcaccaagcagccaatggaacttgagcagccaatggatgatttccattcccctgctgccaattctccgaactgctttgacccttcaactcaatccgcatgtacccagtaaatgttcaatctgaatttggatcattgctagcaggattctttgcttgctcttctacttctgaaaattcgcaaaatggatagataattccagttaattttaatccattacagcctattgtggcagcaaacagcgactgggtgcggaagccggaagggagaggcgcttggttgacccagaacggacgacaagacaccgccgggggttcgctgcaaccgcacgcgtggtggccggtgtgggaaggagcccactgctcaagcagcgacgacttccgtaacttctcaggccaagggcatgatgaaatcagtgtttgctatttagcctccttcacaactaagatcatcctacataatagatttagacaacaaaaacttatggagtttgctgaaatgccctttcaggcatgctccatctgtgctacaagggtcagaatggacttgataggacatttgactatacaacatggaagttatttcaagatatccttttttaactatgctgtcgttgctgatcatttgcatttttacatttttcacattatactatagttgaagatacattcctgaggacgaatgggtgcagttatgggcttcctgcttgctgccagcagtcttttggtgcttttatattgctattaatttgtttgaaatttattatggtgatgactgggaaggtctttttgaggctattactggttatggccttggtggctctttggccgtgttggtggtggtatttataccaaggctgctgatgttggtgccgaccttgtggggaaggtagaaagaaacattcctgaggacgatccaagaaacccagctgtcattgctgacaatgttggtgataatgttggagatattgttggaatgggatcatatctctttggctcatatgctgaatcgtcatgtgctgctcttgttgtggcctcgatctcgtcttttggaatcaaccatcaatttactccaatggtgtatccccttcttgtcagctctgttggtattatagcatgtctcataacaacgctgtttgcaactgatttcttcgagataaaggctgtgagtgaaatagagcctgctctcaagaaacaacttataatatccactgttgtgatgaccattggcattgcgctcatgttggcttggtcttccatacaccttcaccatttataactttggagcccagaagacagtgcaaagctggcaattgttcttgtgtgtggcggttggtctctgggctggcttagtcattggttttattactgagtactacacaagcaatgcctacagccctgtataagatgttgctgattcctgcagaactggagctgccactaatgtcatttttgggcttgctctgggttacaaatcagtcattatcccaatttttgctattgcgtttagtatcttccttagcttcagccttgctgccatgtatggtgttgttgtggctgctcttggaatgctgagtaccattgccacagaccttgctattgatgcctatggccctatcagtgataatgctggaagcttaagtctgtatgggtgcatcttatcatttatatgtatatctgaaagcttaagtatttttttaaatagaagatgtctggaaactttagtaacgacatgagtttcaggctttcagctatagcagtcttattcgcttttaagacagagaagatttttatttagagtttagaaagagtaggtgctatgggtgcatgttatcatttatgtggggaacatctctggtggaaattaatcagtaacgacatgagttaagacagagaagcttaagtattttttcagctatagcagtcttattcgcttttaagacagagaagcttaagtattttttgaatagaagatgtctggaaactttagtaacgacatgagttaatcagaagagatggaagggtagtttatcaacatgtatttggcacttcgccgaaaatgtcacttggactatcttgcaaactgaattttcagattggcttcttctgtctgaacattcagttcagtcttgcaggatttatttggtgtgc

SEQ ID NO: 21846 - DNA, 4807 bp, Zea Mays
ggttctttctccaccccgatgcccctccccctcccccgtgtgatcccctctccagatcgatgtctgccccggccgtaacccccgcggctcaccgcacgaaaccgccgcgagatcttggagctcagcctctgacgatggctacgactacctcgccaacctccgcgagctctgtccccctccctctcctccaccggcggcgggggatccttggccatgttcctcccgaggcgccggtccacgcgcttcggcctccgcgtggtcatcaagcctttctgatggctcggaacagagccggagccgacggagatgaccgtcgacgagctgaagctgcaggcaagggccagcggcggccacgacctaaggaccagttccccgtcggcatgcgcgtgctcgccgtcgacgacgacccgacctgcctcaaggtcctcgagaacctcttgttccgctgccagtaccatgtgacaacaatgggccaggcagccactgccctgagctgctgagggagaagaaggaccagtttgaccctgtgatcagcaacgtccacatgccggacatggacggcttcaagctcctcgagcttgtgggcctcgagatggaccttccggggattagtgaagcggcagaagaagagcttttacatacccttacaatgctgattttgatggagatgaaatgaatttgcatgtccctcggacggaggaagctcgcactgaagcgcttaattctcataggggttcaaaataatttatgtactcctaagaatgtgatgggggatacttcaatgcaataatgagcttcccacaaaattacccaaacagcccaccatcagtcagatttacctctgaaatgtggcatccaaatggtcaactttttattagtgaaaatagtatttatttactccatctacagttatgttttctgacatcatgcataatatttgaggaaacgccagtctaacctgatgggcgggtttgtatctctattcttcatccacccagtgaagatccaaacggttatgagctcgcaagtgagcgatggacacctgtgcacacacttgtaggtactgatcacagcacattcaactccacacagattgtccatgtttctttcagtcaccatgatttatcactaggtcattgtgtttgtggccaacgagtattgttctaacagttatgttcccatagctagctagattcattgttgtgttttgttcagggtactttcaccacttctggtatggttctgtctgtaatgtgccagggattattatattgtttttggtttggatttggaatggtttggggtccacaacgatgatgcgtcagagctgttccaaggattggatgatttccattcccctgctgccaattcgactaggctcgccgtctccgctctgcccaactggcaccaagcagccaatggaacttgagcagccaatggatgatttccattcccctgctgccaattctccgaactgctttgacccttcaactcaatccgcatgtacccagcctattgtggcagcaaacagcgactgggtgcggaagccggaagggagaggcgcttggttgacccagaacggacgacaagacaccgccgggggttcgctgcaaccgcacgcgtggtggccggtgtgggaaggagcccactgctcaagcagcgacgacttccgtaacttctcaggccaagggcatgatgaaatcagtgtttgctatttagcctccttcacaactaagatcatcctacataatagatttagacaacaaaaacttatggagtttgctgaaatgccctttcaggcatgctccatctgtgctacaaggttatgggcttcctgcttgctgccagcagtcttttggtgcttttatattgctattaatttgtttgaaatttattatggtgatgactgggaaggtctttttgaggctattactggttatggccttggtggctctttggccgtgttggtggtggtatttataccaaggctgctgatgttggtgccgaccttgtggggaaggtagaaagaaacattcctgaggacgatccaagaaacccagctgtcattgctgacaatgttggtgataatgttggagatattgttggaatgggatcatatctctttggctcatatgctgaatcgtcatgtgctgctcttgttgtggcctcgatctcgtcttttggaatcaaccatcaatttactccaatggtgtatccccttcttgtcagctctgttggtattatagcatgtctcataacaacgctgtttgcaactgatttcttcgagataaaggctgtgagtgaaatagagcctgctctcaagaaacaacttataatatccactgttgtgatgaccattggcattgcgctcatgttggcttggtcttccatacaccttcaccatttataactttggagcccagaagacagtgcaaagctggcaattgttcttgtgtgtggcggttggtctctgggctggcttagtcattggttttattactgagtactacacaagcaatgcctacagccctgtataagatgttgctgattcctgcagaactggagctgccactaatgtcatttttgggcttgctctgggttacaaatcagtcattatcccaatttttgctattgcgtttagtatcttccttagcttcagccttgctgccatgtatggtgttgttgtggctgctcttggaatgctgagtaccattgccacagaccttgctattgatgcctatggccctatcagtgataatgctggaagcttaagtctctccaccgccaccaccataggcggcgctccaaacacggtggcgccatgcgcgccggcgtggtgcggggacttggccatctcctacccgttctggctcgcaggcacgcatctgcccaagtgtggctacgaccaagggttcaaggttacctgtgacaaagccaaggacgatggcacttgcaacatcgacaagttcgtcaatgcctccttcgtccccagcccgccgttcgaaatcgagccccaacaaaaccaggagctgttcttcgtctacgactgcaacctgcgagcgccgcagctgcctcggtcttggacacccttgcgctgtggcaataatggctcgttcacctggctttctggggagtacaggcccgaagacagctccatggcgatgccggggaactgcaacgttgcgatgataccggtggtggcgtacgagggggcgaccgcggcagattatcagtggttcgtggagggaggtttttttcttagttactacctcacggacactgaggacgacgactactacgaccagtgccaagcttgctcgtaccgcgctggccacggccaatgccggacaattgtcagtgacaatgggttccagtgctactgctctgacggcgtctactcgacgacggcctgcggaaccaagagggctaactggaagacaacaattgtagttgtagttgaatcgaagcgggaactgaatcaagaatgttctatttatatcggtctcagttgcatggaagcgataactgaatcaagaattctctatttatatcgatctcagccattttgaaggatgaacgagcaccaggagagagtccgggaggaggcatatactgttgggacgtgtccaagccagtggagatgcagtggagatggaggagatcgacattggcatggagaagctgcgaaacccaccgcagcagaaccccacctagaggaagaagtagaaaacttgtgccggtatgagcttcctaatgagagctgggaagtaaatttgcctcctgaaaaggtgtctcctgagctcccagtaccaacattaggcataaactttgcaagagatggaatccagaaaaaagagtggttgtccatggttgctgcacacagtgatgcatggttactttctgttgcattttatcttggtgctcaatttggtttcaataaaaattacaggagccggaagagttctcgttgaggagaagcttgttgcgacccaaagagagaggacacatacatgtggacgcgagacgactagagccagaggaggactgggcacgcagaagagcgaggaggacaacgagtcctcacacctcaccgccaggacgtcgtagataattttggttttcttgtgattctctttatgaagtgggtggtacctcaaaagacatagatgatctgttgacttatggcagtcgggcattacatttttttgcatgaaatcgacatctgaggagtgataattttgttttgatcgcttctctattgcaagatttagatggctactatcctttgcgattgatcaagaatggtgagctattctaaggaagcttctgaacaatatacccgctgtcctagagtgtcatagatcagggttgagatgattccatcatacttatacgaagattttcctagcaaggcaagggataatgggtacttgctctgtgatgactcaaaaagaatgagattgatcgattgtgtagctgttgtagctccaattgagaaatattatcagtattaagctgctttgatggttgcccggtctattgcttgcatgtagcatgcatctccgcggagatccaagttgttatgctttgagctattgcatcaagagtttaagatagtctttatatattttactaaaacttgtgcatgtacatggagtgcgtgaatgaatcatcaaaggctataatgtctacccgtgtgatatatttagaaaccgtagcaacacacgggcatctaactataaaacatatacatcaatattgtttgaattcactaattttctaaaatgattaatattttagaacagag

SEQ ID NO: 21847 - DNA, 4852 bp, Zea Mays
ggttctttctccaccccgatgcccctccccctcccccgtgtgatcccctctccagatcgatgtctgccccggccgtaacccccgcggctcaccgcacgaaaccgccgcgagatcttggagctcagcctctgacgatggctacgactacctcgccaacctccgcgagctctgtccccctccctctcctccaccggcggcgggggatccttggccatgttcctcccgaggcgccggtccacgcgcttcggcctccgcgtggtcatcaaggtcctaccaccgcctcacctcctccttgccgccgtgcggttgagcgccgacgacgttcgggctccggcggttcctgcatggaccggaagagccatctcatactctttctctacagcctttctgatggctcggaacagagccggagccgacggagatgaccgtcgacgagctgaagctgcaggcaagggccagcggcggccacgacctaaggaccagttccccgtcggcatgcgcgtgctcgccgtcgacgacgacccgacctgcctcaaggtcctcgagaacctcttgttccgctgccagtaccatggtacttcccctgacaacaatgggccaggcagccactgccctgagctgctgagggagaagaaggaccagtttgaccctgtgatcagcaacgtccacatgccggacatggacggcttcaagctcctcgagcttgtgggcctcgagatggaccttccggggattaggtactttcaccacttctggtatggttctgtctgtaatgtgccagggattattatattgtttttggtttggatttggaatggtttggggtccacaacgatgatgcgtcagagctgttccaaggattggatgatttccattcccctgctgccaattcgactaggctcgccgtctccgctctgcccaactggcaccaagcagccaatggaacttgagcagccaatggatgatttccattcccctgctgccaattctccgaactgctttgacccttcaactcaatccgcatgtacccagcctattgtggcagcaaacagcgactgggtgcggaagccggaagggagaggcgcttggttgacccagaacggacgacaagacaccgccgggggttcgctgcaaccgcacgcgtggtggccggtgtgggaaggagcccactgctcaagcagcgacgacttccgtaacttctcaggccaagttgtagggagggagggcagcaaagaaagcaagcaagaaagaagccgattccactggtggttaaggttttggattaaaggagagaggtgcagagaaaaaaaggttgcaactccctgggccaagcagtagcccagcaagttcagcaccaatggcagccatatgaaatataaggcaaagcagataaaaagcttaatttttttcaataaggtaaaggcaatgacagaaaagtgaggagggtcagaggtgtacagataaggatgagggctgaaaagaggagcaggaaggcatgctccatctgtgctacaagggtcagaatggacttgataggacatttgactatacaacatggaagttatttcaagatatccttttttaactatgctgtcgttgctgatcatttgcatttttacatttttcacattatactatagttgaagatacattcctgaggacgaatgggtgcagttatgggcttcctgcttgctgccagcagtcttttggtgcttttatattgctattaatttgtttgaaatttattatggtgatgactgggaaggtctttttgaggctattactggttatggccttggtggctctttggccgtgttggtggtggtatttataccaaggctgctgatgttggtgccgaccttgtggggaaggtagaaagaaacattcctgaggacgatccaagaaacccagctgtcattgctgacaatgttggtgataatgttggagatattgttggaatgggatcatatctctttggctcatatgctgaatcgtcatgtgctgctcttgttgtggcctcgatctcgtcttttggaatcaaccatcaatttactccaatggtgtatccccttcttgtcagctctgttggtattatagcatgtctcataacaacgctgtttgcaactgatttcttcgagataaaggctgtgagtgaaatagagcctgctctcaagaaacaacttataatatccactgttgtgatgaccattggcattgcgctcatgttggcttggtcttccatacaccttcaccatttataactttggagcccagaagacagtgcaaagctggcaattgttcttgtgtgtggcggttggtctctgggctggcttagtcattggttttattactgagtactacacaagcaatgcctacagccctgtataagatgttgctgattcctgcagaactggagctgccactaatgtcatttttgggcttgctctgggttacaaatcagtcattatcccaatttttgctattgcgtttagtatcttccttagcttcagccttgctgccatgtatggtgttgttgtggctgctcttggaatgctgagtaccattgccacagaccttgctattgatgcctatggccctatcagtgataatgctggaagcttaagtctctccaccgccaccaccataggcggcgctccaaacacggtggcgccatgcgcgccggcgtggtgcggggacttggccatctcctacccgttctggctcgcaggcacgcatctgcccaagtgtggctacgaccaagggttcaaggttacctgtgacaaagccaaggacgatggcacttgcaacatcgacaagttcgtcaatgcctccttcgtccccagcccgccgttcgaaatcgagccccaacaaaaccaggagctgttcttcgtctacgactgcaacctgcgagcgccgcagctgcctcggtcttggacacccttgcgctgtggcaataatggctcgttcacctggctttctggggagtacaggcccgaagacagctccatggcgatgccggggaactgcaacgttgcgatgataccggtggtggcgtacgagggggcgaccgcggcagattatcagtggttcgtggagggaggtttttttcttagttactacctcacggacactgaggacgacgactactacgaccagtgccaagcttgctcgtaccgcgctggccacggccaatgccggacaattgtcagtgacaatgggttccagtgctactgctctgacggcgtctactcgacgacggcctgcggaaccaagagggctaactggaagacaacaattgtagttgtagttgaatcgaagcgggaactgaatcaagaatgttctatttatatcggtctcagttgcatggaagcgataactgaatcaagaattctctatttatatcgatctcagccattttgaaggatgaacgagcaccaggagagagtccgggaggaggcatatactgttgggacgtgtccaagccagtggagatgcagtggagatggaggagatcgacattggcatggagaagctgcgaaacccaccgcagcagaaccccacctagaggaagaagtagaaaacttgtgccggtatgagcttcctaatgagagctgggaagtaaatttgcctcctgaaaaggtgtctcctgagctcccagtaccaacattaggcataaactttgcaagagatggaatccagaaaaaagagtggttgtccatggttgctgcacacagtgatgcatggttactttctgttgcattttatcttggtgctcaatttggtttcaataaaaattacaggagccggaagagttctcgttgaggagaagcttgttgcgacccaaagagagaggacacatacatgtggacgcgagacgactagagccagaggaggactgggcacgcagaagagcgaggaggacaacgagtcctcacacctcaccgccaggacgtcgtagataattttggttttcttgtgattctctttatgaagtgggtggtacctcaaaagacatagatgatctgttgacttatggcagtcgggcattacatttttttgcatgaaatcgacatctgaggagtgataattttgttttgatcgcttctctattgcaagatttagatggctactatcctttgcgattgatcaagaatggtgagctattctaaggaagcttctgaacaatatacccgctgtcctagagtgtcatagatcagggttgagatgattccatcatacttatacgaagattttcctagcaaggaatggtttgaacaatgttgtgattaggcaagggataatgggtacttgctctgtgatgactcaaaaagaatgagattgatcgtacgtacggggagagttcctccatagacaaagatgaaaaaaagaccttgtatttgatagaatgtgctgatccattcctcaaaccgaatagaaatgtgaggtcggttgtgattaatcttttgatcttaggtaaggtcaaggttctactgggctgctcgctgttgcaggattgtgtagctgttgtagctccaattgagaaatattatcagtattaagctgctttgatggttgcccggtctattgcttgcatgtagcatgcatctccgcggagatccaagttgttatgctttgagctattgcatcaagagtttaagatagtctttatatattttactaaaacttgtgcatgtacatggagtgcgtgaatgaatcatcaaaggctataatgtctacccgtgtgatatatttagaaaccgtagcaacacacgggcatctaactataaaacatatacatcaatattgtttgaattcactaattttctaaaatgattaatattttagaacagag

SEQ ID NO: 21848 - DNA, 6903 bp, Zea Mays
ggttctttctccaccccgatgcccctccccctcccccgtgtgatcccctctccagatcgatgtctgccccggccgtaacccccgcggctcaccgcacgaaaccgccgcgagatcttggagctcagcctctgacgatggctacgactacctcgccaacctccgcgagctctgtccccctccctctcctccaccggcggcgggggatccttggccatgttcctcccgaggcgccggtccacgcgcttcggcctccgcgtggtcatcaagcctttctgatggctcggaacagaggtcagctatgcgatgtggcgtggcgaggttaccgcgggcgccgcggaggtggagggggaaggggaggacgagggcacgggcaagagagcgcatcgctgtggacggtctcgtgagtgagtgctgctgcctgcccctctctctctgcctgcgttctcctggtgctgctctccctctcctcccctgcttcgacctcccgcctttccccaccgtttcttggatttctaggatccagacaaccgcccttgtgagcctgccttcctgcctactacctgcgtacgtacaggagggaccttgggtgatccgggtgcttggtttcttggttctacggctttcgctgctgttggatttgccgagccggagccgacggagatgaccgtcgacgagctgaagctgcaggcaagggccagcggcggccacgacctaaggaccagttccccgtcggcatgcgcgtgctcgccgtcgacgacgacccgacctgcctcaaggtcctcgagaacctcttgttccgctgccagtaccatgtgacaacaatgggccaggcagccactgccctgagctgctgagggagaagaaggaccagtttgaccctgtgatcagcaacgtccacatgccggacatggacggcttcaagctcctcgagcttgtgggcctcgagatggaccttccggggattaacagctgaaaacctcgcccgatttgtaaagaagttttcttgttcaatgcggcattgaatttgggaggaatgacaagtctcatgaaaacttctgtatgccctacacgtgaccactaaaagaaagagttagacaggacaaaaggctgcaggtataatgaacgccaattagtttcctacaggaacttcaattatttctggtggttcagtgtacaatgtgcacagcctctacacaaaaccccattccaattgatatggttttgttactcgattatgctttggtccgaggtgaagcggcagaagaagagcttttacatacccttacaatgctgattttgatggagatgaaatgaatttgcatgtccctcggacggaggaagctcgcactgaagcgcttaattctcataggggttcaaaataatttatgtactcctaagaatggtgagatactggttgcttccgcgcaagacttcttgacctcatctttcttagatatgttttcgaattagattgggatggaaattcacatttgttatcacattttctgttagcaagcacaaccattgtgacattattttgcatgcactcagcctctcaccatggctatgagaatgaaattcaacttatagatataccaaaatgttatagaatcaatataattagatatgtcaagatgacaacacatatttcattcaactactatggatttttcattgataaaatacatgcttgatggctgcttgtctaaaatttatttgtttaatattctttgtttgtaagcccaagaatttgtaaaccaggaaataattccaatgaaagatcggtgcggggcggaattttcttggctttttgtagtggctaccgtagtacatcaacttgggcacttggcgacatgtccggtgcccagctccatcacatatcaatctgaaattaaacatgtgtctgagttctgaatgaaaaaattcagctaacagctaacactacgcactactaacagacctcaagcataatactgttgatttgatgtccttatatttatcttgaagcattgcattcatgcagtcatgtaaatagtactttatttatcttctgaccaacacactaataaccaacctttgcagtgatgggggatacttcaatgcaataatgagcttcccacaaaattacccaaacagcccaccatcagtcagatttacctctgaaatgtggcatccaaatggtcaactttttattagtgaaaatagtatttatttactccatctacagttatgttttctgacatcatgcataatatttgaggaaacgccagtctaacctgatgggcgggtttgtatctctattcttcatccacccagtgaagatccaaacggttatgagctcgcaagtgagcgatggacacctgtgcacacagtatggcttcgtatactttgtttacatatcttttccccattgtaatgttactcatctcccttttatgtgtatactttttagagagaaaattaccttgtagtctcattgtttcagtttatggtccaatttacaatggcttcactgtaaatgggaaaacaactcggtaggaatgcttttttgaattataaattatttctatttcatacgatgcttataggtatgtgatgagtcctccaatctgagaagtagagcatggtaaagcactccaagctgctctttcatcgggaaatttataggtgacacttgtgtcatacattgaactatggagtcaaacaaattacatattatccttcaacatttttcaccagtgggaactgtagttattgcgtagaatagatggtatattaatcgttgagagccaatgtttacattaactgttatgcagaagacaatttatgttttattttatatctaactgtactttgttgcagcttgtaggtactgatcacagcacattcaactccacacagattgtccatgtttctttcagtcaccatgatttatcactaggtcattgtgtttgtggccaacgagtattgttctaacagttatgttcccatagctagctagattcattgttgtgttttgttcagggtactttcaccacttctggtatggttctgtctgtaatgtgccagggattattatattgtttttggtttggatttggaatggtttggggtccacaacgatgatgcgtcagagctgttccaaggattggatgatttccattcccctgctgccaattcgactaggctcgccgtctccgctctgcccaactggcaccaagcagccaatggaacttgagcagccaatggatgatttccattcccctgctgccaattctccgaactgctttgacccttcaactcaatccgcatgtacccagtaaatgttcaatctgaatttggatcattgctagcaggattctttgcttgctcttctacttctgaaaattcgcaaaatggatagataattccagttaattttaatccattacagcctattgtggcagcaaacagcgactgggtgcggaagccggaagggagaggcgcttggttgacccagaacggacgacaagacaccgccgggggttcgctgcaaccgcacgcgtggtggccggtgtgggaaggagcccactgctcaagcagcgacgacttccgtaacttctcaggccaagttgtagggagggagggcagcaaagaaagcaagcaagaaagaagccgattccactggtggttaaggttttggattaaaggagagaggtgcagagaaaaaaaggcaatcttactcttaatctctgtgtccacatcacttccgatcatgccgtgatcgacagaagtacgggtgccatgtataagtgccccctccaactcaccaaagtaataaggagcagctgctgcaggttgcaactccctgggccaagcagtagcccagcaagttcagcaccaatggcagccatatgaaatataaggcaaagcagataaaaagcttaatttttttcaataaggtaaaggcaatgacagaaaagtgaggagggtcagaggtgtacagataaggatgagggctgaaaagaggagcaggaagggcatgatgaaatcagtgtttgctatttagcctccttcacaactaagatcatcctacataatagatttagacaacaaaaacttatggagtttgctgaaatgccctttcaggcatgctccatctgtgctacaagggtcagaatggacttgataggacatttgactatacaacatggaagttatttcaagatatccttttttaactatgctgtcgttgctgatcatttgcatttttacatttttcacattatactatagttgaagatacattcctgaggacgaatgggtgcagttatgggcttcctgcttgctgccagcagtcttttggtgcttttatattgctattaatttgtttgaaatttattatggtgatgactgggaaggtctttttgaggctattactggttatggccttggtggctctttggccgtgttggtggtggtatttataccaaggctgctgatgttggtgccgaccttgtggggaaggtagaaagaaacattcctgaggacgatccaagaaacccagctgtcattgctgacaatgttggtgataatgttggagatattgttggaatgggatcatatctctttggctcatatgctgaatcgtcatgtgctgctcttgttgtggcctcgatctcgtcttttggaatcaaccatcaatttactccaatggtgtatccccttcttgtcagctctgttggtattatagcatgtctcataacaacgctgtttgcaactgatttcttcgagataaaggctgtgagtgaaatagagcctgctctcaagaaacaacttataatatccactgttgtgatgaccattggcattgcgctcatgttggcttggtcttccatacaccttcaccatttataactttggagcccagaagacagtgcaaagctggcaattgttcttgtgtgtggcggttggtctctgggctggcttagtcattggttttattactgagtactacacaagcaatgcctacagccctgtataagatgttgctgattcctgcagaactggagctgccactaatgtcatttttgggcttgctctgggttacaaatcagtcattatcccaatttttgctattgcgtttagtatcttccttagcttcagccttgctgccatgtatggtgttgttgtggctgctcttggaatgctgagtaccattgccacagaccttgctattgatgcctatggccctatcagtgataatgctggaagcttaagtctctccaccgccaccaccataggcggcgctccaaacacggtggcgccatgcgcgccggcgtggtgcggggacttggccatctcctacccgttctggctcgcaggcacgcatctgcccaagtgtggctacgaccaagggttcaaggttacctgtgacaaagccaaggacgatggcacttgcaacatcgacaagttcgtcaatgcctccttcgtccccagcccgccgttcgaaatcgagccccaacaaaaccaggagctgttcttcgtctacgactgcaacctgcgagcgccgcagctgcctcggtcttggacacccttgcgctgtggcaataatggctcgttcacctggctttctggggagtacaggcccgaagacagctccatggcgatgccggggaactgcaacgttgcgatgataccggtggtggcgtacgagggggcgaccgcggcagattatcagtggttcgtggagggaggtttttttcttagttactacctcacggacactgaggacgacgactactacgaccagtgccaagcttgctcgtaccgcgctggccacggccaatgccggacaattgtcagtgacaatgggttccagtgctactgctctgacggcgtctactcgacgacggcctgcggaaccaagagggctaactggaagacaacaattgtagaaagatatggcaacaaatgtggcaaacacgatctatctaattctaagaccatttttgtagttgaatcgaagcgggaactgaatcaagaatgttctatttatatcggtctcaggatgaacgagcaccaggagagagtccgggaggaggcatatactgttgggacgtgtccaagccagtggagatgcagtggagatggaggagatcgacattggcatggagaagctgcgaaacccaccgcagcagaaccccacctagaggaagaagtagaaaacttgtgccggtatgagcttcctaatgagagctgggaagtaaatttgcctcctgaaaaggtgtctcctgagctcccagtaccaacattaggcataaactttgcaagagatggaatccagaaaaaagagtggttgtccatggttgctgcacacagtgatgcatggttactttctgttgcattttatcttggtgctcaatttggtttcaataaaaattacagtaattctgaaaatatgaggcaaactgacctcaacagggttgagatgattccatcatacttatacgaagattttcctagcaaggcaagggataatgggtacttgctctgtgatgactcaaaaagaatgagattgatcgattgtgtagctgttgtagctccaattgagaaatattatcagtattaagctgctttgatggttgcccggtctattgcttgcatgtagcatgcatctccgcggagatccaagttgttatgctttgagctattgcatcaagagtttaagatagtctttatatattttactaaaacttgtgcatgtacatggagtgcgtgaatgaatcatcaaaggctataatgtctacccgtgtgatatatttagaaaccgtagcaacacacgggcatctaactataaaacatatacatcaatattgtttgaattcactaattttctaaaatgattaatattttagaacagag

SEQ ID NO: 21849 - DNA, 7310 bp, Zea Mays
ggttctttctccaccccgatgcccctccccctcccccgtgtgatcccctctccagatcgatgtctgccccggccgtaacccccgcggctcaccgcacgaaaccgccgcgagatcttggagctcagcctctgacgatggctacgactacctcgccaacctccgcgagctctgtccccctccctctcctccaccggcggcgggggatccttggccatgttcctcccgaggcgccggtccacgcgcttcggcctccgcgtggtcatcaaggtcctaccaccgcctcacctcctccttgccgccgtgcggttgagcgccgacgacgttcgggctccggcggttcctgcatggaccggaagagccatctcatactctttctctacagcctttctgatggctcggaacagagccggagccgacggagatgaccgtcgacgagctgaagctgcaggcaagggccagcggcggccacgacctaaggaccagttccccgtcggcatgcgcgtgctcgccgtcgacgacgacccgacctgcctcaaggtcctcgagaacctcttgttccgctgccagtaccatgtgacaacaatgggccaggcagccactgccctgagctgctgagggagaagaaggaccagtttgaccctgtgatcagcaacgtccacatgccggacatggacggcttcaagctcctcgagcttgtgggcctcgagatggaccttccggggattaacagctgaaaacctcgcccgatttgtaaagaagttttcttgttcaatgcggcattgaatttgggaggaatgacaagtctcatgaaaacttctgtatgccctacacgtgaccactaaaagaaagagttagacaggacaaaaggctgcagcggcagaagaagagcttttacatacccttacaatgctgattttgatggagatgaaatgaatttgcatgtccctcggacggaggaagctcgcactgaagcgcttaattctcataggggttcaaaataatttatgtactcctaagaatggtgagatactggttgcttccgcgcaagacttcttgacctcatctttcttagatatgttttcgaattagattgggatggaaattcacatttgttatcacattttctgttagcaagcacaaccattgtgacattattttgcatgcactcagcctctcaccatggctatgagaatgaaattcaacttatagatataccaaaatgttatagaatcaatataattagatatgtcaagatgacaacacatatttcattcaactactatggatttttcattgataaaatacatgcttgatggctgcttgtctaaaatttatttgtttaatattctttgtttgtaagcccaagaatttgtaaaccaggaaataattccaatgaaagatcggtgcggggcggaattttcttggctttttgtagtggctaccgtagtacatcaacttgggcacttggcgacatgtccggtgcccagctccatcacatatcaatctgaaattaaacatgtgtctgagttctgaatgaaaaaattcagctaacagctaacactacgcactactaacagacctcaagcataatactgttgatttgatgtccttatatttatcttgaagcattgcattcatgcagtcatgtaaatagtactttatttatcttctgaccaacacactaataaccaacctttgcagtgatgggggatacttcaatgcaataatgagcttcccacaaaattacccaaacagcccaccatcagtcagatttacctctgaaatgtggcatccaaatggtcaactttttattagtgaaaatagtatttatttactccatctacagttatgttttctgacatcatgcataatatttgaggaaacgccagtctaacctgatgggcgggtttgtatctctattcttcatccacccagtgaagatccaaacggttatgagctcgcaagtgagcgatggacacctgtgcacacacttgtaggtactgatcacagcacattcaactccacacagattgtccatgtttctttcagtcaccatgatttatcactaggtcattgtgtttgtggccaacgagtattgttctaacagttatgttcccatagctagctagattcattgttgtgttttgttcagggtactttcaccacttctggtatggttctgtctgtaatgtgccagggattattatattgtttttggtttggatttggaatggtttggggtccacaacgatgatgcgtcagagctgttccaaggattggatgatttccattcccctgctgccaattcgactaggctcgccgtctccgctctgcccaactggcaccaagcagccaatggaacttgagcagccaatggatgatttccattcccctgctgccaattctccgaactgctttgacccttcaactcaatccgcatgtacccagtaaatgttcaatctgaatttggatcattgctagcaggattctttgcttgctcttctacttctgaaaattcgcaaaatggatagataattccagttaattttaatccattacagcctattgtggcagcaaacagcgactgggtgcggaagccggaagggagaggcgcttggttgacccagaacggacgacaagacaccgccgggggttcgctgcaaccgcacgcgtggtggccggtgtgggaaggagcccactgctcaagcagcgacgacttccgtaacttctcaggccaagttgtagggagggagggcagcaaagaaagcaagcaagaaagaagccgattccactggtggttaaggttttggattaaaggagagaggtgcagagaaaaaaaggcaatcttactcttaatctctgtgtccacatcacttccgatcatgccgtgatcgacagaagtacgggtgccatgtataagtgccccctccaactcaccaaagtaataaggagcagctgctgcaggttgcaactccctgggccaagcagtagcccagcaagttcagcaccaatggcagccatatgaaatataaggcaaagcagataaaaagcttaatttttttcaataaggtaaaggcaatgacagaaaagtgaggagggtcagaggtgtacagataaggatgagggctgaaaagaggagcaggaaggtaagatcacttgcaccaataatagggatcaccgtgaattaaaagatgagtagtgatcatgtcagttaaatgctcatcatgtttcttcttaggctttcttatttatatctacatctgtgtgaattttttgtactataaatttgtgccttctcgctaatataatgttttattactgtcagtatattaagtggtaactggccaatgcaattagaagcaggaaagccttgtgcatttgtttttttatctcgatgctgtttgcgcctctgccgtatctgtgttcaagcctcagtggacatatactcacctatcttggagatatgatatatagtaatatagctcattgggttctttccatttgctgccaagctttagtagggtattgtttactaccctggcttttcttgtcctagcagaagcacaaaactaatcaggatcaaccactgcaaaatgtgattgacatagatctcacacatctcttcaacattgcacaaacatgggtgcctttttcattccttgtgctaagacaataattttagctcattcggggtactgtataatccagagtttctttttcgatgccataccaatcgtttgtctctgcttgctgagacttgaagaaaactttggtgcgttgtctctttttgtttctgtcagattcattgctgccttccagcaatccagctctttaccctttacagtatttcctttccatttgataaatctgtacttttttaggcttgaaatcttctttctctgttctgaggactgctgcaaacttgtaacagatggattaatcgcttcttttcttattttttagggcatgatgaaatcagtgtttgctatttagcctccttcacaactaagatcatcctacataatagatttagacaacaaaaacttatggagtttgctgaaatgccctttcaggcatgctccatctgtgctacaagggtcagaatggacttgataggacatttgactatacaacatggaagttatttcaagatatccttttttaactatgctgtcgttgctgatcatttgcatttttacatttttcacattatactatagttgaagatacattcctgaggacgaatgggtgcagttatgggcttcctgcttgctgccagcagtcttttggtgcttttatattgctattaatttgtttgaaatttattatggtgatgactgggaaggtctttttgaggctattactggttatggccttggtggctctttggccgtgttggtggtggtatttataccaaggctgctgatgttggtgccgaccttgtggggaaggtagaaagaaacattcctgaggacgatccaagaaacccagctgtcattgctgacaatgttggtgataatgttggagatattgttggaatgggatcatatctctttggctcatatgctgaatcgtcatgtgctgctcttgttgtggcctcgatctcgtcttttggaatcaaccatcaatttactccaatggtgtatccccttcttgtcagctctgttggtattatagcatgtctcataacaacgctgtttgcaactgatttcttcgagataaaggctgtgagtgaaatagagcctgctctcaagaaacaacttataatatccactgttgtgatgaccattggcattgcgctcatgttggcttggtcttccatacaccttcaccatttataactttggagcccagaagacagtgcaaagctggcaattgttcttgtgtgtggcggttggtctctgggctggcttagtcattggttttattactgagtactacacaagcaatgcctacagaactggagctgccactaatgtcatttttgggcttgctctgggttacaaatcagtcattatcccaatttttgctattgcgtttagtatcttccttagcttcagccttgctgccatgtatggtgttgttgtggctgctcttggaatgctgagtaccattgccacagaccttgctattgatgcctatggccctatcagtgataatgctggaagcttaagtctctccaccgccaccaccataggcggcgctccaaacacggtggcgccatgcgcgccggcgtggtgcggggacttggccatctcctacccgttctggctcgcaggcacgcatctgcccaagtgtggctacgaccaagggttcaaggttacctgtgacaaagccaaggtgtacctcaagaactcgacctgcacgtaccaaatccaggccatcttctacgccatgaagctactcagagtcgccatcgtcggcctgtcgtaggacgatggcacttgcaacatcgacaagttcgtcaatgcctccttcgtccccagcccgccgttcgaaatcgagccccaacaaaaccaggagctgttcttcgtctacgactgcaacctgcgagcgccgcagctgcctcggtcttggacacccttgcgctgtggcaataatggctcgttcacctggctttctggggagtacaggcccgaagacagctccatggcgatgccggggaactgcaacgttgcgatgataccggtggtggcgtacgagggggcgaccgcggcagattatcagtggttcgtggagggaggtttttttcttagttactacctcacggacactgaggacgacgactactacgaccagtgccaagcttgctcgtaccgcgctggccacggccaatgccggacaattgtcagtgacaatgggttccagtgctactgctctgacggcgtctactcgacgacggcctgcggaaccaagagggctaactggaagacaacaattgtagaaagatatggcaacaaatgtggcaaacacgatctatctaattctaagaccatttttgtagttgaatcgaagcgggaactgaatcaagaatgttctatttatatcggtctcaggatgaacgagcaccaggagagagtccgggaggaggcatatactgttgggacgtgtccaagccagtggagatgcagtggagatggaggagatcgacattggcatggagaagctgcgaaacccaccgcagcagaaccccacctagaggaagaagtagaaaacttgtgccggtatgagcttcctaatgagagctgggaagtaaatttgcctcctgaaaaggtgtctcctgagctcccagtaccaacattaggcataaactttgcaagagatggaatccagaaaaaagagtggttgtccatggttgctgcacacagtgatgcatggttactttctgttgcattttatcttggtgctcaatttggtttcaataaaaattacaggagccggaagagttctcgttgaggagaagcttgttgcgacccaaagagagaggacacatacatgtggacgcgagacgactagagccagaggaggactgggcacgcagaagagcgaggaggacaacgagtcctcacacctcaccgccaggacgtcgtagataattttggttttcttgtgattctctttatgaagtgggtggtacctcaaaagacatagatgatctgttgacttatggcagtcgggcattacatttttttgcatgaaatcgacatctgaggagtgataattttgttttgatcgcttctctattgcaagatttagatggctactatcctttgcgattgatcaagaatggtgagctattctaaggaagcttctgaacaatatacccgctgtcctagagtgtcatagatcaggcaaactgacctcaacagggttgagatgattccatcatacttatacgaagattttcctagcaaggcaagggataatgggtacttgctctgtgatgactcaaaaagaatgagattgatcgattgtgtagctgttgtagctccaattgagaaatattatcagtattaagctgctttgatggttgcccggtctattgcttgcatgtagcatgcatctccgcggagatccaagttgttatgctttgagctattgcatcaagagtttaagatagtctttatatattttactaaaacttgtgcatgtacatggagtgcgtgaatgaatcatcaaaggctataatgtctacccgtgtgatatatttagaaaccgtagcaacacacgggcatctaactataaaacatatacatcaatattgtttgaattcactaattttctaaaatgattaatattttagaacagag

SEQ ID NO: 21850 - DNA, 6738 bp, Zea Mays
ggttctttctccaccccgatgcccctccccctcccccgtgtgatcccctctccagatcgatgtctgccccggccgtaacccccgcggctcaccgcacgaaaccgccgcgagatcttggagctcagcctctgacgatggctacgactacctcgccaacctccgcgagctctgtccccctccctctcctccaccggcggcgggggatccttggccatgttcctcccgaggcgccggtccacgcgcttcggcctccgcgtggtcatcaaggtcctaccaccgcctcacctcctccttgccgccgtgcggttgagcgccgacgacgttcgggctccggcggttcctgcatggaccggaagagccatctcatactctttctctacagcctttctgatggctcggaacagagccggagccgacggagatgaccgtcgacgagctgaagctgcaggcaagggccagcggcggccacgacctaaggaccagttccccgtcggcatgcgcgtgctcgccgtcgacgacgacccgacctgcctcaaggtcctcgagaacctcttgttccgctgccagtaccatgtgacaacaatgggccaggcagccactgccctgagctgctgagggagaagaaggaccagtttgaccctgtgatcagcaacgtccacatgccggacatggacggcttcaagctcctcgagcttgtgggcctcgagatggaccttccggggattaacagctgaaaacctcgcccgatttgtaaagaagttttcttgttcaatgcggcattgaatttgggaggaatgacaagtctcatgaaaacttctgtatgccctacacgtgaccactaaaagaaagagttagacaggacaaaaggctgcagcggcagaagaagagcttttacatacccttacaatgctgattttgatggagatgaaatgaatttgcatgtccctcggacggaggaagctcgcactgaagcgcttaattctcataggggttcaaaataatttatgtactcctaagaatgtgatgggggatacttcaatgcaataatgagcttcccacaaaattacccaaacagcccaccatcagtcagatttacctctgaaatgtggcatccaaatggtcaactttttattagtgaaaatagtatttatttactccatctacagttatgttttctgacatcatgcataatatttgaggaaacgccagtctaacctgatgggcgggtttgtatctctattcttcatccacccagtgaagatccaaacggttatgagctcgcaagtgagcgatggacacctgtgcacacacttgtaggtactgatcacagcacattcaactccacacagattgtccatgtttctttcagtcaccatgatttatcactaggtcattgtgtttgtggccaacgagtattgttctaacagttatgttcccatagctagctagattcattgttgtgttttgttcagggtactttcaccacttctggtatggttctgtctgtaatgtgccagggattattatattgtttttggtttggatttggaatggtttggggtccacaacgatgatgcgtcagagctgttccaaggattggatgatttccattcccctgctgccaattcgactaggctcgccgtctccgctctgcccaactggcaccaagcagccaatggaacttgagcagccaatggatgatttccattcccctgctgccaattctccgaactgctttgacccttcaactcaatccgcatgtacccagtaaatgttcaatctgaatttggatcattgctagcaggattctttgcttgctcttctacttctgaaaattcgcaaaatggatagataattccagttaattttaatccattacagcctattgtggcagcaaacagcgactgggtgcggaagccggaagggagaggcgcttggttgacccagaacggacgacaagacaccgccgggggttcgctgcaaccgcacgcgtggtggccggtgtgggaaggagcccactgctcaagcagcgacgacttccgtaacttctcaggccaagttgtagggagggagggcagcaaagaaagcaagcaagaaagaagccgattccactggtggttaaggttttggattaaaggagagaggtgcagagaaaaaaaggcaatcttactcttaatctctgtgtccacatcacttccgatcatgccgtgatcgacagaagtacgggtgccatgtataagtgccccctccaactcaccaaagtaataaggagcagctgctgcaggttgcaactccctgggccaagcagtagcccagcaagttcagcaccaatggcagccatatgaaatataaggcaaagcagataaaaagcttaatttttttcaataaggtaaaggcaatgacagaaaagtgaggagggtcagaggtgtacagataaggatgagggctgaaaagaggagcaggaagggcatgatgaaatcagtgtttgctatttagcctccttcacaactaagatcatcctacataatagatttagacaacaaaaacttatggagtttgctgaaatgccctttcaggcatgctccatctgtgctacaaggttatgggcttcctgcttgctgccagcagtcttttggtgcttttatattgctattaatttgtttgaaatttattatggtgatgactgggaaggtctttttgaggctattactggttatggccttggtggctctttggccgtgttggtggtggtatttataccaaggctgctgatgttggtgccgaccttgtggggaaggtagaaagaaacattcctgaggacgatccaagaaacccagctgtcattgctgacaatgttggtgataatgttggagatattgttggaatgggatcatatctctttggctcatatgctgaatcgtcatgtgctgctcttgttgtggcctcgatctcgtcttttggaatcaaccatcaatttactccaatggtgtatccccttcttgtcagctctgttggtattatagcatgtctcataacaacgctgtttgcaactgatttcttcgagataaaggctgtgagtgaaatagagcctgctctcaagaaacaacttataatatccactgttgtgatgaccattggcattgcgctcatgttggcttggtcttccatacaccttcaccatttataactttggagcccagaagacagtgcaaagctggcaattgttcttgtgtgtggcggttggtctctgggctggcttagtcattggttttattactgagtactacacaagcaatgcctacagccctgtataagatgttgctgattcctgcagaactggagctgccactaatgtcatttttgggcttgctctgggttacaaatcagtcattatcccaatttttgctattgcgtttagtatcttccttagcttcagccttgctgccatgtatggtgttgttgtggctgctcttggaatgctgagtaccattgccacagaccttgctattgatgcctatggccctatcagtgataatgctggaagcttaagtctgtatgggtgcatcttatcatttatatgtatatctgaaagcttaagtatttttttaaatagaagatgtctggaaactttagtaacgacatgagtttcaggctttcagctatagcagtcttattcgcttttaagacagagaagatttttatttagagtttagaaagagtaggtgctatgggtgcatgttatcatttatgtggggaacatctctggtggaaattaatcagtaacgacatgagttaagacagagaagcttaagtattttttcagctatagcagtcttattcgcttttaagacagagaagcttaagtattttttgaatagaagatgtctggaaactttagtaacgacatgagttaatcagaagagatggaagggtagtttatcaacatgtatttggcacttcgccgaaaatgtcacttggactatcttgcaaactgaattttcagattggcttcttctgtctgaacattcagttcagtcttgcaggatttatttggtgtgcacactccagaggtcagcattgattcgatccaaatcaacttacaacttgttctacattgtttttcatcaacaactgtgttcagcaaagagtaaatacgtactacaacttattgatcattgaaaacctcgtgccttttttgggttaaccaagtttacctagatttcccacactgggttgagtgggttgggcactgattgactcaaaattgaccagctttatggccaccgttcagcaacctcgcaatggaagacaaaaaatccttccgacaccgcggccgcaatagttgaatacgtttcatcatcatcaaccattttttatacatcatcatcatcatcaaccatttttttgataggtcatcatcatcaaccatttttaatcgcactctctcgggcggccttaccaaactccctgcatcttcttgcctagaagtgcagtacttgaatgaccaatcgtgcagctgctgcgatactactctccttgcccacactgcgtcgcaatggtgcaccgatctcctgctccagaagctaccaccgctctgtgcttggcactgctacttcttctctttccctgaaccagctccaccgccaccaccataggcggcgctccaaacacggtggcgccatgcgcgccggcgtggtgcggggacttggccatctcctacccgttctggctcgcaggcacgcatctgcccaagtgtggctacgaccaagggttcaaggttacctgtgacaaagccaaggacgatggcacttgcaacatcgacaagttcgtcaatgcctccttcgtccccagcccgccgttcgaaatcgagccccaacaaaaccaggagctgttcttcgtctacgactgcaacctgcgagcgccgcagctgcctcggtcttggacacccttgcgctgtggcaataatggctcgttcacctggctttctggggagtacaggcccgaagacagctccatggcgatgccggggaactgcaacgttgcgatgataccggtggtggcgtacgagggggcgaccgcggcagattatcagtggttcgtggagggaggtttttttcttagttactacctcacggacactgaggacgacgactactacgaccagtgccaagcttgctcgtaccgcgctggccacggccaatgccggacaattgtcagtgacaatgggttccagtgctactgctctgacggcgtctactcgacgacggcctgcggaaccaagagggctaactggaagacaacaattgtagaaagatatggcaacaaatgtggcaaacacgatctatctaattctaagaccatttttgtagttgaatcgaagcgggaactgaatcaagaatgttctatttatatcggtctcagttgcatggaagcgataactgaatcaagaattctctatttatatcgatctcagccattttgaaggatgaacgagcaccaggagagagtccgggaggaggcatatactgttgggacgtgtccaagccagtggagatgcagtggagatggaggagatcgacattggcatggagaagctgcgaaacccaccgcagcagaaccccacctagaggaagaagtagaaaacttgtgccggtatgagcttcctaatgagagctgggaagtaaatttgcctcctgaaaaggtgtctcctgagctcccagtaccaacattaggcataaactttgcaagagatggaatccagaaaaaagagtggttgtccatggttgctgcacacagtgatgcatggttactttctgttgcattttatcttggtgctcaatttggtttcaataaaaattacaggagccggaagagttctcgttgaggagaagcttgttgcgacccaaagagagaggacacatacatgtggacgcgagacgactagagccagaggaggactgggcacgcagaagagcgaggaggacaacgagtcctcacacctcaccgccaggacgtcgtagataattttggttttcttgtgattctctttatgaagtgggtggtacctcaaaagacatagatgatctgttgacttatggcagtcgggcattacatttttttgcatgaaatcgacatctgaggagtgataattttgttttgatcgcttctctattgcaagatttagatggctactatcctttgcgattgatcaagaatggtgagctattctaaggaagcttctgaacaatatacccgctgtcctagagtgtcatagatcaggcaaactgacctcaacagggttgagatgattccatcatacttatacgaagattttcctagcaaggcaagggataatgggtacttgctctgtgatgactcaaaaagaatgagattgatcgattgtgtagctgttgtagctccaattgagaaatattatcagtattaagctgctttgatggttgcccggtctattgcttgcatgtagcatgcatctccgcggagatccaagttgttatgctttgagctattgcatcaagagtttaagatagtctttatatattttactaaaacttgtgcatgtacatggagtgcgtgaatgaatcatcaaaggctataatgtctacccgtgtgatatatttagaaaccgtagcaacacacgggcatctaactataaaacatatacatcaatattgtttgaattcactaattttctaaaatgattaatattttagaacagag

SEQ ID NO: 21851 - DNA, 5918 bp, Zea Mays
ggttctttctccaccccgatgcccctccccctcccccgtgtgatcccctctccagatcgatgtctgccccggccgtaacccccgcggctcaccgcacgaaaccgccgcgagatcttggagctcagcctctgacgatggctacgactacctcgccaacctccgcgagctctgtccccctccctctcctccaccggcggcgggggatccttggccatgttcctcccgaggcgccggtccacgcgcttcggcctccgcgtggtcatcaaggtcctaccaccgcctcacctcctccttgccgccgtgcggttgagcgccgacgacgttcgggctccggcggttcctgcatggaccggaagagccatctcatactctttctctacagcctttctgatggctcggaacagagccggagccgacggagatgaccgtcgacgagctgaagctgcaggcaagggccagcggcggccacgacctaaggaccagttccccgtcggcatgcgcgtgctcgccgtcgacgacgacccgacctgcctcaaggtcctcgagaacctcttgttccgctgccagtaccatgtgacaacaatgggccaggcagccactgccctgagctgctgagggagaagaaggaccagtttgaccctgtgatcagcaacgtccacatgccggacatggacggcttcaagctcctcgagcttgtgggcctcgagatggaccttccggggattaacagctgaaaacctcgcccgatttgtaaagaagttttcttgttcaatgcggcattgaatttgggaggaatgacaagtctcatgaaaacttctgtatgccctacacgtgaccactaaaagaaagagttagacaggacaaaaggctgcagcggcagaagaagagcttttacatacccttacaatgctgattttgatggagatgaaatgaatttgcatgtccctcggacggaggaagctcgcactgaagcgcttaattctcataggggttcaaaataatttatgtactcctaagaatggtgagatactggttgcttccgcgcaagacttcttgacctcatctttcttagatatgttttcgaattagattgggatggaaattcacatttgttatcacattttctgttagcaagcacaaccattgtgacattattttgcatgcactcagcctctcaccatggctatgagaatgaaattcaacttatagatataccaaaatgttatagaatcaatataattagatatgtcaagatgacaacacatatttcattcaactactatggatttttcattgataaaatacatgcttgatggctgcttgtctaaaatttatttgtttaatattctttgtttgtaagcccaagaatttgtaaaccaggaaataattccaatgaaagatcggtgcggggcggaattttcttggctttttgtagtggctaccgtagtacatcaacttgggcacttggcgacatgtccggtgcccagctccatcacatatcaatctgaaattaaacatgtgtctgagttctgaatgaaaaaattcagctaacagctaacactacgcactactaacagacctcaagcataatactgttgatttgatgtccttatatttatcttgaagcattgcattcatgcagtcatgtaaatagtactttatttatcttctgaccaacacactaataaccaacctttgcagtgatgggggatacttcaatgcaataatgagcttcccacaaaattacccaaacagcccaccatcagtcagatttacctctgaaatgtggcatccaaatggtcaactttttattagtgaaaatagtatttatttactccatctacagttatgttttctgacatcatgcataatatttgaggaaacgccagtctaacctgatgggcgggtttgtatctctattcttcatccacccagtgaagatccaaacggttatgagctcgcaagtgagcgatggacacctgtgcacacacttgtaggtactgatcacagcacattcaactccacacagattgtccatgtttctttcagtcaccatgatttatcactaggtcattgtgtttgtggccaacgagtattgttctaacagttatgttcccatagctagctagattcattgttgtgttttgttcagggtactttcaccacttctggtatggttctgtctgtaatgtgccagggattattatattgtttttggtttggatttggaatggtttggggtccacaacgatgatgcgtcagagctgttccaaggattggatgatttccattcccctgctgccaattcgactaggctcgccgtctccgctctgcccaactggcaccaagcagccaatggaacttgagcagccaatggatgatttccattcccctgctgccaattctccgaactgctttgacccttcaactcaatccgcatgtacccagtaaatgttcaatctgaatttggatcattgctagcaggattctttgcttgctcttctacttctgaaaattcgcaaaatggatagataattccagttaattttaatccattacagtagcctattgtggcagcaaacagcgactgggtgcggaagccggaagggagaggcgcttggttgacccagaacggacgacaagacaccgccgggggttcgctgcaaccgcacgcgtggtggccggtgtgggaaggagcccactgctcaagcagcgacgacttccgtaacttctcaggccaagggagggagggcagcaaagaaagcaagcaagaaagaagccgattccactggtggttaaggttttggattaaaggagagaggtgcagagaaaaaaaggcaatcttactcttaatctctgtgtccacatcacttccgatcatgccgtgatcgacagaagtacgggtgccatgtataagtgccccctccaactcaccaaagtaataaggagcagctgctgcaggttgcaactccctgggccaagcagtagcccagcaagttcagcaccaatggcagccatatgaaatataaggcaaagcagataaaaagcttaatttttttcaataaggtaaaggcaatgacagaaaagtgaggagggtcagaggtgtacagataaggatgagggctgaaaagaggagcaggaaggcatgctccatctgtgctacaagggtcagaatggacttgataggacatttgactatacaacatggaagttatttcaagatatccttttttaactatgctgtcgttgctgatcatttgcatttttacatttttcacattatactatagttgaagatacattcctgaggacgaatgggtgcagttatgggcttcctgcttgctgccagcagtcttttggtgcttttatattgctattaatttgtttgaaatttattatggtgatgactgggaaggtctttttgaggctattactggttatggccttggtggctctttggccgtgttggtggtggtatttataccaaggctgctgatgttggtgccgaccttgtggggaaggtagaaagaaacattcctgaggacgatccaagaaacccagctgtcattgctgacaatgttggtgataatgttggagatattgttggaatgggatcatatctctttggctcatatgctgaatcgtcatgtgctgctcttgttgtggcctcgatctcgtcttttggaatcaaccatcaatttactccaatggtgtatccccttcttgtcagctctgttggtattatagcatgtctcataacaacgctgtttgcaactgatttcttcgagataaaggctgtgagtgaaatagagcctgctctcaagaaacaacttataatatccactgttgtgatgaccattggcattgcgctcatgttggcttggtcttccatacaccttcaccatttataactttggagcccagaagacagtgcaaagctggcaattgttcttgtgtgtggcggttggtctctgggctggcttagtcattggttttattactgagtactacacaagcaatgcctacagccctgtataagatgttgctgattcctgcagaactggagctgccactaatgtcatttttgggcttgctctgggttacaaatcagtcattatcccaatttttgctattgcgtttagtatcttccttagcttcagccttgctgccatgtatggtgttgttgtggctgctcttggaatgctgagtaccattgccacagaccttgctattgatgcctatggccctatcagtgataatgctggaagcttaagtctctccaccgccaccaccataggcggcgctccaaacacggtggcgccatgcgcgccggcgtggtgcggggacttggccatctcctacccgttctggctcgcaggcacgcatctgcccaagtgtggctacgaccaagggttcaaggttacctgtgacaaagccaaggacgatggcacttgcaacatcgacaagttcgtcaatgcctccttcgtccccagcccgccgttcgaaatcgagccccaacaaaaccaggagctgttcttcgtctacgactgcaacctgcgagcgccgcagctgcctcggtcttggacacccttgcgctgtggcaataatggctcgttcacctggctttctggggagtacaggcccgaagacagctccatggcgatgccggggaactgcaacgttgcgatgataccggtggtggcgtacgagggggcgaccgcggcagattatcagtggttcgtggagggaggtttttttcttagttactacctcacggacactgaggacgacgactactacgaccagtgccaagcttgctcgtaccgcgctggccacggccaatgccggacaattgtcagtgacaatgggttccagtgctactgctctgacggcgtctactcgacgacggcctgcggaaccaagagggctaactggaagacaacaattgtagaaagatatggcaacaaatgtggcaaacacgatctatctaattctaagaccatttttgtagttgaatcgaagcgggaactgaatcaagaatgttctatttatatcggtctcaggatgaacgagcaccaggagagagtccgggaggaggcatatactgttgggacgtgtccaagccagtggagatgcagtggagatggaggagatcgacattggcatggagaagctgcgaaacccaccgcagcagaaccccacctagaggaagaagtagaaaacttgtgccggtatgagcttcctaatgagagctgggaagtaaatttgcctcctgaaaaggtgtctcctgagctcccagtaccaacattaggcataaactttgcaagagatggaatccagaaaaaagagtggttgtccatggttgctgcacacagtgatgcatggttactttctgttgcattttatcttggtgctcaatttggtttcaataaaaattacagtaattctgaaaatatgaggcaaactgacctcaacagggttgagatgattccatcatacttatacgaagattttcctagcaaggcaagggataatgggtacttgctctgtgatgactcaaaaagaatgagattgatcgattgtgtagctgttgtagctccaattgagaaatattatcagtattaagctgctttgatggttgcccggtctattgcttgcatgtagcatgcatctccgcggagatccaagttgttatgctttgagctattgcatcaagagtttaagatagtctttatatattttactaaaacttgtgcatgtacatggagtgcgtgaatgaatcatcaaaggctataatgtctacccgtgtgatatatttagaaaccgtagcaacacacgggcatctaactataaaacatatacatcaatattgtttgaattcactaattttctaaaatgattaatattttagaacagag

SEQ ID NO: 21852 - DNA, 4784 bp, Zea Mays
ggttctttctccaccccgatgcccctccccctcccccgtgtgatcccctctccagatcgatgtctgccccggccgtaacccccgcggctcaccgcacgaaaccgccgcgagatcttggagctcagcctctgacgatggctacgactacctcgccaacctccgcgagctctgtccccctccctctcctccaccggcggcgggggatccttggccatgttcctcccgaggcgccggtccacgcgcttcggcctccgcgtggtcatcaaggtcctaccaccgcctcacctcctccttgccgccgtgcggttgagcgccgacgacgttcgggctccggcggttcctgcatggaccggaagagccatctcatactctttctctacagcctttctgatggctcggaacagagccggagccgacggagatgaccgtcgacgagctgaagctgcaggcaagggccagcggcggccacgacctaaggaccagttccccgtcggcatgcgcgtgctcgccgtcgacgacgacccgacctgcctcaaggtcctcgagaacctcttgttccgctgccagtaccatggtacttcccctgacaacaatgggccaggcagccactgccctgagctgctgagggagaagaaggaccagtttgaccctgtgatcagcaacgtccacatgccggacatggacggcttcaagctcctcgagcttgtgggcctcgagatggaccttccggggattaggtactttcaccacttctggtatggttctgtctgtaatgtgccagggattattatattgtttttggtttggatttggaatggtttggggtccacaacgatgatgcgtcagagctgttccaaggattggatgatttccattcccctgctgccaattcgactaggctcgccgtctccgctctgcccaactggcaccaagcagccaatggaacttgagcagccaatggatgatttccattcccctgctgccaattctccgaactgctttgacccttcaactcaatccgcatgtacccagcctattgtggcagcaaacagcgactgggtgcggaagccggaagggagaggcgcttggttgacccagaacggacgacaagacaccgccgggggttcgctgcaaccgcacgcgtggtggccggtgtgggaaggagcccactgctcaagcagcgacgacttccgtaacttctcaggccaagttgtagggagggagggcagcaaagaaagcaagcaagaaagaagccgattccactggtggttaaggttttggattaaaggagagaggtgcagagaaaaaaaggcaatcttactcttaatctctgtgtccacatcacttccgatcatgccgtgatcgacagaagtacgggtgccatgtataagtgccccctccaactcaccaaagtaataaggagcagctgctgcaggttgcaactccctgggccaagcagtagcccagcaagttcagcaccaatggcagccatatgaaatataaggcaaagcagataaaaagcttaatttttttcaataaggtaaaggcaatgacagaaaagtgaggagggtcagaggtgtacagataaggatgagggctgaaaagaggagcaggaagggcatgatgaaatcagtgtttgctatttagcctccttcacaactaagatcatcctacataatagatttagacaacaaaaacttatggagtttgctgaaatgccctttcaggcatgctccatctgtgctacaagggtcagaatggacttgataggacatttgactatacaacatggaagttatttcaagatatccttttttaactatgctgtcgttgctgatcatttgcatttttacatttttcacattatactatagttgaagatacattcctgaggacgaatgggtgcagttatgggcttcctgcttgctgccagcagtcttttggtgcttttatattgctattaatttgtttgaaatttattatggtgatgactgggaaggtctttttgaggctattactggttatggccttggtggctctttggccgtgttggtggtggtatttataccaaggctgctgatgttggtgccgaccttgtggggaaggtagaaagaaacattcctgaggacgatccaagaaacccagctgtcattgctgacaatgttggtgataatgttggagatattgttggaatgggatcatatctctttggctcatatgctgaatcgtcatgtgctgctcttgttgtggcctcgatctcgtcttttggaatcaaccatcaatttactccaatggtgtatccccttcttgtcagctctgttggtattatagcatgtctcataacaacgctgtttgcaactgatttcttcgagataaaggctgtgagtgaaatagagcctgctctcaagaaacaacttataatatccactgttgtgatgaccattggcattgcgctcatgttggcttggtcttccatacaccttcaccatttataactttggagcccagaagacagtgcaaagctggcaattgttcttgtgtgtggcggttggtctctgggctggcttagtcattggttttattactgagtactacacaagcaatgcctacagaactggagctgccactaatgtcatttttgggcttgctctgggttacaaatcagtcattatcccaatttttgctattgcgtttagtatcttccttagcttcagccttgctgccatgtatggtgttgttgtggctgctcttggaatgctgagtaccattgccacagaccttgctattgatgcctatggccctatcagtgataatgctggaagcttaagtctctccaccgccaccaccataggcggcgctccaaacacggtggcgccatgcgcgccggcgtggtgcggggacttggccatctcctacccgttctggctcgcaggcacgcatctgcccaagtgtggctacgaccaagggttcaaggttacctgtgacaaagccaaggacgatggcacttgcaacatcgacaagttcgtcaatgcctccttcgtccccagcccgccgttcgaaatcgagccccaacaaaaccaggagctgttcttcgtctacgactgcaacctgcgagcgccgcagctgcctcggtcttggacacccttgcgctgtggcaataatggctcgttcacctggctttctggggagtacaggcccgaagacagctccatggcgatgccggggaactgcaacgttgcgatgataccggtggtggcgtacgagggggcgaccgcggcagattatcagtggttcgtggagggaggtttttttcttagttactacctcacggacactgaggacgacgactactacgaccagtgccaagcttgctcgtaccgcgctggccacggccaatgccggacaattgtcagtgacaatgggttccagtgctactgctctgacggcgtctactcgacgacggcctgcggaaccaagagggctaactggaagacaacaattgtagaaagatatggcaacaaatgtggcaaacacgatctatctaattctaagaccatttttgtagttgaatcgaagcgggaactgaatcaagaatgttctatttatatcggtctcaggatgaacgagcaccaggagagagtccgggaggaggcatatactgttgggacgtgtccaagccagtggagatgcagtggagatggaggagatcgacattggcatggagaagctgcgaaacccaccgcagcagaaccccacctagaggaagaagtagaaaacttgtgccggtatgagcttcctaatgagagctgggaagtaaatttgcctcctgaaaaggagccggaagagttctcgttgaggagaagcttgttgcgacccaaagagagaggacacatacatgtggacgcgagacgactagagccagaggaggactgggcacgcagaagagcgaggaggacaacgagtcctcacacctcaccgccaggacgtcgtagataattttggttttcttgtgattctctttatgaagtgggtggtacctcaaaagacatagatgatctgttgacttatggcagtcgggcattacatttttttgcatgaaatcgacatctgaggagtgataattttgttttgatcgcttctctattgcaagatttagatggctactatcctttgcgattgatcaagaatggtgagctattctaaggaagcttctgaacaatatacccgctgtcctagagtgtcatagatcaggtaagaaccatgaccaaccatcgcttattatgctttattaatgtacaatgcattagtaattctgaaaatatgaggcaaactgacctcaacagggttgagatgattccatcatacttatacgaagattttcctagcaaggcaagggataatgggtacttgctctgtgatgactcaaaaagaatgagattgatcgattgtgtagctgttgtagctccaattgagaaatattatcagtattaagctgctttgatggttgcccggtctattgcttgcatgtagcatgcatctccgcggagatccaagttgttatgctttgagctattgcatcaagagtttaagatagtctttatatattttactaaaacttgtgcatgtacatggagtgcgtgaatgaatcatcaaaggctataatgtctacccgtgtgatatatttagaaaccgtagcaacacacgggcatctaactataaaacatatacatcaatattgtttgaattcactaattttctaaaatgattaatattttagaacagag

SEQ ID NO: 21853 - DNA, 6390 bp, Zea Mays
ggttctttctccaccccgatgcccctccccctcccccgtgtgatcccctctccagatcgatgtctgccccggccgtaacccccgcggctcaccgcacgaaaccgccgcgagatcttggagctcagcctctgacgatggctacgactacctcgccaacctccgcgagctctgtccccctccctctcctccaccggcggcgggggatccttggccatgttcctcccgaggcgccggtccacgcgcttcggcctccgcgtggtcatcaagcctttctgatggctcggaacagaggtcagctatgcgatgtggcgtggcgaggttaccgcgggcgccgcggaggtggagggggaaggggaggacgagggcacgggcaagagagcgcatcgctgtggacggtctcgtgagagggaccttgggtgatccgggtgcttggtttcttggttctacggctttcgctgctgttggatttgccgagccggagccgacggagatgaccgtcgacgagctgaagctgcaggcaagggccagcggcggccacgacctaaggaccagttccccgtcggcatgcgcgtgctcgccgtcgacgacgacccgacctgcctcaaggtcctcgagaacctcttgttccgctgccagtaccatgtgacaacaatgggccaggcagccactgccctgagctgctgagggagaagaaggaccagtttgaccctgtgatcagcaacgtccacatgccggacatggacggcttcaagctcctcgagcttgtgggcctcgagatggaccttccggggattaacagctgaaaacctcgcccgatttgtaaagaagttttcttgttcaatgcggcattgaatttgggaggaatgacaagtctcatgaaaacttctgtatgccctacacgtgaccactaaaagaaagagttagacaggacaaaaggctgcaggtataatgaacgccaattagtttcctacaggaacttcaattatttctggtggttcagtgtacaatgtgcacagcctctacacaaaaccccattccaattgatatggttttgttactcgattatgctttggtccgaggtgaagcggcagaagaagagcttttacatacccttacaatgctgattttgatggagatgaaatgaatttgcatgtccctcggacggaggaagctcgcactgaagcgcttaattctcataggggttcaaaataatttatgtactcctaagaatgtgatgggggatacttcaatgcaataatgagcttcccacaaaattacccaaacagcccaccatcagtcagatttacctctgaaatgtggcatccaaatggtcaactttttattagtgaaaatagtatttatttactccatctacagttatgttttctgacatcatgcataatatttgaggaaacgccagtctaacctgatgggcgggtttgtatctctattcttcatccacccagtgaagatccaaacggttatgagctcgcaagtgagcgatggacacctgtgcacacacttgtaggtactgatcacagcacattcaactccacacagattgtccatgtttctttcagtcaccatgatttatcactagggtactttcaccacttctggtatggttctgtctgtaatgtgccagggattattatattgtttttggtttggatttggaatggtttggggtccacaacgatgatgcgtcagagctgttccaaggattggatgatttccattcccctgctgccaattcgactaggctcgccgtctccgctctgcccaactggcaccaagcagccaatggaacttgagcagccaatggatgatttccattcccctgctgccaattctccgaactgctttgacccttcaactcaatccgcatgtacccagtaaatgttcaatctgaatttggatcattgctagcaggattctttgcttgctcttctacttctgaaaattcgcaaaatggatagataattccagttaattttaatccattacagcctattgtggcagcaaacagcgactgggtgcggaagccggaagggagaggcgcttggttgacccagaacggacgacaagacaccgccgggggttcgctgcaaccgcacgcgtggtggccggtgtgggaaggagcccactgctcaagcagcgacgacttccgtaacttctcaggccaagttgtagggagggagggcagcaaagaaagcaagcaagaaagaagccgattccactggtggttaaggttttggattaaaggagagaggtgcagagaaaaaaaggttgcaactccctgggccaagcagtagcccagcaagttcagcaccaatggcagccatatgaaatataaggcaaagcagataaaaagcttaatttttttcaataaggtaaaggcaatgacagaaaagtgaggagggtcagaggtgtacagataaggatgagggctgaaaagaggagcaggaaggcatgctccatctgtgctacaagggtcagaatggacttgataggacatttgactatacaacatggaagttatttcaagatatccttttttaactatgctgtcgttgctgatcatttgcatttttacatttttcacattatactatagttgaagatacattcctgaggacgaatgggtgcagttatgggcttcctgcttgctgccagcagtcttttggtgcttttatattgctattaatttgtttgaaatttattatggtgatgactgggaaggtctttttgaggctattactggttatggccttggtggctctttggccgtgttggtggtggtatttataccaaggctgctgatgttggtgccgaccttgtggggaaggtagaaagaaacattcctgaggacgatccaagaaacccagctgtcattgctgacaatgttggtgataatgttggagatattgttggaatgggatcatatctctttggctcatatgctgaatcgtcatgtgctgctcttgttgtggcctcgatctcgtcttttggaatcaaccatcaatttactccaatggtgtatccccttcttgtcagctctgttggtattatagcatgtctcataacaacgctgtttgcaactgatttcttcgagataaaggctgtgagtgaaatagagcctgctctcaagaaacaacttataatatccactgttgtgatgaccattggcattgcgctcatgttggcttggtcttccatacaccttcaccatttataactttggagcccagaagacagtgcaaagctggcaattgttcttgtgtgtggcggttggtctctgggctggcttagtcattggttttattactgagtactacacaagcaatgcctacagaactggagctgccactaatgtcatttttgggcttgctctgggttacaaatcagtcattatcccaatttttgctattgcgtttagtatcttccttagcttcagccttgctgccatgtatggtgttgttgtggctgctcttggaatgctgagtaccattgccacagaccttgctattgatgcctatggccctatcagtgataatgctggaagcttaagtctgtatgggtgcatcttatcatttatatgtatatctgaaagcttaagtatttttttaaatagaagatgtctggaaactttagtaacgacatgagtttcaggctttcagctatagcagtcttattcgcttttaagacagagaagatttttatttagagtttagaaagagtaggtgctatgggtgcatgttatcatttatgtggggaacatctctggtggaaattaatcagtaacgacatgagttaagacagagaagcttaagtattttttcagctatagcagtcttattcgcttttaagacagagaagcttaagtattttttgaatagaagatgtctggaaactttagtaacgacatgagttaatcagaagagatggaagggtagtttatcaacatgtatttggcacttcgccgaaaatgtcacttggactatcttgcaaactgaattttcagattggcttcttctgtctgaacattcagttcagtcttgcaggatttatttggtgtgcacactccagaggtcagcattgattcgatccaaatcaacttacaacttgttctacattgtttttcatcaacaactgtgttcagcaaagagtaaatacgtactacaacttattgatcattgaaaacctcgtgccttttttgggttaaccaagtttacctagatttcccacactgggttgagtgggttgggcactgattgactcaaaattgaccagctttatggccaccgttcagcaacctcgcaatggaagacaaaaaatccttccgacaccgcggccgcaatagttgaatacgtttcatcatcatcaaccattttttatacatcatcatcatcatcaaccatttttttgataggtcatcatcatcaaccatttttaatcgcactctctcgggcggccttaccaaactccctgcatcttcttgcctagaagtgcagtacttgaatgaccaatcgtgcagctgctgcgatactactctccttgcccacactgcgtcgcaatggtgcaccgatctcctgctccagaagctaccaccgctctgtgcttggcactgctacttcttctctttccctgaaccagctccaccgccaccaccataggcggcgctccaaacacggtggcgccatgcgcgccggcgtggtgcggggacttggccatctcctacccgttctggctcgcaggcacgcatctgcccaagtgtggctacgaccaagggttcaaggttacctgtgacaaagccaaggtgtacctcaagaactcgacctgcacgtaccaaatccaggccatcttctacgccatgaagctactcagagtcgccatcgtcggcctgtcgtaggacgatggcacttgcaacatcgacaagttcgtcaatgcctccttcgtccccagcccgccgttcgaaatcgagccccaacaaaaccaggagctgttcttcgtctacgactgcaacctgcgagcgccgcagctgcctcggtcttggacacccttgcgctgtggcaataatggctcgttcacctggctttctggggagtacaggcccgaagacagctccatggcgatgccggggaactgcaacgttgcgatgataccggtggtggcgtacgagggggcgaccgcggcagattatcagtggttcgtggagggaggtttttttcttagttactacctcacggacactgaggacgacgactactacgaccagtgccaagcttgctcgtaccgcgctggccacggccaatgccggacaattgtcagtgacaatgggttccagtgctactgctctgacggcgtctactcgacgacggcctgcggaaccaagagggctaactggaagacaacaattgtagaaagatatggcaacaaatgtggcaaacacgatctatctaattctaagaccatttttgtagttgaatcgaagcgggaactgaatcaagaatgttctatttatatcggtctcaggatgaacgagcaccaggagagagtccgggaggaggcatatactgttgggacgtgtccaagccagtggagatgcagtggagatggaggagatcgacattggcatggagaagctgcgaaacccaccgcagcagaaccccacctagaggaagaagtagaaaacttgtgccggtatgagcttcctaatgagagctgggaagtaaatttgcctcctgaaaaggtgtctcctgagctcccagtaccaacattaggcataaactttgcaagagatggaatccagaaaaaagagtggttgtccatggttgctgcacacagtgatgcatggttactttctgttgcattttatcttggtgctcaatttggtttcaataaaaattacagtaattctgaaaatatgaggcaaactgacctcaacagggttgagatgattccatcatacttatacgaagattttcctagcaaggcaagggataatgggtacttgctctgtgatgactcaaaaagaatgagattgatcgattgtgtagctgttgtagctccaattgagaaatattatcagtattaagctgctttgatggttgcccggtctattgcttgcatgtagcatgcatctccgcggagatccaagttgttatgctttgagctattgcatcaagagtttaagatagtctttatatattttactaaaacttgtgcatgtacatggagtgcgtgaatgaatcatcaaaggctataatgtctacccgtgtgatatatttagaaaccgtagcaacacacgggcatctaactataaaacatatacatcaatattgtttgaattcactaattttctaaaatgattaatattttagaacagag

SEQ ID NO: 21854 - DNA, 5574 bp, Zea Mays
ggttctttctccaccccgatgcccctccccctcccccgtgtgatcccctctccagatcgatgtctgccccggccgtaacccccgcggctcaccgcacgaaaccgccgcgagatcttggagctcagcctctgacgatggctacgactacctcgccaacctccgcgagctctgtccccctccctctcctccaccggcggcgggggatccttggccatgttcctcccgaggcgccggtccacgcgcttcggcctccgcgtggtcatcaagcctttctgatggctcggaacagagccggagccgacggagatgaccgtcgacgagctgaagctgcaggcaagggccagcggcggccacgacctaaggaccagttccccgtcggcatgcgcgtgctcgccgtcgacgacgacccgacctgcctcaaggtcctcgagaacctcttgttccgctgccagtaccatggtacttcccctgacaacaatgggccaggcagccactgccctgagctgctgagggagaagaaggaccagtttgaccctgtgatcagcaacgtccacatgccggacatggacggcttcaagctcctcgagcttgtgggcctcgagatggaccttccggggattaacagctgaaaacctcgcccgatttgtaaagaagttttcttgttcaatgcggcattgaatttgggaggaatgacaagtctcatgaaaacttctgtatgccctacacgtgaccactaaaagaaagagttagacaggacaaaaggctgcaggtataatgaacgccaattagtttcctacaggaacttcaattatttctggtggttcagtgtacaatgtgcacagcctctacacaaaaccccattccaattgatatggttttgttactcgattatgctttggtccgaggtgaagcggcagaagaagagcttttacatacccttacaatgctgattttgatggagatgaaatgaatttgcatgtccctcggacggaggaagctcgcactgaagcgcttaattctcataggggttcaaaataatttatgtactcctaagaatgtgatgggggatacttcaatgcaataatgagcttcccacaaaattacccaaacagcccaccatcagtcagatttacctctgaaatgtggcatccaaatgtctaacctgatgggcgggtttgtatctctattcttcatccacccagtgaagatccaaacggttatgagctcgcaagtgagcgatggacacctgtgcacacacttgtaggtactgatcacagcacattcaactccacacagattgtccatgtttctttcagtcaccatgatttatcactaggtcattgtgtttgtggccaacgagtattgttctaacagttatgttcccatagctagctagattcattgttgtgttttgttcagggtactttcaccacttctggtatggttctgtctgtaatgtgccagggattattatattgtttttggtttggatttggaatggtttggggtccacaacgatgatgcgtcagagctgttccaaggattggatgatttccattcccctgctgccaattcgactaggctcgccgtctccgctctgcccaactggcaccaagcagccaatggaacttgagcagccaatggatgatttccattcccctgctgccaattctccgaactgctttgacccttcaactcaatccgcatgtacccagtaaatgttcaatctgaatttggatcattgctagcaggattctttgcttgctcttctacttctgaaaattcgcaaaatggatagataattccagttaattttaatccattacagcaaacagcgactgggtgcggaagccggaagggagaggcgcttggttgacccagaacggacgacaagacaccgccgggggttcgctgcaaccgcacgcgtggtggccggtgtgggaaggagcccactgctcaagcagcgacgacttccgtaacttctcaggccaagttgtagggagggagggcagcaaagaaagcaagcaagaaagaagccgattccactggtggttaaggttttggattaaaggagagaggtgcagagaaaaaaaggcaatcttactcttaatctctgtgtccacatcacttccgatcatgccgtgatcgacagaagtacgggtgccatgtataagtgccccctccaactcaccaaagtaataaggagcagctgctgcaggttgcaactccctgggccaagcagtagcccagcaagttcagcaccaatggcagccatatgaaatataaggcaaagcagataaaaagcttaatttttttcaataaggtaaaggcaatgacagaaaagtgaggagggtcagaggtgtacagataaggatgagggctgaaaagaggagcaggaaggcatgctccatctgtgctacaagggtcagaatggacttgataggacatttgactatacaacatggaagttatttcaagatatccttttttaactatgctgtcgttgctgatcatttgcatttttacatttttcacattatactatagttgaagatacattcctgaggacgaatgggtgcagttatgggcttcctgcttgctgccagcagtcttttggtgcttttatattgctattaatttgtttgaaatttattatggtgatgactgggaaggtctttttgaggctattactggttatggccttggtggctctttggccgtgttggtggtggtatttataccaaggctgctgatgttggtgccgaccttgtggggaaggtagaaagaaacattcctgaggacgatccaagaaacccagctgtcattgctgacaatgttggtgataatgttggagatattgttggaatgggatcatatctctttggctcatatgctgaatcgtcatgtgctgctcttgttgtggcctcgatctcgtcttttggaatcaaccatcaatttactccaatggtgtatccccttcttgtcagctctgttggtattatagcatgtctcataacaacgctgtttgcaactgatttcttcgagataaaggctgtgagtgaaatagagcctgctctcaagaaacaacttataatatccactgttgtgatgaccattggcattgcgctcatgttggcttggtcttccatacaccttcaccatttataactttggagcccagaagacagtgcaaagctggcaattgttcttgtgtgtggcggttggtctctgggctggcttagtcattggttttattactgagtactacacaagcaatgcctacagccctgtataagatgttgctgattcctgcagaactggagctgccactaatgtcatttttgggcttgctctgggttacaaatcagtcattatcccaatttttgctattgcgtttagtatcttccttagcttcagccttgctgccatgtatggtgttgttgtggctgctcttggaatgctgagtaccattgccacagaccttgctattgatgcctatggccctatcagtgataatgctggaagcttaagtctctccaccgccaccaccataggcggcgctccaaacacggtggcgccatgcgcgccggcgtggtgcggggacttggccatctcctacccgttctggctcgcaggcacgcatctgcccaagtgtggctacgaccaagggttcaaggttacctgtgacaaagccaaggacgatggcacttgcaacatcgacaagttcgtcaatgcctccttcgtccccagcccgccgttcgaaatcgagccccaacaaaaccaggagctgttcttcgtctacgactgcaacctgcgagcgccgcagctgcctcggtcttggacacccttgcgctgtggcaataatggctcgttcacctggctttctggggagtacaggcccgaagacagctccatggcgatgccggggaactgcaacgttgcgatgataccggtggtggcgtacgagggggcgaccgcggcagattatcagtggttcgtggagggaggtttttttcttagttactacctcacggacactgaggacgacgactactacgaccagtgccaagcttgctcgtaccgcgctggccacggccaatgccggacaattgtcagtgacaatgggttccagtgctactgctctgacggcgtctactcgacgacggcctgcggaaccaagagggctaactggaagacaacaattgtagaaagatatggcaacaaatgtggcaaacacgatctatctaattctaagaccatttttgtagttgaatcgaagcgggaactgaatcaagaatgttctatttatatcggtctcaggatgaacgagcaccaggagagagtccgggaggaggcatatactgttgggacgtgtccaagccagtggagatgcagtggagatggaggagatcgacattggcatggagaagctgcgaaacccaccgcagcagaaccccacctagaggaagaagtagaaaacttgtgccggtatgagcttcctaatgagagctgggaagtaaatttgcctcctgaaaaggtgtctcctgagctcccagtaccaacattaggcataaactttgcaagagatggaatccagaaaaaagagtggttgtccatggttgctgcacacagtgatgcatggttactttctgttgcattttatcttggtgctcaatttggtttcaataaaaattacaggagccggaagagttctcgttgaggagaagcttgttgcgacccaaagagagaggacacatacatgtggacgcgagacgactagagccagaggaggactgggcacgcagaagagcgaggaggacaacgagtcctcacacctcaccgccaggacgtcgtagataattttggttttcttgtgattctctttatgaagtgggtggtacctcaaaagacatagatgatctgttgacttatggcagtcgggcattacatttttttgcatgaaatcgacatctgaggagtgataattttgttttgatcgcttctctattgcaagatttagatggctactatcctttgcgattgatcaagaatggtgagctattctaaggaagcttctgaacaatatacccgctgtcctagagtgtcatagatcaggcaaactgacctcaacagggttgagatgattccatcatacttatacgaagattttcctagcaaggcaagggataatgggtacttgctctgtgatgactcaaaaagaatgagattgatcgattgtgtagctgttgtagctccaattgagaaatattatcagtattaagctgctttgatggttgcccggtctattgcttgcatgtagcatgcatctccgcggagatccaagttgttatgctttgagctattgcatcaagagtttaagatagtctttatatattttactaaaacttgtgcatgtacatggagtgcgtgaatgaatcatcaaaggctataatgtctacccgtgtgatatatttagaaaccgtagcaacacacgggcatctaactataaaacatatacatcaatattgtttgaattcactaattttctaaaatgattaatattttagaacagag

SEQ ID NO: 21855 - DNA, 5316 bp, Zea Mays
ggttctttctccaccccgatgcccctccccctcccccgtgtgatcccctctccagatcgatgtctgccccggccgtaacccccgcggctcaccgcacgaaaccgccgcgagatcttggagctcagcctctgacgatggctacgactacctcgccaacctccgcgagctctgtccccctccctctcctccaccggcggcgggggatccttggccatgttcctcccgaggcgccggtccacgcgcttcggcctccgcgtggtcatcaagcctttctgatggctcggaacagagccggagccgacggagatgaccgtcgacgagctgaagctgcaggcaagggccagcggcggccacgacctaaggaccagttccccgtcggcatgcgcgtgctcgccgtcgacgacgacccgacctgcctcaaggtcctcgagaacctcttgttccgctgccagtaccatgtgacaacaatgggccaggcagccactgccctgagctgctgagggagaagaaggaccagtttgaccctgtgatcagcaacgtccacatgccggacatggacggcttcaagctcctcgagcttgtgggcctcgagatggaccttccggggattagtgaagcggcagaagaagagcttttacatacccttacaatgctgattttgatggagatgaaatgaatttgcatgtccctcggacggaggaagctcgcactgaagcgcttaattctcataggggttcaaaataatttatgtactcctaagaatgtgatgggggatacttcaatgcaataatgagcttcccacaaaattacccaaacagcccaccatcagtcagatttacctctgaaatgtggcatccaaatgtctaacctgatgggcgggtttgtatctctattcttcatccacccagtgaagatccaaacggttatgagctcgcaagtgagcgatggacacctgtgcacacacttgtaggtactgatcacagcacattcaactccacacagattgtccatgtttctttcagtcaccatgatttatcactaggtcattgtgtttgtggccaacgagtattgttctaacagttatgttcccatagctagctagattcattgttgtgttttgttcagggtactttcaccacttctggtatggttctgtctgtaatgtgccagggattattatattgtttttggtttggatttggaatggtttggggtccacaacgatgatgcgtcagagctgttccaaggattggatgatttccattcccctgctgccaattcgactaggctcgccgtctccgctctgcccaactggcaccaagcagccaatggaacttgagcagccaatggatgatttccattcccctgctgccaattctccgaactgctttgacccttcaactcaatccgcatgtacccagtaaatgttcaatctgaatttggatcattgctagcaggattctttgcttgctcttctacttctgaaaattcgcaaaatggatagataattccagttaattttaatccattacagcctattgtggcagcaaacagcgactgggtgcggaagccggaagggagaggcgcttggttgacccagaacggacgacaagacaccgccgggggttcgctgcaaccgcacgcgtggtggccggtgtgggaaggagcccactgctcaagcagcgacgacttccgtaacttctcaggccaagggcatgatgaaatcagtgtttgctatttagcctccttcacaactaagatcatcctacataatagatttagacaacaaaaacttatggagtttgctgaaatgccctttcaggcatgctccatctgtgctacaaggttatgggcttcctgcttgctgccagcagtcttttggtgcttttatattgctattaatttgtttgaaatttattatggtgatgactgggaaggtctttttgaggctattactggttatggccttggtggctctttggccgtgttggtggtggtcattgctgacaatgttggtgataatgttggagatattgttggaatgggatcatatctctttggctcatatgctgaatcgtcatgtgctgctcttgttgtggcctcgatctcgtcttttggaatcaaccatcaatttactccaatggtgtatccccttcttgtcagctctgttggtattatagcatgtctcataacaacgctgtttgcaactgatttcttcgagataaaggctgtgagtgaaatagagcctgctctcaagaaacaacttataatatccactgttgtgatgaccattggcattgcgctcatgttggcttggcaattgttcttgtgtgtggcggttggtctctgggctggcttagtcattggttttattactgagtactacacaagcaatgcctacagaactggagctgccactaatgtcatttttgggcttgctctgggttacaaatcagtcattatcccaatttttgctattgcgtttagtatcttccttagcttcagccttgctgccatgtatggtgttgttgtggctgctcttggaatgctgagtaccattgccacagaccttgctattgatgcctatggccctatcagtgataatgctggaagcttaagtctctccaccgccaccaccataggcggcgctccaaacacggtggcgccatgcgcgccggcgtggtgcggggacttggccatctcctacccgttctggctcgcaggcacgcatctgcccaagtgtggctacgaccaagggttcaaggttacctgtgacaaagccaaggtgtacctcaagaactcgacctgcacgtaccaaatccaggccatcttctacgccatgaagctactcagagtcgccatcgtcggcctgtcgtaggacgatggcacttgcaacatcgacaagttcgtcaatgcctccttcgtccccagcccgccgttcgaaatcgagccccaacaaaaccaggagctgttcttcgtctacgactgcaacctgcgagcgccgcagctgcctcggtcttggacacccttgcgctgtggcaataatggctcgttcacctggctttctggggagtacaggcccgaagacagctccatggcgatgccggggaactgcaacgttgcgatgataccggtggtggcgtacgagggggcgaccgcggcagattatcagtggttcgtggagggaggtttttttcttagttactacctcacggacactgaggacgacgactactacgaccagtgccaagcttgctcgtaccgcgctggccacggccaatgccggacaattgtcagtgacaatgggttccagtgctactgctctgacggcgtctactcgacgacggcctgcggaaccaagagggctaactggaagacaacaattgtagttgaatcgaagcgggaactgaatcaagaatgttctatttatatcggtctcaggatgaacgagcaccaggagagagtccgggaggaggcatatactgttgggacgtgtccaagccagtggagatgcagtggagatggaggagatcgacattggcatggagaagctgcgaaacccaccgcagcagaaccccacctagaggaagaagtagaaaacttgtgccggtatgagcttcctaatgagagctgggaagtaaatttgcctcctgaaaaggtgtctcctgagctcccagtaccaacattaggcataaactttgcaagagatggaatccagaaaaaagagtggttgtccatggttgctgcacacagtgatgcatggttactttctgttgcattttatcttggtgctcaatttggtttcaataaaaattacaggttaattttcattccatctttatggaatatgtactacagtctctatcttttactgcctgccttttttgtttatccatgaagttttcctactttatgcaaagctttcctacatgcttgctttgtcctaaaaaatattagacctattttgataggcaacaggtacaagtaatatagtataaattataagtactgcttaagaactgtgaataaaaatgaacctgcacaatatctccacatggaattatttgtcttagtgaaggaataacatagtcaaatcacatagagtttgcactgctcatactactcaccacatctaatgtgctaattacttttcagtaatgatgttgccaatctcaacaagacgctatgagcaatttcctttagcacgaaacaatgttgagcaattgtagccattttctggattagccttgattattttattatgtttagctttatcatttgcttttctaaaaactacatattttggtgactaacacgacaattaaatcgaggatgataaatggtgagcatgcgacacttcgtcgacactgccgagctacacccagtttccctctcggcttctctgattatcgaattttgtctgagtgcgtgcggacgcaggagccggaagagttctcgttgaggagaagcttgttgcgacccaaagagagaggacacatacatgtggacgcgagacgactagagccagaggaggactgggcacgcagaagagcgaggaggacaacgagtcctcacacctcaccgccaggacgtcgtagataattttggttttcttgtgattctctttatgaagtgggtggtacctcaaaagacatagatgatctgttgacttatggcagtcgggcattacatttttttgcatgaaatcgacatctgaggagtgataattttgttttgatcgcttctctattgcaagatttagatggctactatcctttgcgattgatcaagaatggtgagctattctaaggaagcttctgaacaatatacccgctgtcctagagtgtcatagatcaggcaaactgacctcaacagggttgagatgattccatcatacttatacgaagattttcctagcaaggcaagggataatgggtacttgctctgtgatgactcaaaaagaatgagattgatcgattgtgtagctgttgtagctccaattgagaaatattatcagtattaagctgctttgatggttgcccggtctattgcttgcatgtagcatgcatctccgcggagatccaagttgttatgctttgagctattgcatcaagagtttaagatagtctttatatattttactaaaacttgtgcatgtacatggagtgcgtgaatgaatcatcaaaggctataatgtctacccgtgtgatatatttagaaaccgtagcaacacacgggcatctaactataaaacatatacatcaatattgtttgaattcactaattttctaaaatgattaatattttagaacagag

SEQ ID NO: 21856 - DNA, 6285 bp, Zea Mays
ggttctttctccaccccgatgcccctccccctcccccgtgtgatcccctctccagatcgatgtctgccccggccgtaacccccgcggctcaccgcacgaaaccgccgcgagatcttggagctcagcctctgacgatggctacgactacctcgccaacctccgcgagctctgtccccctccctctcctccaccggcggcgggggatccttggccatgttcctcccgaggcgccggtccacgcgcttcggcctccgcgtggtcatcaagcctttctgatggctcggaacagagccggagccgacggagatgaccgtcgacgagctgaagctgcaggcaagggccagcggcggccacgacctaaggaccagttccccgtcggcatgcgcgtgctcgccgtcgacgacgacccgacctgcctcaaggtcctcgagaacctcttgttccgctgccagtaccatggtacttcccctgacaacaatgggccaggcagccactgccctgagctgctgagggagaagaaggaccagtttgaccctgtgatcagcaacgtccacatgccggacatggacggcttcaagctcctcgagcttgtgggcctcgagatggaccttccggggattagtaagctttcacttgcccactcctgttcgtgcctttattgcagttgcagcaggccaatgatctcaaaattttggcattgcttgaaaaatcatcattgtgaatgaatagatcttgtatggtaccatctggttactttgtttttttacctccattagacagctgaaaacctcgcccgatttgtaaagaagttttcttgttcaatgcggcattgaatttgggaggaatgacaagtctcatgaaaacttctgtatgccctacacgtgaccactaaaagaaagagttagacaggacaaaaggctgcagcggcagaagaagagcttttacatacccttacaatgctgattttgatggagatgaaatgaatttgcatgtccctcggacggaggaagctcgcactgaagcgcttaattctcataggggttcaaaataatttatgtactcctaagaatgtgatgggggatacttcaatgcaataatgagcttcccacaaaattacccaaacagcccaccatcagtcagatttacctctgaaatgtggcatccaaatgtctaacctgatgggcgggtttgtatctctattcttcatccacccagtgaagatccaaacggttatgagctcgcaagtgagcgatggacacctgtgcacacagtatggcttcgtatactttgtttacatatcttttccccattgtaatgttactcatctcccttttatgtgtatactttttagagagaaaattaccttgtagtctcattgtttcagtttatggtccaatttacaatggcttcactgtaaatgggaaaacaactcggtaggaatgcttttttgaattataaattatttctatttcatacgatgcttataggtatgtgatgagtcctccaatctgagaagtagagcatggtaaagcactccaagctgctctttcatcgggaaatttataggtgacacttgtgtcatacattgaactatggagtcaaacaaattacatattatccttcaacatttttcaccagtgggaactgtagttattgcgtagaatagatggtatattaatcgttgagagccaatgtttacattaactgttatgcagaagacaatttatgttttattttatatctaactgtactttgttgcagcttgtaggtactgatcacagcacattcaactccacacagattgtccatgtttctttcagtcaccatgatttatcactaggtcattgtgtttgtggccaacgagtattgttctaacagttatgttcccatagctagctagattcattgttgtgttttgttcagggtactttcaccacttctggtatggttctgtctgtaatgtgccagggattattatattgtttttggtttggatttggaatggtttggggtccacaacgatgatgcgtcagagctgttccaaggattggatgatttccattcccctgctgccaattcgactaggctcgccgtctccgctctgcccaactggcaccaagcagccaatggaacttgagcagccaatggatgatttccattcccctgctgccaattctccgaactgctttgacccttcaactcaatccgcatgtacccagtaaatgttcaatctgaatttggatcattgctagcaggattctttgcttgctcttctacttctgaaaattcgcaaaatggatagataattccagttaattttaatccattacagtagcctattgtggcagcaaacagcgactgggtgcggaagccggaagggagaggcgcttggttgacccagaacggacgacaagacaccgccgggggttcgctgcaaccgcacgcgtggtggccggtgtgggaaggagcccactgctcaagcagcgacgacttccgtaacttctcaggccaagttgtagggagggagggcagcaaagaaagcaagcaagaaagaagccgattccactggtggttaaggttttggattaaaggagagaggtgcagagaaaaaaaggcaatcttactcttaatctctgtgtccacatcacttccgatcatgccgtgatcgacagaagtacgggtgccatgtataagtgccccctccaactcaccaaagtaataaggagcagctgctgcaggttgcaactccctgggccaagcagtagcccagcaagttcagcaccaatggcagccatatgaaatataaggcaaagcagataaaaagcttaatttttttcaataaggtaaaggcaatgacagaaaagtgaggagggtcagaggtgtacagataaggatgagggctgaaaagaggagcaggaagggcatgatgaaatcagtgtttgctatttagcctccttcacaactaagatcatcctacataatagatttagacaacaaaaacttatggagtttgctgaaatgccctttcaggcatgctccatctgtgctacaagggtcagaatggacttgataggacatttgactatacaacatggaagttatttcaagatatccttttttaactatgctgtcgttgctgatcatttgcatttttacatttttcacattatactatagttgaagatacattcctgaggacgaatgggtgcagttatgggcttcctgcttgctgccagcagtcttttggtgcttttatattgctattaatttgtttgaaatttattatggtgatgactgggaaggtctttttgaggctattactggttatggccttggtggctctttggccgtgttggtggtggtatttataccaaggctgctgatgttggtgccgaccttgtggggaaggtagaaagaaacattcctgaggacgatccaagaaacccagctgtcattgctgacaatgttggtgataatgttggagatattgttggaatgggatcatatctctttggctcatatgctgaatcgtcatgtgctgctcttgttgtggcctcgatctcgtcttttggaatcaaccatcaatttactccaatggtgtatccccttcttgtcagctctgttggtattatagcatgtctcataacaacgctgtttgcaactgatttcttcgagataaaggctgtgagtgaaatagagcctgctctcaagaaacaacttataatatccactgttgtgatgaccattggcattgcgctcatgttggcttggtcttccatacaccttcaccatttataactttggagcccagaagacagtgcaaagctggcaattgttcttgtgtgtggcggttggtctctgggctggcttagtcattggttttattactgagtactacacaagcaatgcctacagaactggagctgccactaatgtcatttttgggcttgctctgggttacaaatcagtcattatcccaatttttgctattgcgtttagtatcttccttagcttcagccttgctgccatgtatggtgttgttgtggctgctcttggaatgctgagtaccattgccacagaccttgctattgatgcctatggccctatcagtgataatgctggaagcttaagtctctccaccgccaccaccataggcggcgctccaaacacggtggcgccatgcgcgccggcgtggtgcggggacttggccatctcctacccgttctggctcgcaggcacgcatctgcccaagtgtggctacgaccaagggttcaaggttacctgtgacaaagccaaggtgtacctcaagaactcgacctgcacgtaccaaatccaggccatcttctacgccatgaagctactcagagtcgccatcgtcggcctgtcgtaggacgatggcacttgcaacatcgacaagttcgtcaatgcctccttcgtccccagcccgccgttcgaaatcgagccccaacaaaaccaggagctgttcttcgtctacgactgcaacctgcgagcgccgcagctgcctcggtcttggacacccttgcgctgtggcaataatggctcgttcacctggctttctggggagtacaggcccgaagacagctccatggcgatgccggggaactgcaacgttgcgatgataccggtggtggcgtacgagggggcgaccgcggcagattatcagtggttcgtggagggaggtttttttcttagttactacctcacggacactgaggacgacgactactacgaccagtgccaagcttgctcgtaccgcgctggccacggccaatgccggacaattgtcagtgacaatgggttccagtgctactgctctgacggcgtctactcgacgacggcctgcggaaccaagagggctaactggaagacaacaattgtagttgtagttgaatcgaagcgggaactgaatcaagaatgttctatttatatcggtctcagttgcatggaagcgataactgaatcaagaattctctatttatatcgatctcagccattttgaaggatgaacgagcaccaggagagagtccgggaggaggcatatactgttgggacgtgtccaagccagtggagatgcagtggagatggaggagatcgacattggcatggagaagctgcgaaacccaccgcagcagaaccccacctagaggaagaagtagaaaacttgtgccggtatgagcttcctaatgagagctgggaagtaaatttgcctcctgaaaaggtgtctcctgagctcccagtaccaacattaggcataaactttgcaagagatggaatccagaaaaaagagtggttgtccatggttgctgcacacagtgatgcatggttactttctgttgcattttatcttggtgctcaatttggtttcaataaaaattacaggagccggaagagttctcgttgaggagaagcttgttgcgacccaaagagagaggacacatacatgtggacgcgagacgactagagccagaggaggactgggcacgcagaagagcgaggaggacaacgagtcctcacacctcaccgccaggacgtcgtagataattttggttttcttgtgattctctttatgaagtgggtggtacctcaaaagacatagatgatctgttgacttatggcagtcgggcattacatttttttgcatgaaatcgacatctgaggagtgataattttgttttgatcgcttctctattgcaagatttagatggctactatcctttgcgattgatcaagaatggtgagctattctaaggaagcttctgaacaatatacccgctgtcctagagtgtcatagatcagggttgagatgattccatcatacttatacgaagattttcctagcaaggaatggtttgaacaatgttgtgattaggcaagggataatgggtacttgctctgtgatgactcaaaaagaatgagattgatcgattgtgtagctgttgtagctccaattgagaaatattatcagtattaagctgctttgatggttgcccggtctattgcttgcatgtagcatgcatctccgcggagatccaagttgttatgctttgagctattgcatcaagagtttaagatagtctttatatattttactaaaacttgtgcatgtacatggagtgcgtgaatgaatcatcaaaggctataatgtctacccgtgtgatatatttagaaaccgtagcaacacacgggcatctaactataaaacatatacatcaatattgtttgaattcactaattttctaaaatgattaatattttagaacagag

SEQ ID NO: 21857 - DNA, 1647 bp, Zea Mays
acatcacttccgatcatgccgtgatcgacagaagtacgggtgccatgtataagtgccccctccaactcaccaaagtaataaggagcagctgctgcaggttgcaactccctgggccaagcagtagcccagcaagttcagcaccaatggcagccatatgaaatataaggcaaagcagataaaaagcttaatttttttcaataaggtaaaggcaatgacagaaaagtgaggagggtcagaggtgtacagataaggatgagggctgaaaagaggagcaggaaggtctttttgaggctattactggttatggccttggtggctctttggccgtgttggtggtggtatttataccaaggctgctgatgttggtgccgaccttgtggggaaggtagaaagaaacattcctgaggacgatccaagaaacccagctgtcattgctgacaatgttggtgataatgttggagatattgttggaatgggatcatatctctttggctcatatgctgaatcgtcatgtgctgctcttgttgtggcctcgatctcgtcttttggaatcaaccatcaatttactccaatggtgtatccccttcttgtcagctctgttggtattatagcatgtctcataacaacgctgtttgcaactgatttcttcgagataaaggctgtgagtgaaatagagcctgctctcaagaaacaacttataatatccactgttgtgatgaccattggcattgcgctcatgttggcttggtcttccatacaccttcaccatttataactttggagcccagaagacagtgcaaagctggcaattgttcttgtgtgtggcggttggtctctgggctggcttagtcattggttttattactgagtactacacaagcaatgcctacagccctgtataagatgttgctgattcctgcagaactggagctgccactaatgtcatttttgggcttgctctgggttacaaatcagtcattatcccaatttttgctattgcgtttagtatcttccttagcttcagccttgctgccatgtatggtgttgttgtggctgctcttggaatgctgagtaccattgccacagaccttgctattgatgcctatggccctatcagtgataatgctggaagcttaagtctgtatgggtgcatcttatcatttatatgtatatctgaaagcttaagtatttttttaaatagaagatgtctggaaactttagtaacgacatgagtttcaggctttcagctatagcagtcttattcgcttttaagacagagaagatttttatttagagtttagaaagagtaggtgctatgggtgcatgttatcatttatgtggggaacatctctggtggaaattaatcagtaacgacatgagttaagacagagaagcttaagtattttttcagctatagcagtcttattcgcttttaagacagagaagcttaagtattttttgaatagaagatgtctggaaactttagtaacgacatgagttaatcagaagagatggaagggtagtttatcaacatgtatttggcacttcgccgaaaatgtcacttggactatcttgcaaactgaattttcagattggcttcttctgtctgaacattcagttcagtcttgcaggatttatttggtgtgc

SEQ ID NO: 21858 - DNA, 3420 bp, Zea Mays
acatcacttccgatcatgccgtgatcgacagaagtacgggtgccatgtataagtgccccctccaactcaccaaagtaataaggagcagctgctgcaggttgcaactccctgggccaagcagtagcccagcaagttcagcaccaatggcagccatatgaaatataaggcaaagcagataaaaagcttaatttttttcaataaggtaaaggcaatgacagaaaagtgaggagggtcagaggtgtacagataaggatgagggctgaaaagaggagcaggaaggtctttttgaggctattactggttatggccttggtggctctttggccgtgttggtggtggtatttataccaaggctgctgatgttggtgccgaccttgtggggaaggtagaaagaaacattcctgaggacgatccaagaaacccagctgtcattgctgacaatgttggtgataatgttggagatattgttggaatgggatcatatctctttggctcatatgctgaatcgtcatgtgctgctcttgttgtggcctcgatctcgtcttttggaatcaaccatcaatttactccaatggtgtatccccttcttgtcagctctgttggtattatagcatgtctcataacaacgctgtttgcaactgatttcttcgagataaaggctgtgagtgaaatagagcctgctctcaagaaacaacttataatatccactgttgtgatgaccattggcattgcgctcatgttggcttggtcttccatacaccttcaccatttataactttggagcccagaagacagtgcaaagctggcaattgttcttgtgtgtggcggttggtctctgggctggcttagtcattggttttattactgagtactacacaagcaatgcctacagccctgtataagatgttgctgattcctgcagaactggagctgccactaatgtcatttttgggcttgctctgggttacaaatcagtcattatcccaatttttgctattgcgtttagtatcttccttagcttcagccttgctgccatgtatggtgttgttgtggctgctcttggaatgctgagtaccattgccacagaccttgctattgatgcctatggccctatcagtgataatgctggaagcttaagtctctccaccgccaccaccataggcggcgctccaaacacggtggcgccatgcgcgccggcgtggtgcggggacttggccatctcctacccgttctggctcgcaggcacgcatctgcccaagtgtggctacgaccaagggttcaaggttacctgtgacaaagccaaggacgatggcacttgcaacatcgacaagttcgtcaatgcctccttcgtccccagcccgccgttcgaaatcgagccccaacaaaaccaggagctgttcttcgtctacgactgcaacctgcgagcgccgcagctgcctcggtcttggacacccttgcgctgtggcaataatggctcgttcacctggctttctggggagtacaggcccgaagacagctccatggcgatgccggggaactgcaacgttgcgatgataccggtggtggcgtacgagggggcgaccgcggcagattatcagtggttcgtggagggaggtttttttcttagttactacctcacggacactgaggacgacgactactacgaccagtgccaagcttgctcgtaccgcgctggccacggccaatgccggacaattgtcagtgacaatgggttccagtgctactgctctgacggcgtctactcgacgacggcctgcggaaccaagagggctaactggaagacaacaattgtagaaagatatggcaacaaatgtggcaaacacgatctatctaattctaagaccatttttgtagttgaatcgaagcgggaactgaatcaagaatgttctatttatatcggtctcagttgcatggaagcgataactgaatcaagaattctctatttatatcgatctcagccattttgaaggatgaacgagcaccaggagagagtccgggaggaggcatatactgttgggacgtgtccaagccagtggagatgcagtggagatggaggagatcgacattggcatggagaagctgcgaaacccaccgcagcagaaccccacctagaggaagaagtagaaaacttgtgccggtatgagcttcctaatgagagctgggaagtaaatttgcctcctgaaaaggtgtctcctgagctcccagtaccaacattaggcataaactttgcaagagatggaatccagaaaaaagagtggttgtccatggttgctgcacacagtgatgcatggttactttctgttgcattttatcttggtgctcaatttggtttcaataaaaattacaggagccggaagagttctcgttgaggagaagcttgttgcgacccaaagagagaggacacatacatgtggacgcgagacgactagagccagaggaggactgggcacgcagaagagcgaggaggacaacgagtcctcacacctcaccgccaggacgtcgtagataattttggttttcttgtgattctctttatgaagtgggtggtacctcaaaagacatagatgatctgttgacttatggcagtcgggcattacatttttttgcatgaaatcgacatctgaggagtgataattttgttttgatcgcttctctattgcaagatttagatggctactatcctttgcgattgatcaagaatggtgagctattctaaggaagcttctgaacaatatacccgctgtcctagagtgtcatagatcagggttgagatgattccatcatacttatacgaagattttcctagcaaggaatggtttgaacaatgttgtgattaggcaagggataatgggtacttgctctgtgatgactcaaaaagaatgagattgatcgtacgtacggggagagttcctccatagacaaagatgaaaaaaagaccttgtatttgatagaatgtgctgatccattcctcaaaccgaatagaaatgtgaggtcggttgtgattaatcttttgatcttaggtaaggtcaaggttctactgggctgctcgctgttgcaggattgtgtagctgttgtagctccaattgagaaatattatcagtattaagctgctttgatggttgcccggtctattgcttgcatgtagcatgcatctccgcggagatccaagttgttatgctttgagctattgcatcaagagtttaagatagtctttatatattttactaaaacttgtgcatgtacatggagtgcgtgaatgaatcatcaaaggctataatgtctacccgtgtgatatatttagaaaccgtagcaacacacgggcatctaactataaaacatatacatcaatattgtttgaattcactaattttctaaaatgattaatattttagaacagag

SEQ ID NO: 21859 - DNA, 1805 bp, Zea Mays
gatctcacacatctcttcaacattgcacaaacatgggtgcctttttcattccttgtgctaagacaataattttagctcattcggggtactgtataatccagagtttctttttcgatgccataccaatcgtttgtctctgcttgctgagacttgaagaaaactttggcatgctccatctgtgctacaagggtcagaatggacttgataggacatttgactatacaacatggaagttatttcaagatatccttttttaactatgctgtcgttgctgatcatttgcatttttacatttttcacattatactatagttgaagatacattcctgaggacgaatgggtgcagttatgggcttcctgcttgctgccagcagtcttttggtgcttttatattgctattaatttgtttgaaatttattatggtgatgactgggaaggtctttttgaggctattactggttatggccttggtggctctttggccgtgttggtggtggtatttataccaaggctgctgatgttggtgccgaccttgtggggaaggtagaaagaaacattcctgaggacgatccaagaaacccagctgtcattgctgacaatgttggtgataatgttggagatattgttggaatgggatcatatctctttggctcatatgctgaatcgtcatgtgctgctcttgttgtggcctcgatctcgtcttttggaatcaaccatcaatttactccaatggtgtatccccttcttgtcagctctgttggtattatagcatgtctcataacaacgctgtttgcaactgatttcttcgagataaaggctgtgagtgaaatagagcctgctctcaagaaacaacttataatatccactgttgtgatgaccattggcattgcgctcatgttggcttggtcttccatacaccttcaccatttataactttggagcccagaagacagtgcaaagctggcaattgttcttgtgtgtggcggttggtctctgggctggcttagtcattggttttattactgagtactacacaagcaatgcctacagccctgtataagatgttgctgattcctgcagaactggagctgccactaatgtcatttttgggcttgctctgggttacaaatcagtcattatcccaatttttgctattgcgtttagtatcttccttagcttcagccttgctgccatgtatggtgttgttgtggctgctcttggaatgctgagtaccattgccacagaccttgctattgatgcctatggccctatcagtgataatgctggaagcttaagtctgtatgggtgcatcttatcatttatatgtatatctgaaagcttaagtatttttttaaatagaagatgtctggaaactttagtaacgacatgagtttcaggctttcagctatagcagtcttattcgcttttaagacagagaagatttttatttagagtttagaaagagtaggtgctatgggtgcatgttatcatttatgtggggaacatctctggtggaaattaatcagtaacgacatgagttaagacagagaagcttaagtattttttcagctatagcagtcttattcgcttttaagacagagaagcttaagtattttttgaatagaagatgtctggaaactttagtaacgacatgagttaatcagaagagatggaagggtagtttatcaacatgtatttggcacttcgccgaaaatgtcacttggactatcttgcaaactgaattttcagattggcttcttctgtctgaacattcagttcagtcttgcaggatttatttggtgtgc

SEQ ID NO: 21860 - DNA, 3135 bp, Zea Mays
ctgtctccacccatggccggccgcgcccggcacccgcccttccgccttatgttctacctcatcggcctgctggcctcgctcatcccggccacgtcgcgggcgcagccaccggagacggtcacggtggggctcatcatcgacgccgattcgcccgtcggcaggatcgccagcaccaccatcccgatggcgctcgacgacttctacgcggccttgcccaactcctcaacgcgggtccagattctgcagcacgactccggcggggacgtcgtcgccgccgcgtccgccgcgctgcagctgatgacgacccagggcgcgcgcgccatcctagggccgcagtcctccgtcgagtccgccttcgtcgcggacctcgccacgcgcgccgaggtccccgtcgtgtccttctcggcgaccagcccctcggtgtcccactccgaggcgcgcttcttcgtgcgcgccgcgctcagcgacgccgcacaggcggaggccatcgccgcgctcgccacctacttcggctggcgacgcgtcgtgcccatctaccaggacgacgactacggcgcggctttcgtgccgttcctcgtcgacgcgctcacggcggtgcgcgcggaggtgccctaccgctgcgcgctgccctccggggcgtccagggacgccgtcgccgccgcgatgtatcgcctcgagtccgaacagacgcgggccttcgtggtgcacgcgcgcccggcgctcgcggagctcgtgttcgccgccgcggtggaggctgggatgatggcggagggctacgcgtgggtcatcaccgacgggctcacgggcctcctcggctccatccatccgccgcagggcgtcatcgggctcgcgccccacgtgccgtccaccgcgcgcctgcgcgacgtccggaagcggtgggcgcacaagttcatgcgccaacaccgggacgccgatctggctcaagccgagatgggctgctacgcgctgtgggcgtacgacgccgcatgggccgtcgcgtccgccgccgagcgccttgttagccccggtgaccagccatcgctgcaggggcttgtcggcggcaggagcggccccacggacttctccgggctcggaaagtcgatgtccggggccaagttcctcgcggcaataaccagcactacgttcgagggcctcggcggcaggttcgagctcatcaacggcgagctggcggtgccggccttccggatcgtcaacatcatggacgacgccagggagcggggcatcggattctggacgcgcaagggcggactgcacaggcaactggggcgccgcgggatcgcgtcgaacagcgggctcttgccggtgatctggccggcggactcgaccgtcgtgccgattggttgggtccagccgacgagcggccggaagctgcaggtggctgtgctggggagagtcgaccctggctattggccgatcatgcacctcgacgtcgacccagctacaaaccggacggtagccggtgggttcgtcatcgaggtgttcgaggcggcggtgcgtctgctgccctacgcgctgccgttcgagtacgtgctagtgggctccatgcgctacgacactctagtcgagagggtcggcaaaggggagttcgacgcggcggtggcggacatcaccatcacggcgaaccggtcgcagcacgtggacttcacgctgccgtacatgtcgtcggggatctccatggtggtgccgatgcgcgaccagcggagcaagcgcgccgcctgggtcttcctcaagccgctccgctacgacctctggctcatcagcttcgctttcttcgtcttcaccggcttcgtggtgtgggccatcgagcaccgcagcaacgaggagttccgtggccccccatcctaccagatcggcaccctcctctacttcggcttttcgaccctcgtctttgcacacacttgagccggcgatcggggacttcgcctcgctgtggccggggacggacaaggtggggatcatgaacaactcattcatgcgggaggccatgaccaagacgggcttcccccagtacaggctcaggccgtaccaggccacgcagagcttccacgaggcgctgctcaacggcaccatcggcgccatcgtcgacgagacgctctacctcaggctcttcctcaactcctactgcgacaacttcacacagatcgcccagagcaacaagaccggcggcttcggcttcgcattccccaaggggtcgccgtacgtgggggacctgtcgcgggcgatcctgaacctcacggagagcgacgagctgagctcgatcgagcgcaagtggttcggcgacgcggacggctgcgcggcgcagggcagcccgttcacgtcggccagcctcagcttcgacagcttctggggcctgttcctcatcaccggcgccacctccctgttctgctgcgcgctgcacctgctcctcttcgtcgtggccaatcgccggcggatctgtgcggcgcgcgtgccctggagaatcaggctccgggtcgtcctcaagctcctcgacgacaaggacctatcgtcgcacacgttcaggaccatcaaggatggcggcgggtcggtggccggtcggagcgccggcgcccacgacgcgggcgcctccccggccgtcgcgcgcatcgcagccggaagcccgctcagcgtgtccaaccacacgtacgacatgagcgagtggtcatttggtgcgcagagcccggcgcctgcagctgcaggtgagatcgagctggctggcgccggcgaggcaggggaggtggcctcagctcccccaaccctcgcggcggctcgcggctccagtgatcaaagtggcacagtcgtccatcaggccagtaactgatcaaggtcttctctgagtgctctggcaggaaatgtacaggttgctatcatacgtgtagatttgggccgtttggatcccgtcatatttagaaggaattaaaatctagtttgggtaggttatttagcttagagtttagcgttctatagctttgcaaagcttagacacaaagttaccttaaattcacgaaggtggtagatggaaattaattgtatagatctctatactatgagtctacacactcttcaactcacttccctatagcacaaatacaacacataaatagtaaaatgttgtag

SEQ ID NO: 21861 - DNA, 627 bp, Zea Mays
ccgtaccgttgagcgcgtcactcagtctccgtgtgctagcttagcttgtgagaaacggaagctgagatcgtcgaggcgtggcgcggcatgttgctgcatctggccctgtagtagtgtacataggcaggcaccgccgcaccgtgcgtccgtgcctgctactcagggcaaactactagctagctagtcggtttctccttcaggtgactgtccccatgatagcgggagcggcggctgcaggtcagctgctggtcgtagcggggggcgcgcgctcgtctggttccgcggcgctcccgtctcgtcctctcgctctcctcctcctcctcctcctcctcctcctctgcctcgtcggcgccgagcaggcggcccctacacccggtgccgccggagagaggcggcgcgtggacgtggacgtgggtgtgatcttggaccgcacgacatggctagggaacatcagctgggcgtgcatggagctggccctccaggacttctacgccgacgacgacgacgccggctacagcacccgggtcaggctgcacctcagggacgccccggccgggcccagcgccgtcgacgccgcgtccgcaggtgttgatctactgaaaaatgtccatgtgcaagcaatcgtcg

SEQ ID NO: 21862 - DNA, 4114 bp, Zea Mays
caggtgcaagatccatccttcagctggagaggatgagataaagcgtgctatatcaggcctaaaagaaaattggacaagtgtctttgttgtgcgcatgtcatatcagttagcccttaagtttttccagcttgctaaggatgagggaatgatgggccagggctatgtctggattacggcatatggtctgacagatatcttcaatgtagttggttatcctgcacttgaagtgatggaaggtgtagttgggatcgagccttatgttccagaaactgtgaaactaaacaaatttagacggagatggcgtgagaaatataggtcggaaaatcctggtacatcaattaatgagcctataacgtctggtctatatgcatatgatacagtatgggcaatagcattagcagcagagcaggccggatttgttaattcagactttgtgctgtccgaaacaaacaacgggtccactgatttcgacaaaataagtgcttataaggctgctgaaaaatttcgtggtgcattcttgaaggttaatttcacaggcattagtgggcaatttgtcattcaggatatgcagttccagttagtatcaacaacttacaaaattatcaatatagctggtcgggagaagagagcagtcggtgtttggactccaggattgaacatgtccaaaattctagaaaagaaagatggtatcagtactatcatatggccaggaggcagtgaaaacacacctagaggatggcttttgccagcaaataaagaactcaaagtaggagtacctgtgaaacctgggtttggcagttttataagatctgaagatggtatcccgaaggggttctgcattgatgtatttgaggaagttatcagtaatctgacttacaaagttcccaagcactatgtggagtttggaaatggagaaggagaaagtaatgggacttatgatgaactcgtgtacaaagtttatcttaaggaatttgatgcggtagtaggtgacataacaattttggccaaccgttctctatatgtggactacactcttccttatactgagtcaggggtacgcatgctggttccagttcgggaccagagacagaagactgcatggacattcctagaacctttaacagctgatctatggtttggaactggatccttcgttgtcttcacaggttttatagtttggtttatcgagcacagaacgaatcaggaattcagaggaccgccagccagtcaaattggatcagtcttctacttctccttctcaacacttgtatttgctcatagggagaggattgtgaacaatttatcaagaattgcagtagttgtttggctttttgtggttctaatattgcagcagagttataccgcaagcttaagctcaattctcacggtagaacagctccaaccaacagtcaccaatttagatgaagttatcagacgaggggattatgttggctacctcaatgattctttcatgcctaaccttttgaaaaggttgaaaattaacgaaacaaaaatgagggccttcagctctcctgaggagtacaatgacgccctatcaaccggaaaagttgccgtcattgttgatgaaataccatacctcaaagtgtttcttgcgaagtattgccacaactacactatggttgggccaacttacaaatttgatggatttggttacgcgttccctcgaggctctccacttacacctgaaatttcaaggggaatactggaactagcatcaaatggcagaatggatgaactggagaaaaagttgtatggtgatacatcgtgcccagacaaagatgactcccaaacttctagcagccttacgttgcatagctttcttgggttgtttatcatcactggggcatcttctttactggctttaattttgcatgtcattataaccctttatgatcatcggagcaattggatcaatggcagtggtcagatatcatggcgtgaattgcttgctattctcgtcaagatctttcatgagcgtgatagcgctaatactccagatgaagaggtgcctggaatggaagatatagatcctgctacagccgagagtccatggagcatgtctaatcacgtcatcgagaacgttgattcagacactgataccggaagcacaccagaaggagaaggaactccaggcagggaagttgcgaatcagggtcctggtccactatcatttgcatacatgcattctgagggggcaatggagtaacatagcattctttcatctcgcgcttccagcaccaagatagaactctttggtcatgtcgcgtactgtacagtgaaattgatttagatgtatcgcctgcctctagtttcatgtttaatacaagtgtgtgttaacatgtaccgctggctgttgtcatgactagttaactaggaaatttaacatagtaatatctttgttgaaagaggtgcctgtgcatcttatagaagtgtggctctgatatagacagtaactattttttcttatctcctgacacttcaccagattcctaaaaacaagccattgctaagaccttgtttgtttccctccagaattatataatccagcttatagaattatataaacacctaatgacctgcttacagattatcataatctaggtatctaaattatataatccacctaataatttgtgttgtttatttatttctttaacttatttaagcagaattatttaatctgtagggtaaacaaacaggaccttaagtaccattgtactatggcgtttttaagtgagcattatttgaacataaaattagactgtccagtttattagtcacctcttgagcaattgatcaaatactgtcaccgagtcaaagctttgttgtcttgttgatggtcactataagatgcatacaatatacaaacgcctaaccaaagaaaagataccattttcatacacaagtgtcaccaggctttactcagtgcaaaactgtataatactaaggtcatgtttgtttatcttctaaattatataatctagattaaataagctgagagacaaacaaacaacacagcttattaggtggatgatataatttaggcacctagattatattatgataatctataagcaactcattatgtgcttatatagttatatatgactccataagctagattatataatcctatagtgtcattgtaaggaaaatggaccccgggtcatttggcttaatagattttggtgtttgatgattaacacaacatgtgaactaatgtattttccaaatgtttgtgtgttgtagttcacaggatgcgaagtggattggattgaggctctgaggatgcaacacctcaaagaagacattataagactcatagaagacattacaaagtaatattgaagacactttatatatgctaagagtccaacacatcaagaagtagaagtgagatacaaagctacaaaacaaaagtgaagttgataaagttgagaggaagggatgactgaattagaagtgtttcacaacatcaaatctattcaaactgacatggcttcaactctgagatgtagacaattttataagctttccaaaaagtccaagatcatcaaaatcggagttcggagctaaaagttatgcccacaatacgaagtcggaattgctgaaaaactgcagtagcatatgtgatgtctggtgcacactggcctgtccggtgtgccaaatttgctcaaactgatatggctttacctctgggatgtagagaatttcataagatttccaaaaagtacaagatcatcgaaatcggagttcggagctaaaagttatggccaaaatacgacaagcggacatgggatgtccggtgcacaccggaccgtccggtgcaccatcttcggaagctccaacgactaattttaatggctagtacatgtggcatgtccggtgcaccaccggacagtccggtgcacctatccggtgcgccacagaaagctgcagaactgctttccaacggctatatttgagttggggcctatatatacttcacccaaccggacatttgaaggtgtgggagcccaagcaacataccaaggcatattgtagacatttccaagtgcttaatagaatcactcggtgattagcgtaggtgctt

SEQ ID NO: 21863 - DNA, 1694 bp, Zea Mays
ctatatcaggcctaaaagaaaattggacaagtgtctttgttgtgcgcatgtcatatcagttagcccttaagtttttccagcttgctaaggatgagggaatgatgggccagggctatgtctggattacggcatatggtctgacagatatcttcaatgtagttggttatcctgcacttgaagtgatggaaggtgtagttgggatcgagccttatgttccagaaactgtgaaactaaacaaatttagacggagatggcgtgagaaatataggtcggaaaatcctggtacatcaattaatgagcctataacgtctggtctatatgcatatgatacagtatgggcaatagcattagcagcagagcaggccggatttgttaattcagactttgtgctgtccgaaacaaacaacgggtccactgatttcgacaaaataagtgcttataaggctgctgaaaaatttcgtggtgcattcttgaaggttaatttcacaggcattagtgggcaatttgtcattcaggatatgcagttccagttagtatcaacaacttacaaaattatcaatatagctggtcgggagaagagagcagtcggtgtttggactccaggattgaacatgtccaaaattctagaaaagaaagatggtatcagtactatcatatggccaggaggcagtgaaaacacacctagaggatggcttttgccagcaaataaagaactcaaagtaggagtacctgtgaaacctgggtttggcagttttataagatctgaagatggtatcccgaaggggttctgcattgatgtatttgaggaagttatcagtaatctgacttacaaagttcccaagcactatgtggagtttggaaatggagaaggagaaagtaatgggacttatgatgaactcgtgtacaaagtttatcttaaggaatttgatgcggtagtaggtgacataacaattttggccaaccgttctctatatgtggactacactcttccttatactgagtcaggggtacgcatgctggttccagttcgggaccagagacagaagactgcatggacattcctagaacctttaacagctgatctatggtttggaactggatccttcgttgtcttcacaggttttatagtttggtttatcgagcacagaacgaatcaggaattcagaggaccgccagccagtcaaattggatcagtcttctacttctccttctcaacacttgtatttgctcatagggagaggattgtgaacaatttatcaagaattgcagtagttgtttggctttttgtggttctaatattgcagcagagttataccgcaagcttaagctcaattctcacggtagaacagctccaaccaacagtcaccaatttagatgaagttatcagacgaggggattatgttggctacctcaatgattctttcatgcctaaccttttgaaaaggttgaaaattaacgaaacaaaaatgagggccttcagctctcctgaggagtacaatgacgccctatcaaccggaaaagttgccgtcattgttgatgaaataccatacctcaaagtgtttcttgcgaagtattgccacaactacactatggttgggccaacttacaaatttgatggatttggttacaactgtgctattgtacatttgtactagatcatagttcctaaaatctgatgccatgggagcaagttt

SEQ ID NO: 21864 - DNA, 4216 bp, Zea Mays
tgtccgcccagccgccccgctgctcgccctgtctacacgtcaggcaccgtaaccactagcctctgctcgctagcgtcgtgcgctcctctgctgaattcgacgcttcgctgtcctacgagctctaccgcgccgaactgccaagccagtggccgacgtgctctgtcctcaccgtccctgctcgttcccctacagcaagttgttggctctaagatgccgggttccctccacctagctccgccaccggtgctcggcttcatccgcgacggtgtcccggtgtcgagcaccttgcccagctccgctactcctgactcgccggcaacctgtggctcggacttcaccatcggctctttgtgtgcttcgctgcgccagatcgccgcgtcaccgtgaagctaaatgccttgcctttcgctgctgttgtagccgagtcgtcatcgcccaagtgctgagcgccctgaactcgccaccgttctgcagtcccgccgtcggctcactgctcgtctcgctacattgccatcgttcactatcctcgtcctcgccgtctacctcgccgctcctcacgcccaacaagttgtcacgcttggcatgtttcctccatgcggcctcacgcgttcctctcgcttcatctgctagtcgtggggtagtgcagatcacgttgtctgtgaatcaatcgattggtggagtaattttctagagactggtcattaccctgaagactcatgaaattttatttccttagtcttcagctcttctctgcaacaaaggcaagccccgatgcattcaccactttccttgttgtttacaaaacttttatcacttgatatgctgcattaggtgataggagttacgtgatcaaacaattgatgcattaccatccttgagaatttgaataatcattccttgatacctattgtatgaaaaactagtgtcgcttagccctgcttaaagtgataggattttgaaatttattttgattactgattattgttatgtgtgaatgaacttgagttagataactaatatgagaccaggcgggtggcttgcatcgtgaaatgagtcggtgtagtgctccgcctgtgtcgattaaggaccgttcgatgtaggcctgttgtggttgagactttgcaactagccacatgcctcggtaagcctgaacccagctattccatacgtgaaaagagaaccgcgcactgggcgtgggagatggtgggagtagcgtgtaccctcctggctagaggctggacggaagagtattgtgctcccgggtagcgcggaccggttcacgttgtggaggatcagtgggaacggttgacatatgcaagggttaagttctacatatgtcgtgtggttagaaatcctcagctgggtataatcggttcgaatcatcgttgctcctcggttatagagacttgaccctccgaccactcatcgtagttaataagtgaaacatgaattggctaaaagaaagctagataggacaagtgaatgctctagatcaggaaaatctagaatcatctagaatcaggtaagaacttaaattgataattaaaagatggcctaaggatccactattagtaagcgtttctgcaaaatgagtccttgattattgcttagtcttatcttgactccctctagccagtatacccttgagagtcttttctttagtcgggtaagtcttgctgagtaattgcgtactcagggttttattccctgttgtttttcaggtcttagtatttgtgttgttgatggtggtgttaagtgccggtgggctcggccttcttataagtctaagtaacccttctatacttcttattgaggatggtctcttgagctagcatatatttcaaacttatacttttgtaatcactccgatgaatataatgtaaaatttttgtaacttgtaaaatttggtaacaaggtttccgctgcaaaaatattgatgtgtgtgatttgtgttatttaatcttgcggtcctggttgtatgtggttttttcgatgtccttggggcaatcggacggatcctattaagttatctggtgcacatgcatggccgtctgaggtctttgagacaagggcaggtgcatgtgggcccgataacttgggagattccgccatagtcgctctttctaccgccgaagacgagtatattgccacaggccattgttgcgcgcaattgctttggatgaggcaaacccttagggactatgactacaaatttagcaaagtccctctcctatgtgacaatgagagtgcaatccacatggcggataatcccgttgaacacagtcgcactaagcacatagccattcggtatcactttctgagagatcaccaacaaagggggataccgagatagcctatatcaacaccaaagatcaattggacgatatctttaccaagcctttagatgagaaaacctttaccaaacttaggaataagctaaatattcttgattctaggaattttggttgattctttgcacacatagcttatttatatacctttgatcatatctcttttatgtctatgactaatgtgttttaaagtgtattattatgcttagtcatagaattgaaagggaaatggagtattcggcaaagacgacgcttccactcaactccatcggtattatctactctttgccggtattccgcataattctccactataatcctcactcatatctatttatttgccattggggagaaagcaaaagggcttatatttcactcacaagtatccgtttttggcgattcatgccaaagggggagaaagtattagcccaaagcaaaaggaccgcaccaccaccaaattttaaaatgaagttttcaaattgatatcttaatgtgttttcaaaaggggagaaagtatcttcaaaaatttgtaaaactctcttgaacactaaaaggagaatttcattgagggggagttttgttttagtcaaagaaaaaagcatttaaaacagggggagaaaatttcaaatcttgaaaatgcttctttcaatcttattcatatatctatttgcaaaagtttttgaaaagaattttacaaagaatttgcaaaaacaaaactcgtggtgcaagcgtggtccaaaatttttataataagaaaaccatccatgcatatctagtagaaataattattggtttcattccaagcaacctttgcacttaccttatgcaaactagttcaattctacacttttatatttgctttggtttgtgttggcatcaatcaccaaaaagggggagattgaaagggaaatagggtcaaaccttttcctaaatgattttggtggttgaattgcccaacacaaattattggactaactagtttgctctagattatgagttctacaggtgccaaaggttcaacataaaccaataaaaagtccaagaaagggttaaaataaaagagcaaaagacaaccgaaggctgccttggtctggcgcaccggacagtgtccagtgcaccaccggacagtgtctggtgcaccagggagatcgactctgaactgctcagcttcgggaatttggggagcccctccgctataattcaccggactgtccggtgtagcaccggactgtccggtgtgccagcggagcaacgactatctgcaccaacggtcgtctgcaaaatgtctacagtgaactgaacagtgcaactgcgcgcgcagaagtcagagcaggcggcagaaggcgcacctgacagtgaagagaacctgtccggtgcaccaccggactgtccggtggccccacaagtcagagctccaacggtcgaactctaacggttgggtgacgtggctggcgcaccggacagtgtccggtggcgcaccgaactgtccggtgcgccatacgacagcagcccctcccaacggccactttggtggttggggctataaataccctccaagcaccacacttcaaggcatccaagtttttagccaacacattcaatacaagagctataacattcaattcaagacacaattagagtgaatcaacatctctccaagccccaattccactcaaagcaatagtgactagaagagagagttttgccgtgttcatttgagctcttgcgcttggatcgcttttcttcttccttctttcttgttcccaactcaattgtaatcaaggcaagagacaccaattgtgtggtggtccttgtggggacttagtgtcctgattgattgagaagagaagctcactcggtctagg

SEQ ID NO: 21865 - DNA, 4119 bp, Zea Mays
gtccgcccagccgccccgctgctcgccctgtctacacgtcaggcaccgtaaccactagcctctgctcgctagcgtcgtgcgctcctctgctgaattcgacgcttcgctgtcctacgagctctaccgcgccgaactgccaagccagtggccgacgtgctctgtcctcaccgtccctgctcgttcccctacagcaagttgttggctctaagatgccgggttccctccacctagctccgccaccggtgctcggcttcatccgcgacggtgtcccggtgtcgagcaccttgcccagctccgctactcctgactcgccggcaacctgtggctcggacttcaccatcggctctttgtgtgcttcgctgcgccagatcgccgcgtcaccgtgaagctaaatgccttgcctttcgctgctgttgtagccgagtcgtcatcgcccaagtgctgagcgccctgaactcgccaccgttctgcagtcccgccgtcggctcactgctcgtctcgctacattgccatcgttcactatcctcgtcctcgccgtctacctcgccgatcacgttgtctgtgaatcaatcgattggtggagtaattttctagagactggtcattaccctgaagactcatgaaattttatttccttagtcttcagctcttctctgcaacaaaggcaagccccgatgcattcaccactttccttgttgtttacaaaacttttatcacttgatatgctgcattaggtgataggagttacgtgatcaaacaattgatgcattaccatccttgagaatttgaataatcattccttgatacctattgtatgaaaaactagtgtcgcttagccctgcttaaagtgataggattttgaaatttattttgattactgattattgttatgtgtgaatgaacttgagttagataactaatatgagaccaggcgggtggcttgcatcgtgaaatgagtcggtgtagtgctccgcctgtgtcgattaaggaccgttcgatgtaggcctgttgtggttgagactttgcaactagccacatgcctcggtaagcctgaacccagctattccatacgtgaaaagagaaccgcgcactgggcgtgggagatggtgggagtagcgtgtaccctcctggctagaggctggacggaagagtattgtgctcccgggtagcgcggaccggttcacgttgtggaggatcagtgggaacggttgacatatgcaagggttaagttctacatatgtcgtgtggttagaaatcctcagctgggtataatcggttcgaatcatcgttgctcctcggttatagagacttgaccctccgaccactcatcgtagttaataagtgaaacatgaattggctaaaagaaagctagataggacaagtgaatgctctagatcaggaaaatctagaatcatctagaatcaggtaagaacttaaattgataattaaaagatggcctaaggatccactattagtaagcgtttctgcaaaatgagtccttgattattgcttagtcttatcttgactccctctagccagtatacccttgagagtcttttctttagtcgggtaagtcttgctgagtaattgcgtactcagggttttattccctgttgtttttcaggtcttagtatttgtgttgttgatggtggtgttaagtgccggtgggctcggccttcttataagtctaagtaacccttctatacttcttattgaggatggtctcttgagctagcatatatttcaaacttatacttttgtaatcactccgatgaatataatgtaaaatttttgtaacttgtaaaatttggtaacaaggtttccgctgcaaaaatattgatgtgtgtgatttgtgttatttaatcttgcggtcctggttgtatgtggttttttcgatgtccttggggcaatcggacggatcctattaagttatctggtgcacatgcatggccgtctgaggtctttgagacaagggcaggtgcatgtgggcccgataacttgggagattccgccatagtcgctctttctaccgccgaagacgagtatattgccacaggccattgttgcgcgcaattgctttggatgaggcaaacccttagggactatgactacaaatttagcaaagtccctctcctatgtgacaatgagagtgcaatccacatggcggataatcccgttgaacacagtcgcactaagcacatagccattcggtatcactttctgagagatcaccaacaaagggggataccgagatagcctatatcaacaccaaagatcaattggacgatatctttaccaagcctttagatgagaaaacctttaccaaacttaggaataagctaaatattcttgattctaggaattttggttgattctttgcacacatagcttatttatatacctttgatcatatctcttttatgtctatgactaatgtgttttaaagtgtattattatgcttagtcatagaattgaaagggaaatggagtattcggcaaagacgacgcttccactcaactccatcggtattatctactctttgccggtattccgcataattctccactataatcctcactcatatctatttatttgccattggggagaaagcaaaagggcttatatttcactcacaagtatccgtttttggcgattcatgccaaagggggagaaagtattagcccaaagcaaaaggaccgcaccaccaccaaattttaaaatgaagttttcaaattgatatcttaatgtgttttcaaaaggggagaaagtatcttcaaaaatttgtaaaactctcttgaacactaaaaggagaatttcattgagggggagttttgttttagtcaaagaaaaaagcatttaaaacagggggagaaaatttcaaatcttgaaaatgcttctttcaatcttattcatatatctatttgcaaaagtttttgaaaagaattttacaaagaatttgcaaaaacaaaactcgtggtgcaagcgtggtccaaaatttttataataagaaaaccatccatgcatatctagtagaaataattattggtttcattccaagcaacctttgcacttaccttatgcaaactagttcaattctacacttttatatttgctttggtttgtgttggcatcaatcaccaaaaagggggagattgaaagggaaatagggtcaaaccttttcctaaatgattttggtggttgaattgcccaacacaaattattggactaactagtttgctctagattatgagttctacaggtgccaaaggttcaacataaaccaataaaaagtccaagaaagggttaaaataaaagagcaaaagacaaccgaaggctgccttggtctggcgcaccggacagtgtccagtgcaccaccggacagtgtctggtgcaccagggagatcgactctgaactgctcagcttcgggaatttggggagcccctccgctataattcaccggactgtccggtgtagcaccggactgtccggtgtgccagcggagcaacgactatctgcaccaacggtcgtctgcaaaatgtctacagtgaactgaacagtgcaactgcgcgcgcagaagtcagagcaggcggcagaaggcgcacctgacagtgaagagaacctgtccggtgcaccaccggactgtccggtggccccacaagtcagagctccaacggtcgaactctaacggttgggtgacgtggctggcgcaccggacagtgtccggtggcgcaccgaactgtccggtgcgccatacgacagcagcccctcccaacggccactttggtggttggggctataaataccctccaagcaccacacttcaaggcatccaagtttttagccaacacattcaatacaagagctataacattcaattcaagacacaattagagtgaatcaacatctctccaagccccaattccactcaaagcaatagtgactagaagagagagttttgccgtgttcatttgagctcttgcgcttggatcgcttttcttcttccttctttcttgttcccaactcaattgtaatcaaggcaagagacaccaattgtgtggtggtccttgtggggacttagtgtcctgattgattgagaagagaagctcactcggtctagg

SEQ ID NO: 21866 - DNA, 3063 bp, Zea Mays
cgacgcttcgctgtcctacgagctctaccgcgccgaactgccaagccagtggccgacgtgctctgtcctcaccgtccctgctcgttcccctacagcaagttgttggctctaagatgccgggttccctccacctagctccgccaccggtgctcggcttcatccgcgacggtgtcccggtgtcgagcaccttgcccagctccgctactcctgactcgccggcaacctgtggctcggacttcaccatcggctctttgtgtgcttcgctgcgccagatcgccgcgtcaccgtgaagctaaatgccttgcctttcgctgctgttgtagccgagtcgtcatcgcccaagtgctgagcgccctgaactcgccaccgttctgcagtcccgccgtcggctcactgctcgtctcgctacattgccatcgttcactatcctcgtcctcgccgtctacctcgccgatcacgttgtctgtgaatcaatcgattggtggagtaattttctagagactggtcattaccctgaagactcatgaaattttatttccttagtcttcagctcttctctgcaacaaaggtcttagtatttgtgttgttgatggtggtgttaagtgccggtgggctcggccttcttataagtctaagtaacccttctatacttcttattgaggatggtctcttgagctagcatatatttcaaacttatacttttgtaatcactccgatgaatataatgtaaaatttttgtaacttgtaaaatttggtaacaaggtttccgctgcaaaaatattgatgtgtgtgatttgtgttatttaatcttgcggtcctggttgtatgtggttttttcgatgtccttggggcaatcggacggatcctattaagttatctggtgcacatgcatggccgtctgaggtctttgagacaagggcaggtgcatgtgggcccgataacttgggagattccgccatagtcgctctttctaccgccgaagacgagtatattgccacaggccattgttgcgcgcaattgctttggatgaggcaaacccttagggactatgactacaaatttagcaaagtccctctcctatgtgacaatgagagtgcaatccacatggcggataatcccgttgaacacagtcgcactaagcacatagccattcggtatcactttctgagagatcaccaacaaagggggataccgagatagcctatatcaacaccaaagatcaattggacgatatctttaccaagcctttagatgagaaaacctttaccaaacttaggaataagctaaatattcttgattctaggaattttggttgattctttgcacacatagcttatttatatacctttgatcatatctcttttatgtctatgactaatgtgttttaaagtgtattattatgcttagtcatagaattgaaagggaaatggagtattcggcaaagacgacgcttccactcaactccatcggtattatctactctttgccggtattccgcataattctccactataatcctcactcatatctatttatttgccattggggagaaagcaaaagggcttatatttcactcacaagtatccgtttttggcgattcatgccaaagggggagaaagtattagcccaaagcaaaaggaccgcaccaccaccaaattttaaaatgaagttttcaaattgatatcttaatgtgttttcaaaaggggagaaagtatcttcaaaaatttgtaaaactctcttgaacactaaaaggagaatttcattgagggggagttttgttttagtcaaagaaaaaagcatttaaaacagggggagaaaatttcaaatcttgaaaatgcttctttcaatcttattcatatatctatttgcaaaagtttttgaaaagaattttacaaagaatttgcaaaaacaaaactcgtggtgcaagcgtggtccaaaatttttataataagaaaaccatccatgcatatctagtagaaataattattggtttcattccaagcaacctttgcacttaccttatgcaaactagttcaattctacacttttatatttgctttggtttgtgttggcatcaatcaccaaaaagggggagattgaaagggaaatagggtcaaaccttttcctaaatgattttggtggttgaattgcccaacacaaattattggactaactagtttgctctagattatgagttctacaggtgccaaaggttcaacataaaccaataaaaagtccaagaaagggttaaaataaaagagcaaaagacaaccgaaggctgccttggtctggcgcaccggacagtgtccagtgcaccaccggacagtgtctggtgcaccagggagatcgactctgaactgctcagcttcgggaatttggggagcccctccgctataattcaccggactgtccggtgtagcaccggactgtccggtgtgccagcggagcaacgactatctgcaccaacggtcgtctgcaaaatgtctacagtgaactgaacagtgcaactgcgcgcgcagaagtcagagcaggcggcagaaggcgcacctgacagtgaagagaacctgtccggtgcaccaccggactgtccggtggccccacaagtcagagctccaacggtcgaactctaacggttgggtgacgtggctggcgcaccggacagtgtccggtggcgcaccgaactgtccggtgcgccatacgacagcagcccctcccaacggccactttggtggttggggctataaataccctccaagcaccacacttcaaggcatccaagtttttagccaacacattcaatacaagagctataacattcaattcaagacacaattagagtgaatcaacatctctccaagccccaattccactcaaagcaatagtgactagaagagagagttttgccgtgttcatttgagctcttgcgcttggatcgcttttcttcttccttctttcttgttcccaactcaattgtaatcaaggcaagagacaccaattgtgtggtggtccttgtggggacttagtgtcctgattgattgagaagagaagctcactcggtctagg

SEQ ID NO: 21867 - DNA, 4260 bp, Zea Mays
ttcgcgccgcagacagtgctcgcgaaacgagcgttcggcggcaacggcagcggccagccgtgagagaagagatgatgctgataaggccgccgcggtttctctccccttcgccctcgccagggacacgcgagccccgccttcgccggcctctcgatgcctccagaatcttctcctcccctcgtcctcccggtcgccgttcccgcccccgcccccggctcgtctctccgtccaccgatctccgccgcctcactgcccgcatcgtcgacctcacccgccgcaggcagctcgcccaaatcatggaggaggtggaagcagcgcggcgtcgtgtgcgtgggggcgggttgctcaacaccatcgtcatgaacgcggttctcgaggcatgtgtgcgctgcggcgacgtcgaccgagcgctccggctcttcgaggaaatgcgcgggcccatggggtgcggagtcgacgatgtttcctacggcatcctgctgaagggcctgggtatagcaagaaggattgatgaagcattcgaaatactggaatcaattgagaaagattcttctattggggggcccaggctctctcctcatctcatttgtggttttctaaatgcccttatcgaagcaggagatatgaggcgtgccaatgctcttgtcgcccgtttccgcatggtcctttacgaggatcactctgtcttactatacaacttactgatgaaggggtatattaagagcaacttccctctcggagctttgactgttaaagacgagatattgcgtcaagggttgaagcctgatagattgacctacaataccatcatttctgcctgtgtaaaatcagcagagaatgataaagctatccaatttcttgaagatatgaaggaagaagctaatacagaaagtaaccctgaacttcttccagatgctgttacctacacaacattactcaagggtttaggaaatagccgtgacctttattcagtcgtgaagattgttgtggagatgaaatcttcactaatttcaatcgacaggactgcatacactgctatggtagatgctttgctagcttgtgggtccatcgacgtggttcagcatttagcgttccatttgacgctaacaagtgacatatcacattcttatctgtacccttttatgtcccagttgcccaagcagcatatccagtctaaagtatctaaaatggtgaaactgttcttcgtcagttgtgtttgcataattttttataattacatcaccgatgtgtataacctagttgtacttctcaaatcatcacatgcagtgactataagttacaccaaaatcattttctgaggtatagactatagatcacttgttagtatggttcatttaaccttactgttgtgcacaagcaaattgcttgacaaatgacgatacttgatgcctctcgcaacctattaggatcatgcctggttttaaatattatggtccatgcaggcgaatgtttttcatattttaagttatcatttcctcacttgcatagtaaatgagaatgtcaactttagcactatttgcttagcatgaccctctgttttgtatcctagatatctgcctctgggtctattctaatgttttgacaatttatcgcatgtcttgattactctctagcaattcagcattatccataattcttaatctagttggtcctgagatgataatgttaccagtttacctaaatttagtttcttcattacatttgttcaaaatatcttcaaataatttacacatatccttcattgtaatgtaatatgtgtgcccctagccccaacaaatatttgtgacaacaaatgtgttcacatttggactttgtagaagaaataaaaatggataataactatgcatatgttaacatgagtattgtgttaaatttgagaatctttcagtgttcatgaatatacagaactacagactaacttatttttactttccatcttagtgtataaactctttgtccttgtttaagtgaatataaatgtggatgaggcaatcaaattaccttgttgcgagaatggcaatgctgtttcatgtgttcttgagatcatgggttatgagagtgaaagctgttattcagacaaaaaaaaacctcttgtttatgatgtgtactagatttctgtactgatatgctttgaaccttattggtgcttatcgtaggggccctttgcatttttggtgatataataaagcatgctggcaagaacaatgatttgagacctaaacctcatctttatctttcaatcatgagagcttttgctaccagaggtgatgttgatatggtcatgagatttaacaagcgcatgtggctggattcagttggatcaattagccgtgccgccaaagaagagacacatgagctattaatggaagctgccataaataataatcagatagatttggctagagggcttctaagaagaatagtaaatgagaaagaatgtttctcttggacaagtagagtaggcctggtcgcagttaaagttgaaagcttatctggattcaccaactctcttctaaggccccacgtatttccacagattatcttgaatgatccagttgagaagtatatggttccatttcaagaatctcgaccattacccgccgacttaatattgcggaaggttgtgatgcgtttgttgaaagagcgtgcagttcctcttgtggatgattggggaggatgcattggcatagttcaccgcgatgattgtaccaagctggacgcacctcttatttcaatgtctagagggccacctctgtgcgtacctacttcaaccaccgtggagcacgtcattgacctcctcctgagaaacaagtccgagatggtgatcgtggtgaagagtggtaacatgtacgaaggcagctacacatccagctcaagacccttgggcgttttctccctcgccatactatggagcttcaccggcgactactcgtcaggatcagatgatgtccccgacgcaggcatctcccgggcagcaaaacccaaaccagacgccgaggcctgcaaccacagctagtttggtgtttcttttgctcagcttatagcaactccgcgtcgtgttgccgggcaaactagtcatgtaatggtcctccagttggacaaggggtgcatgcgaaaaaaggttttgatcctgacctgctgtggctgcgtgctgcgtacgatgtcttctgatgcacagagcgaaagtgacagtggactggagatttcctcccagccttcggttgaggcgccccaccgcgcagtgatggtcctgagtcctgaccggtttggtggcatgtggcatccctgctctcactcacggtgccgttttccgatcagtaattggtaatccccttggtaactaatttgggtctatgctaagatgttcaccgatcagtagtactgtgcgcagtgtattgctgctgcctgatgctgggactgggatacagaatcctcctgttgccgtgcacagttgctcttatcttctgtgaaccttcagtatggactggcaggacagtggatatgtgtcgatgaacggcccgagcactccgttggggccccgcttggacgcctcatgccataggccacaggccatagctagcattatctgccttctgggaggtgcatgtgcagtgcatctacccatctgggaagcggtaggtttccattggagggctctttgcctctttggtagtttggtccctgttgtgtcatgccagggtgtggcactgttacgctcgaaagtcgagagatttctgggtgggtagcttgggtaggcctgggtgcttctgcccccttgtccaggagtgtctcggtccagctttgcatcatccgtgttagttggaccggtgtcactacccggcagtgacggctggcgcctggcgctcgtactcggggtggcccgccagcggccgggtgattattgctgcctgaaagcatggaataataagggccttaatttcaatccacgtggatcgaggatcgaaggggttaagggtttgtaagtattgagaaggattgaagggattaaatgtcttccaattcaaaattaaatagaagatgatttaatctctataaatcaccttcgatctctgtgtggccaagtaggtttaaattcgtagcatgtcaaaacctttgttcattccttctcatctatgtaagggcacgtacaatggtatttaatgtagagatttttgatgtgtctaaagagggtttttgcaaaaaaaaaatgtgaagatgtctctgtctttgtaacccaag

SEQ ID NO: 21868 - DNA, 4282 bp, Zea Mays
ttcgcgccgcagacagtgctcgcgaaacgagcgttcggcggcaacggcagcggccagccgtgagagaagagatgatgctgataaggccgccgcggtttctctccccttcgccctcgccagggacacgcgagccccgccttcgccggcctctcgatgcctccagaatcttctcctcccctcgtcctcccggtcgccgttcccgcccccgcccccggctcgtctctccgtccaccgatctccgccgcctcactgcccgcatcgtcgacctcacccgccgcaggcagctcgcccaaatcatggaggaggtggaagcagcgcggcgtcgtgtgcgtgggggcgggttgctcaacaccatcgtcatgaacgcggttctcgaggcatgtgtgcgctgcggcgacgtcgaccgagcgctccggctcttcgaggaaatgcgcgggcccatggggtgcggagtcgacgatgtttcctacggcatcctgctgaagggcctgggtatagcaagaaggattgatgaagcattcgaaatactggaatcaattgagaaagattcttctattggggggcccaggctctctcctcatctcatttgtggttttctaaatgcccttatcgaagcaggagatatgaggcgtgccaatgctcttgtcgcccgtttccgcatggtcctttacgaggatcactctgtcttactatacaacttactgatgaaggggtatattaagagcaacttccctctcggagctttgactgttaaagacgagatattgcgtcaagggttgaagcctgatagattgacctacaataccatcatttctgcctgtgtaaaatcagcagagaatgataaagctatccaatttcttgaagatatgaaggtgtcacacaagtgttggaaaggaagaagctaatacagaaagtaaccctgaacttcttccagatgctgttacctacacaacattactcaagggtttaggaaatagccgtgacctttattcagtcgtgaagattgttgtggagatgaaatcttcactaatttcaatcgacaggactgcatacactgctatggtagatgctttgctagcttgtgggtccatcgacgtggttcagcatttagcgttccatttgacgctaacaagtgacatatcacattcttatctgtacccttttatgtcccagttgcccaagcagcatatccagtctaaagtatctaaaatggtgaaactgttcttcgtcagttgtgtttgcataattttttataattacatcaccgatgtgtataacctagttgtacttctcaaatcatcacatgcagtgactataagttacaccaaaatcattttctgaggtatagactatagatcacttgttagtatggttcatttaaccttactgttgtgcacaagcaaattgcttgacaaatgacgatacttgatgcctctcgcaacctattaggatcatgcctggttttaaatattatggtccatgcaggcgaatgtttttcatattttaagttatcatttcctcacttgcatagtaaatgagaatgtcaactttagcactatttgcttagcatgaccctctgttttgtatcctagatatctgcctctgggtctattctaatgttttgacaatttatcgcatgtcttgattactctctagcaattcagcattatccataattcttaatctagttggtcctgagatgataatgttaccagtttacctaaatttagtttcttcattacatttgttcaaaatatcttcaaataatttacacatatccttcattgtaatgtaatatgtgtgcccctagccccaacaaatatttgtgacaacaaatgtgttcacatttggactttgtagaagaaataaaaatggataataactatgcatatgttaacatgagtattgtgttaaatttgagaatctttcagtgttcatgaatatacagaactacagactaacttatttttactttccatcttagtgtataaactctttgtccttgtttaagtgaatataaatgtggatgaggcaatcaaattaccttgttgcgagaatggcaatgctgtttcatgtgttcttgagatcatgggttatgagagtgaaagctgttattcagacaaaaaaaaacctcttgtttatgatgtgtactagatttctgtactgatatgctttgaaccttattggtgcttatcgtaggggccctttgcatttttggtgatataataaagcatgctggcaagaacaatgatttgagacctaaacctcatctttatctttcaatcatgagagcttttgctaccagaggtgatgttgatatggtcatgagatttaacaagcgcatgtggctggattcagttggatcaattagccgtgccgccaaagaagagacacatgagctattaatggaagctgccataaataataatcagatagatttggctagagggcttctaagaagaatagtaaatgagaaagaatgtttctcttggacaagtagagtaggcctggtcgcagttaaagttgaaagcttatctggattcaccaactctcttctaaggccccacgtatttccacagattatcttgaatgatccagttgagaagtatatggttccatttcaagaatctcgaccattacccgccgacttaatattgcggaaggttgtgatgcgtttgttgaaagagcgtgcagttcctcttgtggatgattggggaggatgcattggcatagttcaccgcgatgattgtaccaagctggacgcacctcttatttcaatgtctagagggccacctctgtgcgtacctacttcaaccaccgtggagcacgtcattgacctcctcctgagaaacaagtccgagatggtgatcgtggtgaagagtggtaacatgtacgaaggcagctacacatccagctcaagacccttgggcgttttctccctcgccatactatggagcttcaccggcgactactcgtcaggatcagatgatgtccccgacgcaggcatctcccgggcagcaaaacccaaaccagacgccgaggcctgcaaccacagctagtttggtgtttcttttgctcagcttatagcaactccgcgtcgtgttgccgggcaaactagtcatgtaatggtcctccagttggacaaggggtgcatgcgaaaaaaggttttgatcctgacctgctgtggctgcgtgctgcgtacgatgtcttctgatgcacagagcgaaagtgacagtggactggagatttcctcccagccttcggttgaggcgccccaccgcgcagtgatggtcctgagtcctgaccggtttggtggcatgtggcatccctgctctcactcacggtgccgttttccgatcagtaattggtaatccccttggtaactaatttgggtctatgctaagatgttcaccgatcagtagtactgtgcgcagtgtattgctgctgcctgatgctgggactgggatacagaatcctcctgttgccgtgcacagttgctcttatcttctgtgaaccttcagtatggactggcaggacagtggatatgtgtcgatgaacggcccgagcactccgttggggccccgcttggacgcctcatgccataggccacaggccatagctagcattatctgccttctgggaggtgcatgtgcagtgcatctacccatctgggaagcggtaggtttccattggagggctctttgcctctttggtagtttggtccctgttgtgtcatgccagggtgtggcactgttacgctcgaaagtcgagagatttctgggtgggtagcttgggtaggcctgggtgcttctgcccccttgtccaggagtgtctcggtccagctttgcatcatccgtgttagttggaccggtgtcactacccggcagtgacggctggcgcctggcgctcgtactcggggtggcccgccagcggccgggtgattattgctgcctgaaagcatggaataataagggccttaatttcaatccacgtggatcgaggatcgaaggggttaagggtttgtaagtattgagaaggattgaagggattaaatgtcttccaattcaaaattaaatagaagatgatttaatctctataaatcaccttcgatctctgtgtggccaagtaggtttaaattcgtagcatgtcaaaacctttgttcattccttctcatctatgtaagggcacgtacaatggtatttaatgtagagatttttgatgtgtctaaagagggtttttgcaaaaaaaaaatgtgaagatgtctctgtctttgtaacccaag

SEQ ID NO: 21869 - DNA, 4211 bp, Zea Mays
cgaaccaccctcccgagatgtttgtcgtccatcgcgcgatgcttcgccaagcaagagggccatcgctgcatcgcctcctcgggcagcagcatcgccatctgtcgtcatcctcgtcgaccctcccgagacgtttgtcgtccatcgcgcgatgcttcgccaagcaagagggccgtcgctgcgttgcctcctcgggcagcaacatcgtcgtagagttgtccactttatgtccctacaacgtttcaatttttctcttaaggcctgggtatagcaagaaggattgatgaagcattcgaaatactggaatcaattgagaaagattcttctattggggggcccaggctctctcctcatctcatttgtggttttctaaatgcccttatcgaagcaggagatatgaggcgtgccaatgctcttgtcgcccgtttccgcatggtcctttacgaggatcactctgtcttactatacaacttactgatgaaggggtatattaagagcaacttccctctcggagctttgactgttaaagacgagatattgcgtcaagggttgaagcctgatagattgacctacaataccatcatttctgcctgtgtaaaatcagcagagaatgataaagctatccaatttcttgaagatatgaaggaagaagctaatacagaaagtaaccctgaacttcttccagatgctgttacctacacaacattactcaagggtttaggaaatagccgtgacctttattcagtcgtgaagattgttgtggagatgaaatcttcactaatttcaatcgacaggactgcatacactgctatggtagatgctttgctagcttgtgggtccatcgacggtaagttctataccatctttttagtcactacagtgaattttcctaaaaaacaatacaatgaatttgcaagttggaaaacaacgttggtgtttgactaagaactaacaagtggcctagcacccacttttcatcctcacatttgatttattttcaaactgacacttctcttttcactttacagtggttcagcatttagcgttccatttgacgctaacaagtgacatatcacattcttatctgtacccttttatgtcccagttgcccaagcagcatatccagtctaaagtatctaaaatggtgaaactgttcttcgtcagttgtgtttgcataattttttataattacatcaccgatgtgtataacctagttgtacttctcaaatcatcacatgcagtgactataagttacaccaaaatcattttctgaggtatagactatagatcacttgttagtatggttcatttaaccttactgttgtgcacaagcaaattgcttgacaaatgacgatacttgatgcctctcgcaacctattaggatcatgcctggttttaaatattatggtccatgcaggcgaatgtttttcatattttaagttatcatttcctcacttgcatagtaaatgagaatgtcaactttagcactatttgcttagcatgaccctctgttttgtatcctagatatctgcctctgggtctattctaatgttttgacaatttatcgcatgtcttgattactctctagcaattcagcattatccataattcttaatctagttggtcctgagatgataatgttaccagtttacctaaatttagtttcttcattacatttgttcaaaatatcttcaaataatttacacatatccttcattgtaatgtaatatgtgtgcccctagccccaacaaatatttgtgacaacaaatgtgttcacatttggactttgtagaagaaataaaaatggataataactatgcatatgttaacatgagtattgtgttaaatttgagaatctttcagtgttcatgaatatacagaactacagactaacttatttttactttccatcttagtgtataaactctttgtccttgtttaagtgaatataaatgtggatgaggcaatcaaattaccttgttgcgagaatggcaatgctgtttcatgtgttcttgagatcatgggttatgagagtgaaagctgttattcagacaaaaaaaaacctcttgtttatgatgtgtactagatttctgtactgatatgctttgaaccttattggtgcttatcgtaggggccctttgcatttttggtgatataataaagcatgctggcaagaacaatgatttgagacctaaacctcatctttatctttcaatcatgagagcttttgctaccagaggtgatgttgatatggtcatgagatttaacaagcgcatgtggctggattcagttggatcaattagccgtgccgccaaagaagagacacatgagctattaatggaagctgccataaataataatcagatagatttggctagagggcttctaagaagaatagtaaatgagaaagaatgtttctcttggacaagtagagtaggcctggtcgcagttaaagttgaaagcttatctggattcaccaactctcttctaaggccccacgtatttccacagattatcttgaatgatccagttgagaagtatatggttccatttcaagaatctcgaccattacccgccgacttaatattgcggaaggttgtgatgcgtttgttgaaagagcgtgcagttcctcttgtggatgattggggaggatgcattggcatagttcaccgcgatgattgtaccaagctggacgcacctcttatttcaatgtctagagggccacctctgtgcgtacctacttcaaccaccgtggagcacgtcattgacctcctcctgagaaacaagtccgagatggtgatcgtggtgaagagtggtaacatgtacgaaggcagctacacatccagctcaagacccttgggcgttttctccctcgccatactatggagcttcaccggcgactactcgtcaggatcagatgatgtccccgacgcaggcatctcccgggcagcaaaacccaaaccagacgccgaggcctgcaaccacagctagtttggtgtttcttttgctcagcttatagcaactccgcgtcgtgttgccgggcaaactagtcatgtaatggtcctccagttggacaaggggtgcatgcgaaaaaaggttttgatcctgacctgctgtggctgcgtgctgcgtacgatgtcttctgatgcacagagcgaaagtgacagtggactggagatttcctcccagccttcggttgaggcgccccaccgcgcagtgatggtcctgagtcctgaccggtttggtggcatgtggcatccctgctctcactcacggtgccgttttccgatcagtaattggtaatccccttggtaactaatttgggtctatgctaagatgttcaccgatcagtagtactgtgcgcagtgtattgctgctgcctgatgctgggactgggatacagaatcctcctgttgccgtgcacagttgctcttatcttctgtgaaccttcagtatggactggcaggacagtggatatgtgtcgatgaacggcccgagcactccgttggggccccgcttggacgcctcatgccataggccacaggccatagctagcattatctgccttctgggaggtgcatgtgcagtgcatctacccatctgggaagcggtaggtttccattggagggctctttgcctctttggtagtttggtccctgttgtgtcatgccagggtgtggcactgttacgctcgaaagtcgagagatttctgggtgggtagcttgggtaggcctgggtgcttctgcccccttgtccaggagtgtctcggtccagctttgcatcatccgtgttagttggaccggtgtcactacccggcagtgacggctggcgcctggcgctcgtactcggggtggcccgccagcggccgggtgattattgctgcctgaaagcatggaataataagggccttaatttcaatccacgtggatcgaggatcgaaggggttaagggtttgtaagtattgagaaggattgaagggattaaatgtcttccaattcaaaattaaatagaagatgatttaatctctataaatcaccttcgatctctgtgtggccaagtaggtttaaattcgtagcatgtcaaaacctttgttcattccttctcatctatgtaagggcacgtacaatggtatttaatgtagagatttttgatgtgtctaaagagggtttttgcaaaaaaaaaatgtgaagatgtctctgtctttgtaacccaag

SEQ ID NO: 21870 - DNA, 3873 bp, Zea Mays
aaaaaaggagtcaaagagactcgtaaagacaaataggactgggtttacatgagatatgaggcgtgccaatgctcttgtcgcccgtttccgcatggtcctttacgaggatcactctgtcttactatacaacttactgatgaaggggtatattaagagcaacttccctctcggagctttgactgttaaagacgagatattgcgtcaagggttgaagcctgatagattgacctacaataccatcatttctgcctgtgtaaaatcagcagagaatgataaagctatccaatttcttgaagatatgaaggaagaagctaatacagaaagtaaccctgaacttcttccagatgctgttacctacacaacattactcaagggtttaggaaatagccgtgacctttattcagtcgtgaagattgttgtggagatgaaatcttcactaatttcaatcgacaggactgcatacactgctatggtagatgctttgctagcttgtgggtccatcgacggtaagttctataccatctttttagtcactacagtgaattttcctaaaaaacaatacaatgaatttgcaagttggaaaacaacgttggtgtttgactaagaactaacaagtggcctagcacccacttttcatcctcacatttgatttattttcaaactgacacttctcttttcactttacagtggttcagcatttagcgttccatttgacgctaacaagtgacatatcacattcttatctgtacccttttatgtcccagttgcccaagcagcatatccagtctaaagtatctaaaatggtgaaactgttcttcgtcagttgtgtttgcataattttttataattacatcaccgatgtgtataacctagttgtacttctcaaatcatcacatgcagtgactataagttacaccaaaatcattttctgaggtatagactatagatcacttgttagtatggttcatttaaccttactgttgtgcacaagcaaattgcttgacaaatgacgatacttgatgcctctcgcaacctattaggatcatgcctggttttaaatattatggtccatgcaggcgaatgtttttcatattttaagttatcatttcctcacttgcatagtaaatgagaatgtcaactttagcactatttgcttagcatgaccctctgttttgtatcctagatatctgcctctgggtctattctaatgttttgacaatttatcgcatgtcttgattactctctagcaattcagcattatccataattcttaatctagttggtcctgagatgataatgttaccagtttacctaaatttagtttcttcattacatttgttcaaaatatcttcaaataatttacacatatccttcattgtaatgtaatatgtgtgcccctagccccaacaaatatttgtgacaacaaatgtgttcacatttggactttgtagaagaaataaaaatggataataactatgcatatgttaacatgagtattgtgttaaatttgagaatctttcagtgttcatgaatatacagaactacagactaacttatttttactttccatcttagtgtataaactctttgtccttgtttaagtgaatataaatgtggatgaggcaatcaaattaccttgttgcgagaatggcaatgctgtttcatgtgttcttgagatcatgggttatgagagtgaaagctgttattcagacaaaaaaaaacctcttgtttatgatgtgtactagatttctgtactgatatgctttgaaccttattggtgcttatcgtaggggccctttgcatttttggtgatataataaagcatgctggcaagaacaatgatttgagacctaaacctcatctttatctttcaatcatgagagcttttgctaccagaggtgatgttgatatggtcatgagatttaacaagcgcatgtggctggattcagttggatcaattagccgtgccgccaaagaagagacacatgagctattaatggaagctgccataaataataatcagatagatttggctagagggcttctaagaagaatagtaaatgagaaagaatgtttctcttggacaagtagagtaggcctggtcgcagttaaagttgaaagcttatctggattcaccaactctcttctaaggccccacgtatttccacagattatcttgaatgatccagttgagaagtatatggttccatttcaagaatctcgaccattacccgccgacttaatattgcggaaggttgtgatgcgtttgttgaaagagcgtgcagttcctcttgtggatgattggggaggatgcattggcatagttcaccgcgatgattgtaccaagctggacgcacctcttatttcaatgtctagagggccacctctgtgcgtacctacttcaaccaccgtggagcacgtcattgacctcctcctgagaaacaagtccgagatggtgatcgtggtgaagagtggtaacatgtacgaaggcagctacacatccagctcaagacccttgggcgttttctccctcgccatactatggagcttcaccggcgactactcgtcaggatcagatgatgtccccgacgcaggcatctcccgggcagcaaaacccaaaccagacgccgaggcctgcaaccacagctagtttggtgtttcttttgctcagcttatagcaactccgcgtcgtgttgccgggcaaactagtcatgtaatggtcctccagttggacaaggggtgcatgcgaaaaaaggttttgatcctgacctgctgtggctgcgtgctgcgtacgatgtcttctgatgcacagagcgaaagtgacagtggactggagatttcctcccagccttcggttgaggcgccccaccgcgcagtgatggtcctgagtcctgaccggtttggtggcatgtggcatccctgctctcactcacggtgccgttttccgatcagtaattggtaatccccttggtaactaatttgggtctatgctaagatgttcaccgatcagtagtactgtgcgcagtgtattgctgctgcctgatgctgggactgggatacagaatcctcctgttgccgtgcacagttgctcttatcttctgtgaaccttcagtatggactggcaggacagtggatatgtgtcgatgaacggcccgagcactccgttggggccccgcttggacgcctcatgccataggccacaggccatagctagcattatctgccttctgggaggtgcatgtgcagtgcatctacccatctgggaagcggtaggtttccattggagggctctttgcctctttggtagtttggtccctgttgtgtcatgccagggtgtggcactgttacgctcgaaagtcgagagatttctgggtgggtagcttgggtaggcctgggtgcttctgcccccttgtccaggagtgtctcggtccagctttgcatcatccgtgttagttggaccggtgtcactacccggcagtgacggctggcgcctggcgctcgtactcggggtggcccgccagcggccgggtgattattgctgcctgaaagcatggaataataagggccttaatttcaatccacgtggatcgaggatcgaaggggttaagggtttgtaagtattgagaaggattgaagggattaaatgtcttccaattcaaaattaaatagaagatgatttaatctctataaatcaccttcgatctctgtgtggccaagtaggtttaaattcgtagcatgtcaaaacctttgttcattccttctcatctatgtaagggcacgtacaatggtatttaatgtagagatttttgatgtgtctaaagagggtttttgcaaaaaaaaaatgtgaagatgtctctgtctttgtaacccaag

SEQ ID NO: 21871 - DNA, 1872 bp, Zea Mays
ctaagggttgtggaaaggacagatagatttggctagagggcttctaagaagaatagtaaatgagaaagaatgtttctcttggacaagtagagtaggcctggtcgcagttaaagttgaaagcttatctggattcaccaactctcttctaaggccccacgtatttccacagattatcttgaatgatccagttgagaagtatatggttccatttcaagaatctcgaccattacccgccgacttaatattgcggaaggttgtgatgcgtttgttgaaagagcgtgcagttcctcttgtggatgattggggaggatgcattggcatagttcaccgcgatgattgtaccaagctggacgcacctcttatttcaatgtctagagggccacctctgtgcgtacctacttcaaccaccgtggagcacgtcattgacctcctcctgagaaacaagtccgagatggtgatcgtggtgaagagtggtaacatgtacgaaggcagctacacatccagctcaagacccttgggcgttttctccctcgccatactatggagcttcaccggcgactactcgtcaggatcagatgatgtccccgacgcaggcatctcccgggcagcaaaacccaaaccagacgccgaggcctgcaaccacagctagtttggtgtttcttttgctcagcttatagcaactccgcgtcgtgttgccgggcaaactagtcatgtaatggtcctccagttggacaaggggtgcatgcgaaaaaaggttttgatcctgacctgctgtggctgcgtgctgcgtacgatgtcttctgatgcacagagcgaaagtgacagtggactggagatttcctcccagccttcggttgaggcgccccaccgcgcagtgatggtcctgagtcctgaccggtttggtggcatgtggcatccctgctctcactcacggtgccgttttccgatcagtaattggtaatccccttggtaactaatttgggtctatgctaagatgttcaccgatcagtagtactgtgcgcagtgtattgctgctgcctgatgctgggactgggatacagaatcctcctgttgccgtgcacagttgctcttatcttctgtgaaccttcagtatggactggcaggacagtggatatgtgtcgatgaacggcccgagcactccgttggggccccgcttggacgcctcatgccataggccacaggccatagctagcattatctgccttctgggaggtgcatgtgcagtgcatctacccatctgggaagcggtaggtttccattggagggctctttgcctctttggtagtttggtccctgttgtgtcatgccagggtgtggcactgttacgctcgaaagtcgagagatttctgggtgggtagcttgggtaggcctgggtgcttctgcccccttgtccaggagtgtctcggtccagctttgcatcatccgtgttagttggaccggtgtcactacccggcagtgacggctggcgcctggcgctcgtactcggggtggcccgccagcggccgggtgattattgctgcctgaaagcatggaataataagggccttaatttcaatccacgtggatcgaggatcgaaggggttaagggtttgtaagtattgagaaggattgaagggattaaatgtcttccaattcaaaattaaatagaagatgatttaatctctataaatcaccttcgatctctgtgtggccaagtaggtttaaattcgtagcatgtcaaaacctttgttcattccttctcatctatgtaagggcacgtacaatggtatttaatgtagagatttttgatgtgtctaaagagggtttttgcaaaaaaaaaatgtgaagatgtctctgtctttgtaacccaag

SEQ ID NO: 21872 - DNA, 1872 bp, Zea Mays
taaccatattactatattcaagatagatttggctagagggcttctaagaagaatagtaaatgagaaagaatgtttctcttggacaagtagagtaggcctggtcgcagttaaagttgaaagcttatctggattcaccaactctcttctaaggccccacgtatttccacagattatcttgaatgatccagttgagaagtatatggttccatttcaagaatctcgaccattacccgccgacttaatattgcggaaggttgtgatgcgtttgttgaaagagcgtgcagttcctcttgtggatgattggggaggatgcattggcatagttcaccgcgatgattgtaccaagctggacgcacctcttatttcaatgtctagagggccacctctgtgcgtacctacttcaaccaccgtggagcacgtcattgacctcctcctgagaaacaagtccgagatggtgatcgtggtgaagagtggtaacatgtacgaaggcagctacacatccagctcaagacccttgggcgttttctccctcgccatactatggagcttcaccggcgactactcgtcaggatcagatgatgtccccgacgcaggcatctcccgggcagcaaaacccaaaccagacgccgaggcctgcaaccacagctagtttggtgtttcttttgctcagcttatagcaactccgcgtcgtgttgccgggcaaactagtcatgtaatggtcctccagttggacaaggggtgcatgcgaaaaaaggttttgatcctgacctgctgtggctgcgtgctgcgtacgatgtcttctgatgcacagagcgaaagtgacagtggactggagatttcctcccagccttcggttgaggcgccccaccgcgcagtgatggtcctgagtcctgaccggtttggtggcatgtggcatccctgctctcactcacggtgccgttttccgatcagtaattggtaatccccttggtaactaatttgggtctatgctaagatgttcaccgatcagtagtactgtgcgcagtgtattgctgctgcctgatgctgggactgggatacagaatcctcctgttgccgtgcacagttgctcttatcttctgtgaaccttcagtatggactggcaggacagtggatatgtgtcgatgaacggcccgagcactccgttggggccccgcttggacgcctcatgccataggccacaggccatagctagcattatctgccttctgggaggtgcatgtgcagtgcatctacccatctgggaagcggtaggtttccattggagggctctttgcctctttggtagtttggtccctgttgtgtcatgccagggtgtggcactgttacgctcgaaagtcgagagatttctgggtgggtagcttgggtaggcctgggtgcttctgcccccttgtccaggagtgtctcggtccagctttgcatcatccgtgttagttggaccggtgtcactacccggcagtgacggctggcgcctggcgctcgtactcggggtggcccgccagcggccgggtgattattgctgcctgaaagcatggaataataagggccttaatttcaatccacgtggatcgaggatcgaaggggttaagggtttgtaagtattgagaaggattgaagggattaaatgtcttccaattcaaaattaaatagaagatgatttaatctctataaatcaccttcgatctctgtgtggccaagtaggtttaaattcgtagcatgtcaaaacctttgttcattccttctcatctatgtaagggcacgtacaatggtatttaatgtagagatttttgatgtgtctaaagagggtttttgcaaaaaaaaaatgtgaagatgtctctgtctttgtaacccaag

SEQ ID NO: 21873 - DNA, 2222 bp, Zea Mays
tccagatccaccaagccacaagaataaccaatgtgttgaaaccatctctgtgcaaaactggcacaagaccttcggccacactccaccaatcctggaacatagatacgtccagccctggtgacacaagctgcagccccactctacttaagatctgccaccatatattcctggagaagacacatgaaatcaagatgtgttgaattgtctcctgctgctgatcacaaagaacacatttccccgggtggtcaagacctctacgtgctagacgatccgctgtccagcacctattaagggaagcaagccaaatgaagaatttgcacttagggggttcccaactcctccatatcctttcacccggctcaaattccacagaaccaaccaagaaacgttggtaagctgttttagcagagatctcccccgaagcacctggtagccaacggaaagcatcaggtcgcagttaaagttgaaagcttatctggattcaccaactctcttctaaggccccacgtatttccacagattatcttgaatgatccagttgagaagtatatggttccatttcaagaatctcgaccattacccgccgacttaatattgcggaaggttgtgatgcgtttgttgaaagagcgtgcagttcctcttgtggatgattggggaggatgcattggcatagttcaccgcgatgattgtaccaagctggacgcacctcttatttcaatgtctagagggccacctctgtgcgtacctacttcaaccaccgtggagcacgtcattgacctcctcctgagaaacaagtccgagatggtgatcgtggtgaagagtggtaacatgtacgaaggcagctacacatccagctcaagacccttgggcgttttctccctcgccatactatggagcttcaccggcgactactcgtcaggatcagatgatgtccccgacgcaggcatctcccgggcagcaaaacccaaaccagacgccgaggcctgcaaccacagctagtttggtgtttcttttgctcagcttatagcaactccgcgtcgtgttgccgggcaaactagtcatgtaatggtcctccagttggacaaggggtgcatgcgaaaaaaggttttgatcctgacctgctgtggctgcgtgctgcgtacgatgtcttctgatgcacagagcgaaagtgacagtggactggagatttcctcccagccttcggttgaggcgccccaccgcgcagtgatggtcctgagtcctgaccggtttggtggcatgtggcatccctgctctcactcacggtgccgttttccgatcagtaattggtaatccccttggtaactaatttgggtctatgctaagatgttcaccgatcagtagtactgtgcgcagtgtattgctgctgcctgatgctgggactgggatacagaatcctcctgttgccgtgcacagttgctcttatcttctgtgaaccttcagtatggactggcaggacagtggatatgtgtcgatgaacggcccgagcactccgttggggccccgcttggacgcctcatgccataggccacaggccatagctagcattatctgccttctgggaggtgcatgtgcagtgcatctacccatctgggaagcggtaggtttccattggagggctctttgcctctttggtagtttggtccctgttgtgtcatgccagggtgtggcactgttacgctcgaaagtcgagagatttctgggtgggtagcttgggtaggcctgggtgcttctgcccccttgtccaggagtgtctcggtccagctttgcatcatccgtgttagttggaccggtgtcactacccggcagtgacggctggcgcctggcgctcgtactcggggtggcccgccagcggccgggtgattattgctgcctgaaagcatggaataataagggccttaatttcaatccacgtggatcgaggatcgaaggggttaagggtttgtaagtattgagaaggattgaagggattaaatgtcttccaattcaaaattaaatagaagatgatttaatctctataaatcaccttcgatctctgtgtggccaagtaggtttaaattcgtagcatgtcaaaacctttgttcattccttctcatctatgtaagggcacgtacaatggtatttaatgtagagatttttgatgtgtctaaagagggtttttgcaaaaaaaaaatgtgaagatgtctctgtctttgtaacccaag

SEQ ID NO: 21874 - DNA, 1922 bp, Zea Mays
tacaatcatgcccctcataaaagtttataacaatgactcagacccttatgaactaaaaggtcattctatctttaagtcggttcgacccttcatcttcggatatgctgtaataccgaagcttcatgaatggtgccttcggcgtcacgtacgggcggcttcagccgaagctgtttctttctgcaggaccttcggcgacgaagcatggtcccaacagtagccccttcgcggcgctagatcgtttttcgtaacgagcttgatccgtgaaaaaagtctcttaggcttcaggaagccgaaggtccgaaaaacaccttccctgagctcgttgtcgagaaacgatacagttttcgagcgcgtagcggtcccatcatgcaggttcactattttggtttttgcggcccaccatgcagcgggtgcgaacaactgtttgcctggtgtaaaaatcctgacgattcaccttcttaccttcagcactatataaacagacaggtaggtgtgcagttaccacaacattcattgctattgcactgttctgctgccaaaaatttaaccatagccgaagcttaactttcgcattcaaacgaagctccagtttggtgtctgcttcgtcagaagaagagcttcagaagaaaggttattaatccccaagaaattttcaagaaattcaaaatcaaatggccagagtgcgctctactgctagagttgagcgcgaaggagacgaagccgaagctatgtaaactgttcctatctcggaagcaatgaagcgatctgggttgatgacatcggaagacatccctgctactgaaccagaacaagcagatattgaagagactgattctgaaggtgatcacagtatcgcagtaccgagcaagcctagctgaaagggaattaggcttacacctagtccctaattaattttggtggttgaattgcccaacacaaatgtttggactaactagtttgctctagtgtataagttatacaggtgccaaaggttcacacttagccaataaaaagaccaagtattgggttcaaacaaaggagcaagggacaaccgaaggcacctctggtctggcgcaccggactgtccggtgcgccaccggacatgtccggtgcaccagaggactcaaacttcaaactcatcaccttcgggaaattccagaggcgtctccgctataattcaccggactgtccggtgtacaccggacatgtccggtgctccaaggaagagcggcctcaggaactcgccagcctcgggtattcatttcagctgctccgctataataaaccggactgtccggtgtacaccggactgtccggtgtgaccgcggggcaacgactacttcggcgccaacggctacctgcgacgcattaaatgcgcgcgcagaggtcaggcacgcccatgctggcgcaccggacaatctacagtgcatgtccggtgcgccaccggacatccaggcgggcccagaagacagagctccaacggtcgaacccaacgacttttggtgacgtggctgtcgcaccggacatgtccggtgtgcaccggactgtccggtgcgccatcgaacagacaacctcaccaaacggctagtttgatggttggggctataaatacccccaaccacccaccattcattgcatccaagttttccacttcccaactacttacaagagctctagcattcaattctaggcacaccaaagagataaaatcctctccaaattccacacaacgccctagtgattagaaagagagatttgcctgtgttctttcgagctcttgcacttggattgctttcttctttcttgattctttcattgcgatcaaactcacttgtaattgaggcaagagacaccaaacttgtggtggtccttgtgggaactttgtgttccaagtgattgagaagagaaagctcactcagtcc

SEQ ID NO: 21875 - DNA, 6516 bp, Zea Mays
attatttttgagaatttcagtttcgccctattcaccccccctctaggcgactttcactagccacctggacttcggaaagtcaaccatctctaaggctgattttcctaagatggtgaagtcgggctactttagcgaagatgagaaaaagctgattcgctttggtggagaagagactaccccgaagccacagaaagatgaaatagtgattttcaagagtttcctcaaagctggtttgagatttcctttgaataggatgattgctgatgtgctaaagaagtttgggatctatcttcatcaactaactcctaacgctattgttaggcttagtgtttatatttgggctctccgaagccagggggtggaaccattttccgaaggtttctgccgggtgcacgagttacattaccaaaccaaagccagaaaggatgaattacatgaaaattttggttgttacaattttgcctatcggaaaactacaaaatttcatgtgatcagctaccgaagcaagtgtccggcaggctggaaatcagaatggttctacgtcaaagctgacgatgacaaggagaagctggtacagagtccgcttgaactgatcttcggagagaccagaccccaatgcagtatgacaccagaaggtccaacccaaatcgcgttggctaaattcaggattattgcagagcacattggcattagagatttagtgcaggaatttttggctttcaaaatatttccaactatgaaggaatgggttatgccgtagcttgaaagagagaagaaagagggggagcttgtccgactgccctaccactataagttcaagaaatattttaaagcaccctgccaagaatggcttgaaacaatcgaagtgatgagtactgaaattcttgggaattattctaaaaaagaggatcagttgatgacagcagccttcggcacccggccgaaacgaaggctaaacatagtgcttgatgctataggctttgaatattctgattatgggtggctcgataagggtgccgaagggttaaaaaggaaaagagtagcagacattttgattaaagacgacgaagatcaaccaaaaaagaagaaagaaaagtttgaaccgaaggtagctgcttcaagaaaaagaaaagctgcatctccaaagcctgtatctccagaatcagagagtttggtccgagatgaggaagttcctgcgacaccttctgctactcaagtagaagaaattctgaaggtaatgactgaatctttgcctgtcaagctaagtccgctggcaccagaactgacgaagttttttcagaaggacaaagaagcttcggcagcagaaagtcctgcaaagccgaaaaaacgcagaattatccaagtgacagatgtgattcatcagacgccgccatcggtatcggcgtcaaaaattgttattgccgagactgccgaagccgaagccgccgcagccgaagctaccggggctgaaactactgaaattgcaactgccggagccgaagctaccggagccgaagccgccgaaactaccggagccgaagctaccggagccgaagccggggccaccgaagattcaaacctggaaaccacactggaagttattgacaatattcttctgaaaatggctgaagaagaagctgctgtggctgcggtgaacacggctactgaaaagggaaaagagcaggttgaagacattttggaggaagaaaattttaattttcaagatttacttggacaagatttaacaagtgctgaaaaagaagagctgaagaaatatgccatatcctgcggatataaaccagggtctatgctatttggtggggtcaacgaagggaagctaagatgccttcggaatcgcaccgaagccaaagttgttaggaccttctccaagagcgttggcctgccgaagatagaagcggacctttgcaggtaccagcgacaacatatcgccggtagcctgctctatgctaattttaaggtaaaaaatattattattgttttattattattattattatttttatgtcgttttctgacgaaggttgttttggcagagtatactattaagtaaagtgctaaaaatgcaacaagatcttgaagaagagaagaataaagctatcatcaaggatttagaagaaaaagttgaaaattacgaagctgttctaaagaagaaggacttcaccattcaagaccttgaaatcatatctaaagaacacgaaggtgccctagaaaagaaagactttgttattcagtctatggaaggctccttggctgaggtccaagccgaaaatgacagtttaaagaatgaattactcaaaaagtcagaaaaaatatgagcaagaaagggagaagcttgaagcaattctcaagactgaggtcgagaaaaattcaaatttgcaaaaatcattgaaggatctccaagagaaatgcctaaatttcggcagccgatgcgtgcagcggctgaaggacgtatttcactctatcggagccagttctgaaaaattttcaccttcagccgaaaacctgcccagcaccttggaacatattgaatgcgaggttgatgctcttgacgaagttattggtgggcatgctgacttctgcgccctggtagcttctcgaggcacaactaccgcttttctgaaggatggctgtacgcacggaaagattgtgaataggccaaacttcagcttgtcagcagcagatttggttgatatcccaagcttagcccgaagcatcggaaatagatttatgacccaaatttgggtaaatggcgggcgaaagatggctggtgacgaagcttgaagccaccttaaactggtgagaaagttatatttgttacttttaccttctcctggaaatttgcacctttcttattctgcttcttaatatgtgcaggatgacaaagctgaagtatgacaggctgaagcttaatagttgctataatagacttctgcaaaaaattctggagagatttttgtaatataattgtggaaaaaacttatgtaaatttgtacataccttgcaatgtatcttgtctcctttatccgtgtgcaatctgctttgctgtggacgaaacttctcttttgagccgaaggcgaaaaacaccttcccttcttttcgtacacaacgaagcatgaaaatttcctctttcttcgaagtttttcctcattgccgaagcatctgtcttttttttgtgtggtatgatgatgatgattctatatatgtctaaatgaatgtttatcaatgcaaatgacatgatgtaatgtatcgtgcaaatgaatattggaacacatattcataaaccataatcaaaacccttcatcctcttgagaatgattcaaatctttttgccgtttacttttcggcctcaccgtttacttttcggtgtatcagcgttgacttttcgctgtaagcctcccttaggagcttcttcgccttttactttcagcggaattagcgtttatttttcgctgtaagcctcccttaggagcttcttcgccttttactttcagcggaatcaacgtttatttttcgctgtaagcctcccttaggagcttcttcgccttttactttcagcggaatcaacgtttatttttcgctgtaagctctgcattcccttaggaacaacttttgagcttctccctgttttcttttctttttcctttgcatttacatttacattttttgggggatatcactcttatagaattgaaataaggaaaagaaaaattacatgttgtggccccattaaaaacctttctccccctttggaaaggaaaagggtgccacaaaaaagaatagaaaaaattacatcaagctaaacataatatcgccgaagctcatccgcattccatgatctaggaatgtcgttgccgtccatatccttcaatctgtaggaaccgggtcttgacgaagatactaccaaaaaaggtccttcccacttcagctgtaatttgcccactgtctcagggttggctactcttcgaagcaccagtgtcctggttcaatgttcttcaacctaacctttctgtcacgccattttattgtttcagcctgatatttgttgatgttttccacagcttgaagcctgatcccttctatagcatctttttccatagaataatcagcttcatcttcgccttctgccgaagctactgttcttattgatcctgttttgacttcttccggggttattgcttcatcaccaaacaatagtttaaatgacgtaaagcctgttgatcttgacactgttgtgttatggctccacaccactttgattaattcgtctggccactttcccctgggctgattgaagattaacttcattattcctgtcattatgatcccattagctctttcaacaagtccatttgactccggatgtcgaactgatgcaaaatggatcttcgtgccaatttgatcgcaaaattctctgaaagcttcagaattaaactgtgtcccattatccacagtaatggccttcggcactccgaagcgacaaacaatattttgccaaaaaaaacttttgaatagtaaccgaagttattgtggctaaaggctttgcctcaatccacttagaaaattattccactgccactacaacatatcttaagttcccctgtgctggtggtaatggacctagcaaatcaaggccccatctttgcaacgaccaagtgggttgtattaattgagttaaagacgaaggttgtttctgatctcttgcacatttctgacagccttcacacttttgaactaaatccgctgcatccgaagctgcttttggccaataaaatccttgacgaaaaacttttccgagcaaaggcctagatccaatgtgagatccacacaggcctgcgtgtatttccttcatcaattctatgccttcggctttggataaacacttgagtaacggggaacagaccccccgcttgtataattccccttctattatgacatatggtcgagctcttgcttctatcctcctgttataagcttcgtcatctgaaagaaaattaccctgaaggaaagagatgatcccagttctccaatcttcactatagacaggggatatgttgaggactgctctttcaagaagctcgatcgaaggtgcttttattgtttcgaaaaatacttccgaaggtaagggcagcccctgtgctgctgacttggctaatagatcagcatattcattttctccacgaggaatattttttacagagaatccttcgaaggaagcctcaatccttcggactgtatctaaatatttttcaagcttcggatctcttgctttgtagctcttgtcaatatgaccggaaataacttgggaatcagttttaagaatggcccttctgattcccattgcctttaacttccgaagacccaagagcagagcttcgttctcagcaatattgtttgtgcaactgaaatcaagtcttgtcgcataacaagttttaactttggaaggtgaaaccaacacagcagctgctcccgctccgaaggttccccaagaaccatcacaaaacactgtccatacttcggcatctttattcgtttcttcctcctgagcccctggcgtccagtcagcaatgaagtctgccaacgcttgggactgaatcgaagatctatgcacataatcaatacaaaattcattgtgctctgcagcccattttccaatccttccagtagcttctcgatttctcataatatcctttaacggttgtaaagaaggaacaattatattgtaagcttgaaaataatgccgaagcttcctggaggccatcaaaacagcatacagtaccttctccaattctgtataatttttctttgatagactaagaacttctgatacaaagtatattggggcttgctttttgacttgaccttcaagcttctcctggacaagtgctgcacttaccgctgagtgcgaagctgccacatataacaaaagaggagcccctggcgttggtggagttagtgttgttagatctattaaatattgcttcagctcttcgaaggctctctgctggactggtccccattgaaaaacttcggctgacttcagcacttcgaaaaatggtaaatttctctctgctgatctagatatgaatctgttgagagatgccagtcttcctgtcaatctttgagcccccttctttgtacttggtggttacattcgaaggatagcttcgattttgtttggattagcctcaattccttttgttgagactagacagccaagaaatttccctttcttcactccgaagacacatttttctgggttcaactttaaaccagcctgtctaaaattagcaaaggtctcctgcagatcagcaatgtgattatcttgcttcgtgctttttacaatgatatcatcaacatcagttagcacatttctgcctatctgggaatgaagaaccttcgctatcattctgctgaagcttcctccagcattcttaagcccctcaggcatccaaaggtaacaatatgttccactaggggttatgaagctggttttcg

SEQ ID NO: 21876 - DNA, 2229 bp, Zea Mays
ggggattgccgagaaggaagatggagagcggctgggcggctggggatgcccacacgcaaagaaatatccacgagagaacggcggtttgggataatatcaacagatgagcggcgcttggagataggaacgactgagcgtggactgatatccacgtacggtaaagaagaaagtatcaatggccttcggtggctgataggagatattttctatttctttctttctttttcttctacaaaagaatatatatatatgtttagtgactcggatctgagcaagatgcaaatagataggatcaaaatgctgtccgaatacgttactattctctcggattctggaataagaaattgattcggctaatcgttgttttggtttcatttaattcgggttcattttatttaaacaacgtgcccttattagtgtctaccgaattcgtagagaccgcgcataagagcgaaatatttagggacgtttctaatttgccttaatcgattaattttaattttgcattcgtttgagttaaatttagatgaattttgcccgccatccgaacattcgactaataactctacgcacgatttctcgggtagcgagtgtggtccagtttataaacgtcgagggcgtactatttcgtactcgtataatcaattattatttttttagcagacacaagactcgacatatcgcgaaataacgcgcgatatcgatgcaacatcgagattgcgatccaaattattttgcaccgagtattttagtcattaagttataaataatttatttgggacacggatcgcaacggtggatcgagcttccaaatttcggattcgcgcgagcgatgaattttaaataatcaccggacgcaccgattttcgtagcaacgatgttccgaacatcacggaattttaggaagagctcggacaaataaaaacaaaaacgacgtcgcactcgcgatcgacgaaagagacgcgatattaaaatcgcgataggcgaagataattaaaatttagcgtctgttcacccactgatattacgtgcttaaatccgaactcattgccgagcggaatataaacacctggggtgttacagccttccccccttaaaagaatctcgtcccgagattcggaccgaaagagttctaagggtagagaagcatgtaacccatatccatatcagcgataaccctaagacagtccaagtaaagatgagtgcctcaggatatagtttctctagtgggcatatcatatatcgccttaagctaatttagagatgtcccacagtagagacgatgtctgccagaagaacatataggttccatatgtgcagcttgctttttctaataacactgtaatatctgagtctgttgggcgagcggcaaatacgcgattttacccacacagaatcagatgcatcatcttaggtaaaacacacaaaaaggaggtttaccaacaagtgatcacagtgagctcgtagcacacgagacgagagtggatgttgaatactgtcgtggttaacatgtggctaacccgagaattcaagtcctcgaaagaaggtatagattcaagagaatcaccagtagagggacccagagaggctgactttgcaaccagtccattttagtaagcactaaccatggctcgacttgatcacacatgctagaaaagcacacgtgaggtgatcgagacacgactagagcgatgactaggtggtttctggtcgacttaatcttgagtcttgaaagtacttaactcgataaatcgatctctaaactcaaccttcgttcattgggcagttacaagttagtcaaaaccaacttgttgaactacttttgacattgagcaactcctctcagtaccatcggtaagttaagggttgagagttcactcatactaacagttgatcatgcacttgggtaggaatcaatttggttagattgttcatccgttgcttcatgcgagatgaacagatttggttcgggaatacatagattaaataggagagcgaatgaacaaactcctgcatctcagtagcaggggaaatccagtctccattttgagagctaatcagttgttttccagtactaaaaagctccaaggcttcacctttacaacaaaagatgcaaagggaacttgtatgagtagccactaccaagatcaaaagaaaagagaccacacatgaaagtggtatgcccttttgatccaacaaagatgatagatgttgcttggtcacttcgac

SEQ ID NO: 21877 - DNA, 1117 bp, Zea Mays
atttatttttaggtgtttggtcatggagtgataatggaaaattcaaatttgggtcatggtgcactaaataagaacatggcctaattttgggttcaggcaaacaagtcactaaccttctatcgacacatcaagcacaagaacaacaacatataagaccttaacaggttacctaagaacggaggacagctattttctcgaagttcgtaatacaatattacaccacattatttacaatcaatggttactggaataaggatgagagaagcattttgggtgtataggtgacaaacatgatgcaacaatcaggatgcatgctcgtcctagacgtcctcacgagtttgccaacataatgtggctatagcgttctatctcggtggcatactaacgactctcacggtattttgctagtcgtcagctacacatacgttttcgaggttagtgtacctgcagaaaatttcatcacagcccattttcccatgatgcaattcacacatgacagtttatcacagtttatactccatatatcgctatatggaggccagctcatcattaagcgccgagccatgcataggcgccgttgccacactttaaccatagggcaactcattatggtaactcaccttcttacctgagcgtaggtgcgtcgttacaagtacattacacttctcagtattcccatgtttgtatacccatacacatccatggggtactgaattcccgaaaaagtaaatacgccacatcgcagccttcatatatacatatgtggaacatgtatataatcaatcactacaattaagcacttccctagaccgacggttgttcggtcatgctctcacatctcaccttaccttgagcgtcgatccattcaaaactgaatggccttaaaaataacaatacacatgtatgcaatacccacccggttgtgggttagtggttttcaaataagccacctgatagtccttagtttagggcttaatagaggatgtcgctagcaatatagtttttcaaagcggtttttcaaaaccaaacaatgtgtttagttgaaaataggtttttcaaaatcaaaactttcgttttgaaaatacgtatgtgactgtagatacttaatcctgctccg

SEQ ID NO: 21878 - DNA, 875 bp, Zea Mays
aagaaaccgtagaagctaccgccatcgatttcatcatagaagaagaaattgtggtaatcggaaagctataaataaccgtcgtatgcctatgcacttctccaccaccaccactggacgtcagcctagcaattagctcatcgactccagattggagaactcgacaccatgaaggtgctgatcgttgcccttgctctcctggcgctcgctgcgagcgccgcctccagtacaagcggcggctgtggctgccagacaccaccgtttcatctaccgcctccgttctatatgccgcctccgttctatctgccgccgcagcagcagccgcagccatggcaataccccactcaaccaccgcagctaagcccgtgccagcagttcggatcctgcgctgccggcggtgtctactactgaggaaactatgtactgtagtaataatgtaatggagccgctggctagctacctagctcgctagtttactcatttagcggcgatgagtaacgtagtgtcacccatcaccatgggtggcagtgtgagcaatgacctgaatgaaccattgaaatggaaaggaataatatataaggaaaaaagatgattggaaactgatagttggttctgagtcttgctatcgaggatgggagatacaactcttttatttaaggagggatgagagaaatgttggtggtcactaaaaaaaggaggggtgttgggggattgtcgaggcaaaaagaaagtatactaatattttcgatatgacagtttcatggacatagagtgagatattcaattcggagaccgttggagatactcctgcaagacctcaaattattagggctccttagcttttgatttgagggtttttcttacttttgggagtatgt

SEQ ID NO: 21879 - DNA, 1046 bp, Zea Mays
ataaataaccgtcgtatgcctatgcacttctccaccaccaccactggacgtcagcctagcaattagctcatcgactccagattggagaactcgacaccatgaaggtgctgatcgttgcccttgctctcctggcgctcgctgcgagcgccgcctccgttctatctgccgccgcagcagcagccgcagccatggcaataccccactcaaccaccgcagctaagcccgtgccagcagttcggatcctgcggcgtcggcagcgtcggcagcccgttcctgggccagtgcgtcgagttcctgaggcaccagtgcagcccggcggcgacgccctacggctcgccacagtgccaggcgctgcagcagcagtgctgccaccagatcaggcaggtggagccgctgcaccggtaccaggcgacatacggtgtggtcctgcagtccttcctgcagcagcagccgcagggcgagctcgcggcgctgatggcggcccaggtagcgcagcagctgacggcgatgtgcggcctgcagctgcagcagccaggtccctgcccttgcaacgcagctgccggcggtgtctactactgaggaaactatgtactgtagtaataatgtaatggagccgctggctagctacctagctcgctagtttactcatttagcggcgatgagtaacgtagtgtcacccatcaccatgggtggcagtgtgagcaatgacctgaatgaaccattgaaatggaaaggaataatatataaggaaaaaagatgattggaaactgatagttggttctgagtcttgctatcgaggatgggagatacaactcttttatttaaggagggatgagagaaatgttggtggtcactaaaaaaaggaggggtgttgggggattgtcgaggcaaaaagaaagtatactaatattttcgatatgacagtttcatggacatagagtgagatattcaattcggagaccgttggagatactcctgcaagacctcaaattattagggctccttagcttttgatttgagggtttttcttacttttgggagtatgt

SEQ ID NO: 21880 - DNA, 735 bp, Zea Mays
ctttcccttagtttcgtctcaaaattctcaccaagctcttgagagatccaagaagccatctctacgaaggtgtacggtggctgtcgtcatgggcgacgacgacggcgcgaaggctgcgacgggcgccaagcagatggtgcggctgcgagagctgctgcacaagtggcagcacctgatggcgctggcggatcagaagcagcagcgggaggaggaggaggatgaccacgccgccggcggcggcgtgccggaggaggcagtggcgccggcgatcccgccgctcgtggtgcggcgtctgcggcgcacggagacggcggagtccgtgtcggacgacgagagctgcggccacagcccggagccgccgccgccgccgccggacgttccccggggctactgccccgtgtacgtgggtgccgagcagcggcggttcgtgatcccgaccggctacctggcgcaccccgtgttccggctcctgctggagaaggccgaggaggagttcgggttccagcaccaaggcgcgctcgccatcccctgcgagacggaggccttcaagtacatcctccagtgcgtccagcgccacgacaggcgtggcgacgacggttctcattcagttcaggcggtcgttctcgttcccgatagagacagacagagccatgcatgcatttctgacgcctctccctccccccttgaattcttgcagaagcggcgaaccaagaaccggcaatgcatcgtgcttag

SEQ ID NO: 21881 - DNA, 939 bp, Zea Mays
tcctccaagaagaaaggaacaaaggagagagatctcgatccgcacacctcacgcctctcttcctctcgccccaaggacaacgaaaacatcaaacaagagaaccaaaggaaacagagcaagagcatcgctctcgaagcaaaacgcgcaccacgccgtcgccggccggccacttcgcacgtacgtaggacgcgcacgcaccggtgcatatatggggctcctgaaccagctgtgggacgacacggtggccgggccgcgcccggactccggcctcggcaagctccgcaactgcagcgacgacgcccaggggagagggctggacgaagaagctgcgcgggaaagccaggatgggcggcggcggcggtgacgacgcccccggcacgccgaggagccccaccgtgtacgactgggtggtgatcagttcgctggacctctgaagcccaagccaagacgagaactgcacaaggaaacccaccaccaccatcaacacagctagcgaactgaaggagggagggggcagaggggccatggccatgtaatgtaacgaccaatctctttcagagcttctggtgacgtgtccagttactatatacatacatacgttaacggtgtactatgtgtcttgttgtaaatgtcacccctgcgaggtgttgccgattttgtaagctactacgtactactacgctcggcatgtcaccgtgtgcaagtgcaacacaagtttgtaaaaatgactagctagtagtagcaatgctgttgctgtacgagtaggcctccctctgctttgtacaggggtagtccaacaagtatatggtttgctggtgccatgtaaaaatgtatatagaatcctacgttcacgcccagcaaggatgcgtggttgagtgttctggactctggacaatactactatccaataacagccataccgtgtttttttcctgggcc

SEQ ID NO: 21882 - DNA, 1157 bp, Zea Mays
tcctccaagaagaaaggaacaaaggagagagatctcgatccgcacacctcacgcctctcttcctctcgccccaaggacaacgaaaacatcaaacaagagaaccaaaggaaacagagcaagagcatcgctctcgaagcaaaacgcgcaccacgccgtcgccggccggccacttcgcacgtacgtaggacgcgcacgcaccggtgcatatatggggctcctgaaccagctgtgggacgacacggtggccgggccgcgcccggactccggcctcggcaagctccgcaagtacgcctccttctccccctcgtcgtcgtcgtcggcggcggtggcggcggcggcggcggcgggctccgcgccgcctccgggcgccgtgacgcggagcttgaccatgctgcggcggccggcggcgctgtccgtcgtcacgtcgccccgcagcgagtccagctccgcgccgtcgtccccgtcgcccgcaagcggcgctccggattcgcccttcggcgcagctgcagcgacgacgcccaggggagagggctggacgaagaagctgcgcgggaaagccaggatgggcggcggcggcggtgacgacgcccccggcacgccgaggagccccaccgtgtacgactgggtggtgatcagttcgctggacctctgaagcccaagccaagacgagaactgcacaaggaaacccaccaccaccatcaacacagctagcgaactgaaggagggagggggcagaggggccatggccatgtaatgtaacgaccaatctctttcagagcttctggtgacgtgtccagttactatatacatacatacgttaacggtgtactatgtgtcttgttgtaaatgtcacccctgcgaggtgttgccgattttgtaagctactacgtactactacgctcggcatgtcaccgtgtgcaagtgcaacacaagtttgtaaaaatgactagctagtagtagcaatgctgttgctgtacgagtaggcctccctctgctttgtacaggggtagtccaacaagtatatggtttgctggtgccatgtaaaaatgtatatagaatcctacgttcacgcccagcaaggatgcgtggttgagtgttctggactctggacaatactactatccaataacagccataccgtgtttttttcctgggcc

SEQ ID NO: 21883 - DNA, 1368 bp, Zea Mays
tcctccaagaagaaaggaacaaaggagagagatctcgatccgcacacctcacgcctctcttcctctcgccccaaggacaacgaaaacatcaaacaagagaaccaaaggaaacagagcaagagcatcgctctcgaagcaaaacgcgcaccacgccgtcgccggccggccacttcgcacgtacgtaggacgcgcacgcaccggtgcatatatggggctcctgaaccagctgtgggacgacacggtggccgggccgcgcccggactccggcctcggcaagctccgcaagtacgcctccttctccccctcgtcgtcgtcgtcggcggcggtggcggcggcggcggcggcgggctccgcgccgcctccgggcgccgtgacgcggagcttgaccatgctgcggcggccggcggcgctgtccgtcgtcacgtcgccccgcagcgagtccagctccgcgccgtcgtccccgtcgcccgcaagcggcgctccggattcgcccttcggcgcaggtgaccggctggcgccaccatgtctctttttttcccccagctcttgctgtctctgtctgtgtgtgtgtgtgtgtggtgtttcggttttggccagccgaatgaatctttgggatagctagatgatactgtagatccgaaacaaaaaaaaaacgaagcacggctgatttttgttgtatctctctgcacggtcgccatcgtgacatgatgctagctgcagcgacgacgcccaggggagagggctggacgaagaagctgcgcgggaaagccaggatgggcggcggcggcggtgacgacgcccccggcacgccgaggagccccaccgtgtacgactgggtggtgatcagttcgctggacctctgaagcccaagccaagacgagaactgcacaaggaaacccaccaccaccatcaacacagctagcgaactgaaggagggagggggcagaggggccatggccatgtaatgtaacgaccaatctctttcagagcttctggtgacgtgtccagttactatatacatacatacgttaacggtgtactatgtgtcttgttgtaaatgtcacccctgcgaggtgttgccgattttgtaagctactacgtactactacgctcggcatgtcaccgtgtgcaagtgcaacacaagtttgtaaaaatgactagctagtagtagcaatgctgttgctgtacgagtaggcctccctctgctttgtacaggggtagtccaacaagtatatggtttgctggtgccatgtaaaaatgtatatagaatcctacgttcacgcccagcaaggatgcgtggttgagtgttctggactctggacaatactactatccaataacagccataccgtgtttttttcctgggcc

SEQ ID NO: 21884 - DNA, 2580 bp, Zea Mays
ccatgcctcagcctcgcaatatcctccatgccagcgtctctgcttctcctccgtgcaaccgcccgacccgccgccttcccctccgcaaaacagccatgcccccgcctcggctaaccctacgcgcagatccgcagccgcctgacccgccaggaccccgcctctccttccccttcgcgctcaaacaaccaagccgaggtccgcgcagccacacgaactgccatgacctcgcacgatccgtcatgcccccgcctcgcacgatccatcgtgccttcccctccgtgcaaccgcccgacccgccaggaacccgcctctccttcccctccgcgctcaagccgaggaaatgcacccacaaatttggaagccgcggcaatggcgcccgatttggctatggcgtgcatgatctccatcggctgatttggaaaccgcacaatctacgtcggcgatttggaaagcacgatctcggtaccgcaatcacaacaattgtcccccaaatgtcgcgaccaccgacgtccagctgacttaggaacgaccaagcaggagcctactcctcatttgcccctgttcagaggtaaagacaattacttccctatacaatccaactatatagagagatcgacgtcaaaaggaaccttgggctttgtattcaagtcggcgagatttccttatgtgaaaacgaagaaccaacagaaacgaatctaatggggcataatgctggtcgcacaccattaatagacatctcaaacacaagcgttacaggtgatcaaataggatcaaactcgcttggaccaatagacgatgctaatgaacgtaagaggcaaagggatagagaaagatatgccacgatgtccattgaacaaaagaatgagaaaaataggaagcgtcgtgaagcacgtcaacgaaataaaggactacccctaaagtctgagtcatctagagatggcgacaacaaagtaaatgtggatctagatgatgatagcgactggctgcatcggaacgagacattccagacaaacgactatgtcgcaacgacagaccttctgccaccaggcagtgtgcatgaatctgttggtgtcattggggaaccgagtatcggcgttagggagtataggcttgaatgccttaggttgtataatcagacaccaaagcgaaaagaggcaaagatagagtacatgagaaaacgtagagtgctacaggctgacactctgaatgttgcgtccatcgccatggaggacccaacatatacccctgaggttgtgcaccctgcaacggaaccttcaacagttaccacctgcgactgggttatccctgaattcgttaggacacctttcctaccagctcaaacacagcccgaggatgtcggttcattcgatatgtctactgaagcaataagacgtaaacatcatgtgccgcgtggggaaagacaaactatcaaagcccgtcgaaacaaacaatctcaagcatccattgcaaggaacgtgactactttgaatggggatactatcggcgacgccaacaacaatgatgaggagactgacgaggacatcgaaatcgatggtactcaggatgaatctactggcactgatgtgcctgacccctacgacaaggtatacagtaacctccctgaagaaacgcatatgctgaagcctgttcctgactgcggttattgcactgcgaagaagtttgagtacgagccacctgggttttgctgtcgtggtgggaaggttgagctagcaccactggatacccctccccagctcaggaggttgtgggatagtgcagactctgatgctaagcactttcgtgataacattaggtttttaatgtccatttctctttcacttccctatattgctgcctcgatagtatgacaactaatgtgcgagattctggtatatacacgttctgggcacaaggcatgatgtaccacaatatcaagtcattcggtaaggaaggtgggtcggagcataaacatctagagctttacttttacgatgacgatcccagtctcgagcatcggtaccgtaagtgtcgtgaagagcagcttcagaaagacaaagaggttattaaacagatagttggcatactccatggaaacccgtactccgagcaccttaggagcatgggccatgttgagaaccttgatgactatcatatcgcattgaaccttgaccagactttgaaccagaagacatataacacgcctctcacttcggaggtggccgctgtatggatcaaggggagcgaacggcgaggccagttcagcaagagtgttatgttacatgggaaggataggtcaagccacgtcatctgctcataccatggatgctacgatgcactatcatatccactgttcttcccaaaaggtgaacttggatggcatgcaaatatcccaaaggttggtgtatccatggatgaagtggatgcataccgtgcgacacatagggcaaataattcaaacgatgaagatgcaggttagttgtttctttgtactttgggatttttgcacattattaactattctttcaacatcactcacttttcaatccttgcgtatgcagaatctcctacccatttatgtgt

SEQ ID NO: 21885 - DNA, 1850 bp, Zea Mays
actgtcttgcctgttgcctctgcggctttgcctgcgctcacggacggtcactggctcacgctcccctcgcctgcgtcgcctcgcctagacaagagacaagacgcctagtcgcctccgatcgaaatcgaatcgagtcgggtgggctcgggcccggtcttgttgtcttgtctcccagctaggaatagcgcaacgagatccctcgcgcgcgcggaccccggagaggccgagggagggtgacagggcgtgtcctcgaccgcgaggggaatgggatcggagggacgggcctggaacggcgcgggcatggccgccggcagcggctatggcggcggggtagaggcgaaagcgaccaccacggctgtgtcggccgcggcccccgcggaggttcccacgtcggcggcctccgtcgacatctcgctgccgctcctgaagatgtcgcctcgcatcatagctctctgcaaggaattggtcgaagggtggtcgtcgattgacagctcgctcttctccatcgagaccgtgtccgggggcatcacgaatctattgctgaaggtttctgtcaaagaagacaacggcaatgagtcttctgttactgttcggttgtatggaccaaatacggacttggtgattgataggaaaagggaattgcaggcgataccatatctctcagctgcagggttcggggctcggctacttggaatatttgagaatggagtagttcagtcattcatctatgctcgaacactgtcaccagcagacatgaaagaacctaaaatagcagctgaaattgccaaggagctacgcaaattccatcaagtagacataccagggtctaaagaaccacaattgtggaatgatatattcaagtttttgaagaaagctgcagcattgaagtttgaggataacatgaagcagaagagatatgaaaagatctcatttagagaaatacaagatgaagttcaagaacttaaggatctcttggacattctgcgcgcgcctgtggtttatgcacacaatgacttgctttcaggaaatctgatgctcaatgatttggaagggaagctatattttattgattttgagtatgggtcatacagctaccgtggctatgacattgcaaatcatttcaatgagtatgcaggatttgattgtgactataatttataaagatgcccagtatcacttcttcaggaattatctacacactgatagacctagtgaggtggatgcacaagatatggaagtactttatgtggaaacaaacactttcagactagcatcgcacatttactgggcattatgggcccttattcaggcaaaggtatccccaattgactttgactatcttggatacttcttcttgcggtatggtgagtacaagaaacaaagggagtcctgcttctccttggcacaaagctttctctccgagctaaaaaatggctagagcctgagaatctgttcacgagtttatactggtgtacgcatgctcggagcgggtacgcgttgtgatcatcgactgctacccagaaactctattatagcggttgtagcagcccctcattgttgtatctgatgttaggttcatcattgtctaaggactagtttggatactctagtatcgagctcaattcatgtgtatgagatggattcgggtgtaacttaaactaatttacacactaatccaactcaacacatgtggattggggtcaatactaaattacccaaacaaagcctaacagggaagtcaccagtggcaaattatgtacttatatttataataataaacacaatcctgatgggttgtgccctgttgaatttgttcttcgattaattctgccctgtgcaatctgttctgc

SEQ ID NO: 21886 - DNA, 1818 bp, Zea Mays
actgtcttgcctgttgcctctgcggctttgcctgcgctcacggacggtcactggctcacgctcccctcgcctgcgtcgcctcgcctagacaagagacaagacgcctagtcgcctccgatcgaaatcgaatcgagtcgggtgggctcgggcccggtcttgttgtcttgtctcccagctaggaatagcgcaacgagatccctcgcgcgcgcggaccccggagaggccgagggagggtgacagggcgtgtcctcgaccgcgaggggaatgggatcggagggacgggcctggaacggcgcgggcatggccgccggcagcggctatggcggcggggtagaggcgaaagcgaccaccacggctgtgtcggccgcggcccccgcggaggttcccacgtcggcggcctccgtcgacatctcgctgccgctcctgaagatgtcgcctcgcatcatagctctctgcaaggaattggtcgaagggtggtcgtcgattgacagctcgctcttctccatcgagaccgtgtccgggggcatcacgaatctattgctgaaggtttctgtcaaagaagacaacggcaatgagtcttctgttactgttcggttgtatggaccaaatacggacttggtgattgataggaaaagggaattgcaggcgataccatatctctcagctgcagggttcggggctcggctacttggaatatttgagaatggagtagttcagtcattcatctatgctcgaacactgtcaccagcagacatgaaagaacctaaaatagcagctgaaattgccaaggagctacgcaaattccatcaagtagacataccagggtctaaagaaccacaattgtggaatgatatattcaagtttttgaagaaagctgcagcattgaagtttgaggataacatgaagcagaagagatatgaaaagatctcatttagagaaatacaagatgaagttcaagaacttaaggatctcttggacattctgcgcgcgcctgtggtttatgcacacaatgacttgctttcaggaaatctgatgctcaatgatttggaagctaccgtggctatgacattgcaaatcatttcaatgagtatgcaggatttgattgtgactataatttgtacccagataaagatgcccagtatcacttcttcaggaattatctacacactgatagacctagtgaggtggatgcacaagatatggaagtactttatgtggaaacaaacactttcagactagcatcgcacatttactgggcattatgggcccttattcaggcaaaggtatccccaattgactttgactatcttggatacttcttcttgcggtatggtgagtacaagaaacaaagggagtcctgcttctccttggcacaaagctttctctccgagctaaaaaatggctagagcctgagaatctgttcacgagtttatactggtgtacgcatgctcggagcgggtacgcgttgtgatcatcgactgctacccagaaactctattatagcggttgtagcagcccctcattgttgtatctgatgttaggttcatcattgtctaaggactagtttggatactctagtatcgagctcaattcatgtgtatgagatggattcgggtgtaacttaaactaatttacacactaatccaactcaacacatgtggattggggtcaatactaaattacccaaacaaagcctaacagggaagtcaccagtggcaaattatgtacttatatttataataataaacacaatcctgatgggttgtgccctgttgaatttgttcttcgattaattctgccctgtgcaatctgttctgc

SEQ ID NO: 21887 - DNA, 1853 bp, Zea Mays
actgtcttgcctgttgcctctgcggctttgcctgcgctcacggacggtcactggctcacgctcccctcgcctgcgtcgcctcgcctagacaagagacaagacgcctagtcgcctccgatcgaaatcgaatcgagtcgggtgggctcgggcccggtcttgttgtcttgtctcccagctaggaatagcgcaacgagatccctcgcgcgcgcggaccccggagaggccgagggagggtgacagggcgtgtcctcgaccgcgaggggaatgggatcggagggacgggcctggaacggcgcgggcatggccgccggcagcggctatggcggcggggtagaggcgaaagcgaccaccacggctgtgtcggccgcggcccccgcggaggttcccacgtcggcggcctccgtcgacatctcgctgccgctcctgaagatgtcgcctcgcatcatagctctctgcaaggaattggtcgaagggtggtcgtcgattgacagctcgctcttctccatcgagaccgtgtccgggggcatcacgaatctattgctgaaggtttctgtcaaagaagacaacggcaatgagtcttctgttactgttcggttgtatggaccaaatacggacttggtgattgataggaaaagggaattgcaggcgataccatatctctcagctgcagggttcggggctcggctacttggaatatttgagaatggagtagttcagtcattcatctatgctcgaacactgtcaccagcagacatgaaagaacctaaaatagcagctgaaattgccaaggagctacgcaaattccatcaagtagacataccagggtctaaagaaccacaattgtggaatgatatattcaagtttttgaagaaagctgcagcattgaagtttgaggataacatgaagcagaagagatatgaaaagatctcatttagagaaatacaagatgaagttcaagaacttaaggatctcttggacattctgcgcgcgcctgtggtttatgcacacaatgacttgctttcaggaaatctgatgctcaatgatttggaagctatattttattgattttgagtatgggtcatacagctaccgtggctatgacattgcaaatcatttcaatgagtatgcaggatttgattgtgactataatttgtacccagataaagatgcccagtatcacttcttcaggaattatctacacactgatagacctagtgaggtggatgcacaagatatggaagtactttatgtggaaacaaacactttcagactagcatcgcacatttactgggcattatgggcccttattcaggcaaaggtatccccaattgactttgactatcttggatacttcttcttgcggtatggtgagtacaagaaacaaagggagtcctgcttctccttggcacaaagctttctctccgagctaaaaaatggctagagcctgagaatctgttcacgagtttatactggtgtacgcatgctcggagcgggtacgcgttgtgatcatcgactgctacccagaaactctattatagcggttgtagcagcccctcattgttgtatctgatgttaggttcatcattgtctaaggactagtttggatactctagtatcgagctcaattcatgtgtatgagatggattcgggtgtaacttaaactaatttacacactaatccaactcaacacatgtggattggggtcaatactaaattacccaaacaaagcctaacagggaagtcaccagtggcaaattatgtacttatatttataataataaacacaatcctgatgggttgtgccctgttgaatttgttcttcgattaattctgccctgtgcaatctgttctgc

SEQ ID NO: 21888 - DNA, 1752 bp, Zea Mays
actgtcttgcctgttgcctctgcggctttgcctgcgctcacggacggtcactggctcacgctcccctcgcctgcgtcgcctcgcctagacaagagacaagacgcctagtcgcctccgatcgaaatcgaatcgagtcgggtgggctcgggcccggtcttgttgtcttgtctcccagctaggaatagcgcaacgagatccctcgcgcgcgcggaccccggagaggccgagggagggtgacagggcgtgtcctcgaccgcgaggggaatgggatcggagggacgggcctggaacggcgcgggcatggccgccggcagcggctatggcggcggggtagaggcgaaagcgaccaccacggctgtgtcggccgcggcccccgcggaggttcccacgtcggcggcctccgtcgacatctcgctgccgctcctgaagatgtcgcctcgcatcatagctctctgcaaggaattggtcgaagggtggtcgtcgattgacagctcgctcttctccatcgagaccgtgtccgggggcatcacgaatctattgctgaaggtttctgtcaaagaagacaacggcaatgagtcttctgttactgttcggttgtatggaccaaatacggacttggtgattgataggaaaagggaattgcagacatgaaagaacctaaaatagcagctgaaattgccaaggagctacgcaaattccatcaagtagacataccagggtctaaagaaccacaattgtggaatgatatattcaagtttttgaagaaagctgcagcattgaagtttgaggataacatgaagcagaagagatatgaaaagatctcatttagagaaatacaagatgaagttcaagaacttaaggatctcttggacattctgcgcgcgcctgtggtttatgcacacaatgacttgctttcaggaaatctgatgctcaatgatttggaagggaagctatattttattgattttgagtatgggtcatacagctaccgtggctatgacattgcaaatcatttcaatgagtatgcaggatttgattgtgactataatttgtacccagataaagatgcccagtatcacttcttcaggaattatctacacactgatagacctagtgaggtggatgcacaagatatggaagtactttatgtggaaacaaacactttcagactagcatcgcacatttactgggcattatgggcccttattcaggcaaaggtatccccaattgactttgactatcttggatacttcttcttgcggtatggtgagtacaagaaacaaagggagtcctgcttctccttggcacaaagctttctctccgagctaaaaaatggctagagcctgagaatctgttcacgagtttatactggtgtacgcatgctcggagcgggtacgcgttgtgatcatcgactgctacccagaaactctattatagcggttgtagcagcccctcattgttgtatctgatgttaggttcatcattgtctaaggactagtttggatactctagtatcgagctcaattcatgtgtatgagatggattcgggtgtaacttaaactaatttacacactaatccaactcaacacatgtggattggggtcaatactaaattacccaaacaaagcctaacagggaagtcaccagtggcaaattatgtacttatatttataataataaacacaatcctgatgggttgtgccctgttgaatttgttcttcgattaattctgccctgtgcaatctgttctgc

SEQ ID NO: 21889 - DNA, 1831 bp, Zea Mays
actgtcttgcctgttgcctctgcggctttgcctgcgctcacggacggtcactggctcacgctcccctcgcctgcgtcgcctcgcctagacaagagacaagacgcctagtcgcctccgatcgaaatcgaatcgagtcgggtgggctcgggcccggtcttgttgtcttgtctcccagctaggaatagcgcaacgagatccctcgcgcgcgcggaccccggagaggccgagggagggtgacagggcgtgtcctcgaccgcgaggggaatgggatcggagggacgggcctggaacggcgcgggcatggccgccggcagcggctatggcggcggggtagaggcgaaagcgaccaccacggctgtgtcggccgcggcccccgcggaggttcccacgtcggcggcctccgtcgacatctcgctgccgctcctgaagatgtcgcctcgcatcatagctctctgcaaggaattggtcgaagggtggtcgtcgattgacagctcgctcttctccatcgagaccgtgtccgggggcatcacgaatctattgctgaaggtttctgtcaaagaagacaacggcaatgagtcttctgttactgttcggttgtatggaccaaatacggacttggtgattgataggaaaagggaattgcagctgcagggttcggggctcggctacttggaatatttgagaatggagtagttcagtcattcatctatgctcgaacactgtcaccagcagacatgaaagaacctaaaatagcagctgaaattgccaaggagctacgcaaattccatcaagtagacataccagggtctaaagaaccacaattgtggaatgatatattcaagtttttgaagaaagctgcagcattgaagtttgaggataacatgaagcagaagagatatgaaaagatctcatttagagaaatacaagatgaagttcaagaacttaaggatctcttggacattctgcgcgcgcctgtggtttatgcacacaatgacttgctttcaggaaatctgatgctcaatgatttggaagggaagctatattttattgattttgagtatgggtcatacagctaccgtggctatgacattgcaaatcatttcaatgagtatgcaggatttgattgtgactataatttataaagatgcccagtatcacttcttcaggaattatctacacactgatagacctagtgaggtggatgcacaagatatggaagtactttatgtggaaacaaacactttcagactagcatcgcacatttactgggcattatgggcccttattcaggcaaaggtatccccaattgactttgactatcttggatacttcttcttgcggtatggtgagtacaagaaacaaagggagtcctgcttctccttggcacaaagctttctctccgagctaaaaaatggctagagcctgagaatctgttcacgagtttatactggtgtacgcatgctcggagcgggtacgcgttgtgatcatcgactgctacccagaaactctattatagcggttgtagcagcccctcattgttgtatctgatgttaggttcatcattgtctaaggactagtttggatactctagtatcgagctcaattcatgtgtatgagatggattcgggtgtaacttaaactaatttacacactaatccaactcaacacatgtggattggggtcaatactaaattacccaaacaaagcctaacagggaagtcaccagtggcaaattatgtacttatatttataataataaacacaatcctgatgggttgtgccctgttgaatttgttcttcgattaattctgccctgtgcaatctgttctgc

SEQ ID NO: 21890 - DNA, 1375 bp, Zea Mays
actgtcttgcctgttgcctctgcggctttgcctgcgctcacggacggtcactggctcacgctcccctcgcctgcgtcgcctcgcctagacaagagacaagacgcctagtcgcctccgatcgaaatcgaatcgagtcgggtgggctcgggcccggtcttgttgtcttgtctcccagctaggaatagcgcaacgagatccctcgcgcgcgcggaccccggagaggccgagggagggtgacagggcgtgtcctcgaccgcgaggggaatgggatcggagggacgggcctggaacggcgcgggcatggccgccggcagcggctatggcggcggggtagaggcgaaagcgaccaccacggctgtgtcggccgcggcccccgcggaggttcccacgtcggcggcctccgtcgacatctcgctgccgctcctgaagatgtcgcctcgcatcatagctctctgcaaggaattggtcgaagggtggtcgtcgattgacagctcgctcttctccatcgagaccgtgtccgggggcatcacgaatctattgctgaaggtttctgtcaaagaagacaacggcaatgagtcttctgttactgttcggttgtatggaccaaatacggacttggtgattgataggaaaagggaattgcaggcgataccatatctctcagctgcagggttcggggctcggctacttggaatatttgagaatggagtagttcagtcattcatctatgctcgaacactgtcaccagcagacatgaaagaacctaaaatagcagctgaaattgccaaggagctacgcaaattccatcaagtagacataccagggtctaaagaaccacaattgtggaatgatatattcaagtttttgaagaaagctgcagcattgaagtttgaggataacatgaagcagaagagatatgaaaagatctcatttagagaaatacaagatgaagttcaagaacttaaggatctcttggacattctgcgcgcgcctgtggtttatgcacacaatgacttgctttcaggaaatctgatgctcaatgatttggaagggaagctatattttattgattttgagtatgggtcatacagctaccgtggctatgacattgcaaatcatttcaatgagtatgcaggatttgattgtgactataatttgtacccagataaagatgcccagtatcacttcttcaggaattatctacacactgatagacctagtgaggtggatgcacaagatatggaagtactttatgtggaaacaaacactttcagactagcatcgcacatttactgggcattatgggcccttattcagatctcatcagttgggttgggtcgcgcgcccaggcccgttcggcaggccagaatccaag

SEQ ID NO: 21891 - DNA, 1273 bp, Zea Mays
ggcctctccctccctatcctgaaacgccaatccgataaaaagcgcgcaccggcgtggcgcgcttcgcccccaggagccccgatcatctcccgctcccttccttcctcctcctcctcctcatggctctgtcgtccgccggctcgttcgtggcctgcagcctccggccaagcggagctagcatccatgccccgaggtcgccgccgggcgaacgcgaccaagggcggcgtgtccaccgtgtgcgagccgctgggccccgacaggccgatctggttccccggcagctcccctccgccgtggctcgacggaagccttccaggagactttggatttgaccctctcggactaggttcggagccggagctgctgcggtggttcgcgcaggcggagctgatgcacgggcggtgggcgatgctggcggcggcgggcatcctggtcccggacctgctggcgcggtggggcttcatcgacgcggggttctcgtggttcgacgccgggtcccgcgagtacttcgcggacccctggacgctgttcgtgtcgcagatggcgctgatggggtgggcggaggggcggcggtgggcggactacctgaggcccgggtgcgtggacatcgagccgcgcttcccgaaccgcaagaacccggtgcccgacgtggggtaccccggggggctgtggttcgactgggccaactggggccgcgggtccccggagcccgtgatggtgctgcgcaccaaggagatcaagaacgggcggctcgccatgctcgccttcgtcggcttctggttccaggccgtgtacacgggccagggccccatcgacaacctgctcgcgcacctcgccgaccccggccactgcaacatcttctcggcgttcacgtcccactgatccgatcttgcttcggagctggcggagagactgcgaaggattaaaaaaaagggcatcctgttgagggagaaagaacttcgcttgggacgtctgtagccaaaagtttaatacgcatctgcaggagaaagaaaagaaagaaaaagaaattatcatccagagaatacgtgggaaataagcaggaatacataaccaagatatttgccaggccatcatgcaaatccttggagttggcggccacaaagataggagtttgttgtaatcttttcctattatttagaataagttagttttatatccagttagagacgggatatataagcactattgtaagctgcaaagacgagagatcaacagttatcattttctttaatctactacatattcctttagt

SEQ ID NO: 21892 - DNA, 1162 bp, Zea Mays
ctccctatcctgaaacgccaatccgataaaaagcgcgcaccggcgtggcgcgcttcgcccccaggagccccgatcatctcccgctcccttccttcctcctcctcctcctcatggctctgtcgtccgccggctcgttcgtggcctgcagcctccggccaagcggagctagcatccatgccccgaggtcgccgccgggcgaacgcgaccaagggcggcgtgtccaccgtgtgcgagccgctgggccccgacaggccgatctggttccccggcagctcccctccgccgtggctcgacggaagccttccaggagactttggatttgaccctctcggactaggttcggagccggagctgctgcggtggttcgcgcaggcggagctgatgcacgggcggtgggcgatgctggcggcggcgggcatcctggtcccggacctgctggcgcggtggggcttcatcgacgcggggttctcgtggttcgacgccgggtcccgcgagtacttcgcggacccctggacgctgttcgtgtcgcagatggcgctgatggggtgggcggaggggcggcggtgggcggactacctgaggcccgggtgcgtggacatcgagccgcgcttcccgaaccgcaagaacccggtgcccgacgtggggtaccccggggggctgtggttcgactgggccaactggggccgcgggtccccggagcccgtgatggtgctgcgcaccaaggagatcaagaacgggcggctcgccatgctcgccttcgtcggcttctggttccaggccgtgtacacgggccagggccccatcgacaacctgctcgcgcacctcgccgaccccggccactgcaacatcttctcgggacgtctgtagccaaaagtttaatacgcatctgcaggagaaagaaaagaaagaaaaagaaattatcatccagagaatacgtgggaaataagcaggaatacataaccaagatatttgccaggccatcatgcaaatccttggagttggcggccacaaagataggagtttgttgtaatcttttcctattatttagaataagttagttttatatccagttagagacgggatatataagcactattgtaagctgcaaagacgagagatcaacagttatcattttctttaatctactacatattcctttagt

SEQ ID NO: 21893 - DNA, 1462 bp, Zea Mays
ctccctatcctgaaacgccaatccgataaaaagcgcgcaccggcgtggcgcgcttcgcccccaggagccccgatcatctcccgctcccttccttcctcctcctcctcctcatggctctgtcgtccgccggctcgttcgtggcctgcagcctccggccaagcggagctagcatccatgccccgaggtcgccgccgggcgaacgcgaccaagggcggcgtgtccaccgtgtgcgagccgctgggccccgacaggccgatctggttccccggcagctcccctccgccgtggctcgacggaagccttccaggagactttggatttgaccctctcggactaggttcggagccggagctgctgcggtggttcgcgcaggcggagctgatgcacgggcggtgggcgatgctggcggcggcgggcatcctggtcccggacctgctggcgcggtggggcttcatcgacgcggggttctcgtggttcgacgccgggtcccgcgagtacttcgcggacccctggacgctgttcgtgtcgcagatggcgctgatggggtgggcggaggggcggcggtgggcggactacctgaggcccgggtgcgtggacatcgagccgcgcttcccgaaccgcaagaacccggtgcccgacgtggggtaccccggggggctgtggttcgactgggccaactggggccgcgggtccccggagcccgtgatggtgctgcgcaccaaggagatcaagaacgggcggctcgccatgctcgccttcgtcggcttctggttccaggccgtgtacacgggccagggccccatcgacaacctgctcgcgcacctcgccgaccccggccactgcaacatcttctcggcgttcacgtcccactgatccgatcttgcttcggagctggcggagagactgcgaaggattaaaaaaaagggcatcctgttgagggagaaagaacttcgcttggtcggtatcattttggccttgctggacatgtcaacattttgtttgtagtacctgcgtagaaatgtcaaaccacctgtacaaacgtacaaataccaccccagggatcgcgatgatgctagccagcagtccagcacacactagcttgtcctgaagatccatgcaacaccgtatacagaggaaatttatggacacggcaatggacgtctgtagccaaaagtttaatacgcatctgcaggagaaagaaaagaaagaaaaagaaattatcatccagagaatacgtgggaaataagcaggaatacataaccaagatatttgccaggccatcatgcaaatccttggagttggcggccacaaagataggagtttgttgtaatcttttcctattatttagaataagttagttttatatccagttagagacgggatatataagcactattgtaagctgcaaagacgagagatcaacagttatcattttctttaatctactacatattcctttagt

SEQ ID NO: 21894 - DNA, 1268 bp, Zea Mays
ctccctatcctgaaacgccaatccgataaaaagcgcgcaccggcgtggcgcgcttcgcccccaggagccccgatcatctcccgctcccttccttcctcctcctcctcctcatggctctgtcgtccgccggctcgttcgtggcctgcagcctccggccaagcggagctagcatccatgccccgaggtcgccgccgggcgaacgcgaccaagggcggcgtgtccaccgtgtgcgagccgctgggccccgacaggccgatctggttccccggcagctcccctccgccgtggctcgacggaagccttccaggagactttggatttgaccctctcggactaggttcggagccggagctgctgcggtggttcgcgcaggcggagctgatgcacgggcggtgggcgatgctggcggcggcgggcatcctggtcccggacctgctggcgcggtggggcttcatcgacgcggggttctcgtggttcgacgccgggtcccgcgagtacttcgcggacccctggacgctgttcgtgtcgcagatggcgctgatggggtgggcggaggggcggcggtgggcggactacctgaggcccgggtgcgtggacatcgagccgcgcttcccgaaccgcaagaacccggtgcccgacgtggggtaccccggggggctgtggttcgactgggccaactggggccgcgggtccccggagcccgtgatggtgctgcgcaccaaggagatcaagaacgggcggctcgccatgctcgccttcgtcggcttctggttccaggccgtgtacacgggccagggccccatcgacaacctgctcgcgcacctcgccgaccccggccactgcaacatcttctcggcgttcacgtcccactgatccgatcttgcttcggagctggcggagagactgcgaaggattaaaaaaaagggcatcctgttgagggagaaagaacttcgcttggtcgggacgtctgtagccaaaagtttaatacgcatctgcaggagaaagaaaagaaagaaaaagaaattatcatccagagaatacgtgggaaataagcaggaatacataaccaagatatttgccaggccatcatgcaaatccttggagttggcggccacaaagataggagtttgttgtaatcttttcctattatttagaataagttagttttatatccagttagagacgggatatataagcactattgtaagctgcaaagacgagagatcaacagttatcattttctttaatctactacatattcctttagt

SEQ ID NO: 21895 - DNA, 1117 bp, Zea Mays
cttaacccgttcacaactatatgtttaaagatagcagttctgggatacatcatgcatgttcagtagtgattctcgcggttttgcactacggtgctgtgttactagttctgaatcatataagaaagactggagggaggatgggatcgtgagcccagtgaaaaaccagggccactgtggatcatgctggaccttcagcactactggtgcgcttgaggctgcatatacccaggcaactggcaaggccatctctctctctgagcaacagcttgttgactgcggttttgcattcaacaatttcggatgtaaggggggccttccatcccaggcctttgaatacatcaaatacaatggtggtcttgacaccgaggagtcctacccttaccaaggtgtcaacggaatctgccagttcaaggctgagaatgttggagtcaaggttttggactcggttaacatcaccctgggtgctgaggatgaactgaaggatgctgttggtctggttcgcccggttagtgttgccttcgaggtgatcagtggtttcagactgtacaagaccggagtctacactagtgaccactgcggaactacaccgatggatgtgaaccacgctgttctggctgttggctatggtgtcgagaacggtgtcccctactggctcatcaagaactcatggggcgctgactggggtgatgagggttacttcaagatggaaatgggcaaaaacatgtgcggtgttgctacgtgtgcatcctaccctgttgttgcatgaggcacttccggattgtcacatggtctgtttggcatcaatattgcatgtttggcctaagcttggtggatgggttatacagaacgggaactccgttgtgaatagaaacccgttgtgaatagaaaccgtgaagggaaagaattacttagcccctgcgtgtacgtctcccccgtatggctgtgtaggtagattgtcggttcgggatccgaattactcgtaccgtcatacgtgtctatggcattttatttgtgaaacaaaatacccataaatcatgaaataatgtaccatacgcagattatatattgtcatgtaatttactcatgttcatgtctccgataagcggctataccctag

SEQ ID NO: 21896 - DNA, 1052 bp, Zea Mays
ggtgcatgcttactttaccagtaaaaagtgcatatgatatcctacaggaagtgcggattggagtctgcatgcaaattacttgcatggccttcaaatcagtcatggactcatggtcttgaaactaatcaggcactactggtgcgcttgaggctgcatatacccaggcaactggcaaggccatctctctctctgagcaacagcttgttgactgcggttttgcattcaacaatttcggatgtaaggggggccttccatcccaggcctttgaatacatcaaatacaatggtggtcttgacaccgaggagtcctacccttaccaaggtgtcaacggaatctgccagttcaaggctgagaatgttggagtcaaggttttggactcggttaacatcaccctgggtgctgaggatgaactgaaggatgctgttggtctggttcgcccggttagtgttgccttcgaggtgatcagtggtttcagactgtacaagaccggagtctacactagtgaccactgcggaactacaccgatggatgtgaaccacgctgttctggctgttggctatggtgtcgagaacggtgtcccctactggctcatcaagaactcatggggcgctgactggggtgatgagggttacttcaagatggaaatgggcaaaaacatgtgcggtgttgctacgtgtgcatcctaccctgttgttgcatgaggcacttccggattgtcacatggtctgtttggcatcaatattgcatgtttggcctaagcttggtggatgggttatacagaacgggaactccgttgtgaatagaaacccgttgtgaatagaaaccgtgaagggaaagaattacttagcccctgcgtgtacgtctcccccgtatggctgtgtaggtagattgtcggttcgggatccgaattactcgtaccgtcatacgtgtctatggcattttatttgtgaaacaaaatacccataaatcatgaaataatgtaccatacgcagattatatattgtcatgtaatttactcatgttcatgtctccgataagcggctataccctag

SEQ ID NO: 21897 - DNA, 3899 bp, Zea Mays
cttggcaggagcacctgcacgctgcacgagtgaaaaaggcatcgcgatcccgactgacagacgcagcccacacggattaaaatttaaggcgtcagtgaaactttgcgtcgatcatttaaggcgcagccgcagataaacaaacgcccactcgcccctcgcgtcgcgccccctgccatcaaggccagatcctagcccgccattaatgccgctactagcccgagctccacgagatcagagaggcggcggctgggctgaggcccccgcaccgccgccgcccgccctcgcctcgggttctgcatgctctgcgcctcactctctgtcaccgcgcgtccgtgtccgtcaccagaccttggcggccgcgtagcgtaggatgctcacgtgcatcgcgtgctccaagcagcagttctccggcggcggcccgccactgcacgagccgccggaggacgacgatgtcgttggtggaggcgccggcaccagcgccggcgcggcgacgccgagcacacggcacgccatcaaggcgctcaccgcccagatcaaggacatggcgctcaaggcgtcgggcgcgtaccggcaatgcaagccctgcgcgggctcctcggcggcggcctcgcggcggcaccacccgtaccaccaccgcggcggcagcgccttcgggggctccgacgccgactcgggggcctccgaccgcttccactacgcgtaccgccgcgcggggagctcggcggcctcgactccgcgattgcgcagcggaggcgccgccctgtcgagtggcgacgccacgccctccatcagcgtgcgcaccggcaccgacttccccgccggcgatgacgacgacgacgagatgacgccagaagccactggcggatgtggtggcaaggacgacgacgccaaggagtgggtggcgcaggtggagcccggtgtgctcatcactttcgtctcactggcggaaggtggcaacgacctaaaacgcattcgattcagccgtgagatgttcaacaaatgggaagcacaaagatggtgggctgaaaactatgacaaagttatggaactttacaatgtgcagaagtttaatcaaactgtccctctcccagctaccccaaaatctgaagatgagagctccaaggaggacagcccggtgacaccaccactggacaaggaaaggctaccccgcactttccacagacaaggtggtggagcgatgggctcctcttcatcagattctctcgagcatcactcaaaccactactgtactggccgccaccaccaccaccaccaccatggacaccaatgctgtgattcaatgggcctgaggagatcgacaggtctggtgagctctcggtgtccgtcagcaatgcgagcgaccaggagagggagtgggtcgaagaagacgagccaggcgtatatatcacaatccgggctttacctggtgggatcagagagcttcgccgcgttcggttcagccgggagaagttcagcgagatgcatgccaggctgtggtgggaagagaaccgagcgaggatacacgaacaatacctctgagaagagacgcccgacaccatcagcagcacgagcacatgaatagagctggcactaacacatccacatgcatttccagcttcatacgatgttttgctaacctaagaggtccggtttccggtattttacatttcgttcagtctcacgtgtggtggtggtggggtgggaggatagtgtacgtatttcacagtttcactactgaatctgtaggtctcgtttttcatcaataatgtatatctacctgttgtttcccataagacaaattagcatgcttgtgtttgtgttgtgtgcgctactttgctcttgtcactgtcttattgtactcgaactcttccagacataacaataatcaacccccaagttggcactgagtgccccaaactcaaaaccactttgtggtgggttgattgcgacgacagtgaacgcacaacgatatttttttttttgaaaaaagcaggcaggacaaaaacaggcaacggcctaacccagccttgaagcaaaaacccaccacgagcaaaatggtcctcgactataaacacagcctagaagaagataaaagagtggcagatgcctagccccggccaccatccatcaacgagcaaaattttaagcctgggccttgtctggctacacttttatccacaatcagatgaactggaatggaaaaaaaaatgtgtaccttttcgtactatctcatcctaacacatatgatatgaattatatgaattgagcgcctccttttgcaggctctttgtacacgaacggtttcgcttctcctgtgcgccactaccttacggatttgtgatggtgacctttcgccatccaacaaaagccaagttgctaacatagtacgtcagctatccacacactaaccacccgtttttcctgtcctaactaagcgaatcactttgggacttttggcaggctagtcctcaccaccaagtgccacggcaggtaaagtttacctctgcgattcctcactggcatgcttccttccactgcagtcgctgtcttctaccaagaaccacaagttctcaggcctggtttagagattttcattgaattctaaattcgagcacttaaacctcttctcactttgcacctgaaagccacgttagtatatgggatggggcacaagtgctgaagtgcccttgcttggatgatggggcaatgcttcggacgtctggaagatgaggcacaaaggtttggtttaattgtaacttaggtagaagacaatgtttggcgctctaacaaaagaacaacgggaaaggctaccaccggaacttcaaccaatccggcatgaagataacaatatcataaacaaagcataataaagtgaatcgttatcatgtcagagaaataatttcagacaattattggtgggaattttctaatcgaagtagagacattggcatagtgcaattagttgaaacatcatctatggtttttttaaaaaaaaatcgaacaaaaaaaaactcttaaaccagctacctaaatttgccaccttctccaataacaaactgaatgaggtggaataagaatgataaataagggtaaaatgacacaagtgcgtgtttccacaactccattccgacagctcaaactgcacccttgccttgtgtataaggccatgtttgaatgcactagaggtgatagatagctactaaaattagttgaaggcatcgaaacagtctagctaatagtttaactgttagaaacttttagcaaattagctcatagtttattgaaaggaaaaggttgtagggaaaacccctacagtacaaattttattattaataataatgagtacacagaggtacaaaaagagaaccgaaacaaagaacaaaaaaaaaacacactacaaccggctatcgagagtttagaaattaactcatacttacctagctaatttcactagcaattttttagccaactaactattagctctagtgcattcaaacaccccctaagaattcatgtataacatatcgatttcacttgcttgcaagctgcagaagtatcaggctacactgtaaactagtattaatgtctatcaagcatattcagattctgtcataaacctggttaagaaacagaaacagaatagagacggaataattgacacaaagcccatctgatgcttggtgtcatcgaataggaaaaaaatggatctatttgacatgtctgctgttaagcatggtgctagtataaacagaaaaaacacataccaattatactagaatcagcagtacaatatttgcaatcgtgagtataaatctatattcttgctcacaaccaggtgccagtaaatttacagacatcctaagcaaacatgacaatgttctagttctactaacatgggg

SEQ ID NO: 21898 - DNA, 3090 bp, Zea Mays
atctcactctccgccactgcacccagcttcctcaaacttgcggtttactttcagagccccttgaacctgtacgtgttttcacgacctagcacctttgaatttgtcatggctgtttcctcacctagccctccctcttccatgtgtaggggagtgggttagatgagacaactatccgtgagatgttcaacaaatgggaagcacaaagatggtgggctgaaaactatgacaaagttatggaactttacaatgtgcagaagtttaatcaaactgtccctctcccagctaccccaaaatctgaagatgagagctccaaggaggacagcccggtgacaccaccactggacaaggaaaggctaccccgcactttccacagacaaggtggtggagcgatgggctcctcttcatcagattctctcgagcatcactcaaaccactactgtactggccgccaccaccaccaccaccaccatggacaccaatgctgtgattcaatgggcctgaggagatcgacaggtctggtgagctctcggtgtccgtcagcaatgcgagcgaccaggagagggagtgggtcgaagaagacgagccaggcgtatatatcacaatccgggctttacctggtgggatcagagagcttcgccgcgttcggttcagccgggagaagttcagcgagatgcatgccaggctgtggtgggaagagaaccgagcgaggatacacgaacaatacctctgagaagagacgcccgacaccatcagcagcacgagcacatgaatagagctggcactaacacatccacatgcatttccagcttcatacgatgttttgctaacctaagaggtccggtttccggtattttacatttcgttcagtctcacgtgtggtggtggtggggtgggaggatagtgtacgtatttcacagtttcactactgaatctgtaggtctcgtttttcatcaataatgtatatctacctgttgtttcccataagacaaattagcatgcttgtgtttgtgttgtgtgcgctactttgctcttgtcactgtcttattgtactcgaactcttccagacataacaataatcaacccccaagttggcactgagtgccccaaactcaaaaccactttgtggtgggttgattgcgacgacagtgaacgcacaacgatatttttttttttgaaaaaagcaggcaggacaaaaacaggcaacggcctaacccagccttgaagcaaaaacccaccacgagcaaaatggtcctcgactataaacacagcctagaagaagataaaagagtggcagatgcctagccccggccaccatccatcaacgagcaaaattttaagcctgggccttgtctggctacacttttatccacaatcagatgaactggaatggaaaaaaaaatgtgtaccttttcgtactatctcatcctaacacatatgatatgaattatatgaattgagcgcctccttttgcaggctctttgtacacgaacggtttcgcttctcctgtgcgccactaccttacggatttgtgatggtgacctttcgccatccaacaaaagccaagttgctaacatagtacgtcagctatccacacactaaccacccgtttttcctgtcctaactaagcgaatcactttgggacttttggcaggctagtcctcaccaccaagtgccacggcaggtaaagtttacctctgcgattcctcactggcatgcttccttccactgcagtcgctgtcttctaccaagaaccacaagttctcaggcctggtttagagattttcattgaattctaaattcgagcacttaaacctcttctcactttgcacctgaaagccacgttagtatatgggatggggcacaagtgctgaagtgcccttgcttggatgatggggcaatgcttcggacgtctggaagatgaggcacaaaggtttggtttaattgtaacttaggtagaagacaatgtttggcgctctaacaaaagaacaacgggaaaggctaccaccggaacttcaaccaatccggcatgaagataacaatatcataaacaaagcataataaagtgaatcgttatcatgtcagagaaataatttcagacaattattggtgggaattttctaatcgaagtagagacattggcatagtgcaattagttgaaacatcatctatggtttttttaaaaaaaaatcgaacaaaaaaaaactcttaaaccagctacctaaatttgccaccttctccaataacaaactgaatgaggtggaataagaatgataaataagggtaaaatgacacaagtgcgtgtttccacaactccattccgacagctcaaactgcacccttgccttgtgtataaggccatgtttgaatgcactagaggtgatagatagctactaaaattagttgaaggcatcgaaacagtctagctaatagtttaactgttagaaacttttagcaaattagctcatagtttattgaaaggaaaaggttgtagggaaaacccctacagtacaaattttattattaataataatgagtacacagaggtacaaaaagagaaccgaaacaaagaacaaaaaaaaaacacactacaaccggctatcgagagtttagaaattaactcatacttacctagctaatttcactagcaattttttagccaactaactattagctctagtgcattcaaacaccccctaagaattcatgtataacatatcgatttcacttgcttgcaagctgcagaagtatcaggctacactgtaaactagtattaatgtctatcaagcatattcagattctgtcataaacctggttaagaaacagaaacagaatagagacggaataattgacacaaagcccatctgatgcttggtgtcatcgaataggaaaaaaatggatctatttgacatgtctgctgttaagcatggtgctagtataaacagaaaaaacacataccaattatactagaatcagcagtacaatatttgcaatcgtgagtataaatctatattcttgctcacaaccaggtgccagtaaatttacagacatcctaagcaaacatgacaatgttctagttctactaacatgggg

SEQ ID NO: 21899 - DNA, 2156 bp, Zea Mays
cagcttgccaacatagggtacccataaacgcaacagcagcagccaggcaggcgagagaaaagagaactcctggagccataggtgtgggcgtgtggctagcatagctgtaggtcatccttcttgcttggcaatgagcgagcaagacgggcagcacgtcgcggcaagcacgccggacacggccatcgagtccttctcacagctccccttcgtccgccccaagcccccgcagccggcgtccacgtccagtgcctcgtcgatccgactgttcggcttcaaggtcccacccgacgccgccgccacgtcctcgtccacaggaaccagcgatgctaccgcagccagcgccaccgtagcgggccaggcggcggtgtcgggtgccggtgcaggcgatggcggcggcggagggcgcaagttcgagtgccactactgccgccggaacttcccgacgtcgcaggcgctgggcgggcaccagaacgcgcacaagcgggagcggcagcacgcgaagcgcgcgcagtgccagagcgcgatggccatgcatcacgcccaccactaccctgaccacacccacgcgtaccccgccttcaccagctaccaccaccagttcggcatggcgcgctacgagcccccgccgcactacccctcgtggtccagccacctcccgcacgccgctccgcctttggtgcccagatactacggcgggtccggctccctgtcgcagcctatcaacggcagccccgtcccggctgccgctctctggcgggtcccggcggccgttagcgtggccgcgccacttgtgcgccaagagcggccgacgccactgtccttgtgcggacatgacgaggaggcattgacaggagcgagaagaggggatatatcagcagatgcaggacagggaggctcgcgttcttcttccacctcgtcatctacatcgtcgcggcatcaaccccgccgggcaggtgctgctgaaaacagagagaacctgatccagccaaggatggaagcaagaagagcttcgaggtaacgagagcatgggagaaggtcgaggaggccgaggaaaccaaagccaggggtgaagaagaagactagcaaagtcaaggttgatctagttgagaagagctatggtgcatcgaggatcactacttaagaacgtgacttacagcaatgaggtaacatatgtagttatgtggtgtaagtaatatggcttaagatgcagagcaaggtccacaaggagtagtgtcaaagccagaaaattatgttggagctcataaatggcaaactagatcaagtcatggagacttggagttttggagtccaacatcgacttcaaacagcctagaaggagcaaaatggtgaagaagagaaagtatctttggagctctatttaaggtgaaacaaaaagctgggagaagatttaaagagaggtaatttcccgggacttagtcaattagtttgtacactaaatgtgtttgtctaagtcacaggaaggtcctctcaaaagttgaagtcaaaaggagaaagaaacaaggaaagcacataagtgtgttgctgattgggtagcacaccgaacaatctggtgccctctacctagtctcgggtgtctctgctaaaaatgtcagacagtatgggccatgcatcatacagtttagaccctccaacgactatcttcaaacggctactcgaaggcaacgactagctggtgcaccagacagtccggtgctggtcaatcattggtgtcaggctgccggtggtgtgccaccggacaccgaacagtctggtgcacccgcagtagtggcaatttttccaagatttggatcttctttgaatggaaaggggcaacaactaggggatcctttggggttataaaagggacccctatgcgcccatattgaacacacgagtgcagcaaacaagtccataaatcaagtaatcaaattatttctctcactctcttgtgtatgtctctagtttgtgtagaggcgaagttataagcccttagggagtggggaagtgccgctagaacaagagcaaaatcttgagcaaggttttactctgccggagcactgtcaaaagattgtaagcagtcacgacatcattgtaaccatcatcaacatagtggaggctatatctatcacattgacagacatgagcaaatggaggaa

SEQ ID NO: 21900 - DNA, 2621 bp, Zea Mays
gccaacatagggtacccataaacgcaacagcagcagccaggcaggcgagagaaaagagaactcctggagccataggtgtgggcgtgtggctagcatagctgtaggtcatccttcttgcttggcaatgagcgagcaagacgggcagcacgtcgcggcaagcacgccggacacggccatcgagtccttctcacagctccccttcgtccgccccaagcccccgcagccggcgtccacgtccagtgcctcgtcgatccgactgttcggcttcaaggtcccacccgacgccgccgccacgtcctcgtccacaggaaccagcgatgctaccgcagccagcgccaccgtagcgggccaggcggcggtgtcgggtgccggtgcaggcgatggcggcggcggagggcgcaagttcgagtgccactactgccgccggaacttcccgacgtcgcaggcgctgggcgggcaccagaacgcgcacaagcgggagcggcagcacgcgaagcgcgcgcagtgccagagcgcgatggccatgcatcacgcccaccactaccctgaccacacccacgcgtaccccgccttcaccagctaccaccaccagttcggcatggcgcgctacgagcccccgccgcactacccctcgtggtccagccacctcccgcacgccgctccgcctttggtgcccagatactacggcgggtccggctccctgtcgcagcctatcaacggcagccccgtcccggctgccgctctctggcgggtcccggcggccgttagcgtggccgcgccacttgtgcgccaagagcggccgacgccactgtccttgtgcggacatgacgaggaggcattgacaggagcgagaagaggggatatatcagcagatgcaggacagggaggctcgcgttcttcttccacctcgtcatctacatcgtcgcggcatcaaccccgccgggcaggtgctgctgaaaacagagagaaccgtcttttcatgcggacggtagctagggcggaggcgttgctgtccacctagcgggaggcagagcagctgcatgcgagaactgcttgttctgaggtgaaggagcgcgagcttgcagagcttcgttccaaggccgagtggctcaaaggcgaagcaacctgcttgcgctcggagtgcgatgatgctcggggcgacgccgaacatgaaagctctcttgtgggttttggtggtttggatgataactcaattaaaggattgacatgtgtattgggtgttgaataggtgcttagtgtaaagcttgtaaagttcaacacaagtattcaagagtgatggtccaaaggatgagttgattatggttgtgttcatatcttggagacagctgatccagccaaggatggaagcaagaagagcttcgaggtaacgagagcatgggagaaggtcgaggaggccgaggaaaccaaagccaggggtgaagaagaagactagcaaagtcaaggttgatctagttgagaagagctatggtgcatcgaggatcactacttaagaacgtgacttacagcaatgaggtaacatatgtagttatgtggtgtaagtaatatggcttaagatgcagagcaaggtccacaaggagtagtgtcaaagccagaaaattatgttggagctcataaatggcaaactagatcaagtcatggagacttggagttttggagtccaacatcgacttcaaacagcctagaaggagcaaaatggtgaagaaggttaagtacacaactttgagtgttcaaatatgttgcatacaccttctactatgcgtatgacactttggtttttttctctctaaccatatttatagagaaagtatctttggagctctatttaaggtgaaacaaaaagctgggagaagatttaaagagaggtaatttcccgggacttagtcaattagtttgtacactaaatgtgtttgtctaagtcacaggaaggtcctctcaaaagttgaagtcaaaaggagaaagaaacaaggaaagcacataagtgtgttgctgattgggtagcacaccgaacaatctggtgccctctacctagtctcgggtgtctctgctaaaaatgtcagacagtatgggccatgcatcatacagtttagaccctccaacgactatcttcaaacggctactcgaaggcaacgactagctggtgcaccagacagtccggtgctggtcaatcattggtgtcaggctgccggtggtgtgccaccggacaccgaacagtctggtgcacccgcagtagtggcaatttttccaagatttggatcttctttgaatggaaaggggcaacaactaggggatcctttggggttataaaagggacccctatgcgcccatattgaacacacgagtgcagcaaacaagtccataaatcaagtaatcaaattatttctctcactctcttgtgtatgtctctagtttgtgtagaggcgaagttataagcccttagggagtggggaagtgccgctagaacaagagcaaaatcttgagcaaggttttactctgccggagcactgtcaaaagattgtaagcagtcacgacatcattgtaaccatcatcaacatagtggaggctatatctatcacattgacagacatgagcaaatggaggaa

SEQ ID NO: 21901 - DNA, 2253 bp, Zea Mays
ctggattatgcactaagcaagcgaaaagacaccaaagtgcgaaatgcacaattctccgtatattttgccagagactgacagcgagagcacatgtcggtcgagtagcgtcgccggagaaaaaaaagcactagtaaaccaaatgtccaaaacacgaggagcgtccatcttctccaactcaactgacagttgttggtcactcgcaccagccgcccagccggaaccggaagcggaaactgaagcgagggacccgggcaccggcgccggcacgattcactagatcgtaggcgcaggcgcgggtccgtctgtgacggacacggcggtggtggcgaggaggaggaggacttgaggagcgttggggtgagcgagcaaaccagatgcgctcggaatggggaagcccttcgatgtggagctcggcggcggcgcgggaggcctcgagatcgccggagccggaggcggtggcccatggggagggcgagtcttcggcgcgatcgggcgggcggtttcgttccggtgcgtcttcgtgctcctgctcgcggcaggggtgctcataccggtgctgttcctgctcgtgccctcgcgccagcaggggtacctctcagacgaccacgacgtgctcgctgctgaaatcaaagttggtttcactttggaaaagccagtgtcattccttacttctcacatagacaaactagggaatgacatatttgaagatattggtgtacctaatagcaagattttgggtaatcttacagagctcaaggatcagctgaaacttggattgaacttaaggtcatacgagaaaatatattttcagttcaggaatgagattggttcttcagttgaagctccagcaactattgtggcatcagtattagatggaagcagcaatcttttaccagatagattgagacaactagctaagctaatcagagaacctgatgcgaggaatcttggacttaatcactctgtatttggtaaagtaaagggtgttcagctgtcatcgtacctgcaacacaaaatctctggtttatctcctagcccatctccggctccatcgccatcacaatcaccttctccaagcatgccgacatccttgtcaccttaccctgcatcaagtctccctggtccagctttagccccttcatggagcagacacccttgctttccatgttttaggtgtaatccctctcctgctggtagttcaacggtaaaacctccttgcattgttagagaccccaggctacctccattaatgcattcaccaaagccacccattatgccttccccgccaaaatacctccctccagcagatccaccggttccttcccatgtagttcctcctcgccccttacctaatcccaatcattttccaaaagcagtttctagacccaattctcaaatgatgccaataccttcgccctcaagaccagtgtctcaacattggaaggccccaaggaaaaaagagaatagcagaacttcgaatttctctccaattgcgccatctccatatgctctccttcacacttgaagttatgcttgattggatgcctgggttgcttcgaatgttgggcatgcgtcatcaggaaaatctagccagaagagagggttcactatggttgcagttctgcttcaagcatgaccatgagtcgcaatcgtgggctatgatgcaaacaccaggctttgtttattggctaatgtaactatatgatgaattctaaagctcttcagatcaggttaattgtagatataggtctatacaatgctaattaaccagggtattacgccacgaaggtggctgccctacgcccttatcaaattttaagttctcaccgaagggttgggagcttatacagaggagaatgtaagcactctattactcggagtacacgttctgcaatattactggtaacgtattggccataatacaacatacagcttctctgcaagatttcatctgttctattgtggttgagcgtttaaccaatacaacatacagcttctctgcaagacttcatctctttggacataaagcaaagagaagacaagaaagcactattgatttcatcgcggtggagtaacttagagatggcaacgggactcgatcccagatttccagcgacattagaaaatagggatgcagaagtttcttccccacaaggatgtaaacagggaaaactttttctccaacgtggacgggaaagcattcttcattccgttttaggatccgttaaacttgcacatgacaatgtttttgtg

SEQ ID NO: 21902 - DNA, 2309 bp, Zea Mays
ctggattatgcactaagcaagcgaaaagacaccaaagtgcgaaatgcacaattctccgtatattttgccagagactgacagcgagagcacatgtcggtcgagtagcgtcgccggagaaaaaaaagcactagtaaaccaaatgtccaaaacacgaggagcgtccatcttctccaactcaactgacagttgttggtcactcgcaccagccgcccagccggaaccggaagcggaaactgaagcgagggacccgggcaccggcgccggcacgattcactagatcgtaggcgcaggcgcgggtccgtctgtgacggacacggcggtggtggcgaggaggaggaggacttgaggagcgttggggtgagcgagcaaaccagatgcgctcggaatggggaagcccttcgatgtggagctcggcggcggcgcgggaggcctcgagatcgccggagccggaggcggtggcccatggggagggcgagtcttcggcgcgatcgggcgggcggtttcgttccggtgcgtcttcgtgctcctgctcgcggcaggggtgctcataccggtgctgttcctgctcgtgccctcgcgccagcaggggtacctctcagacgaccacgacgtgctcgctgctgaaatcaaagttggtttcactttggaaaagccagtgtcattccttacttctcacatagacaaactagggaatgacatatttgaagatattggtgtacctaatagcaaggtttccattgtttcaatgcaccccttgacctctaaatactttacacatatcgtttttggtgttcttccttatccaaaagatgcttcaataagtttaccggctctaagtgtgctgagatcatccttaatagagatgatgctccagcagattttgggtaatcttacagagctcaaggatcagctgaaacttggattgaacttaaggtcatacgagaaaatatattttcagttcaggaatgagattggttcttcagttgaagctccagcaactattgtggcatcagtattagatggaagcagcaatcttttaccagatagattgagacaactagctaagctaatcagagaacctgatgcgaggaatcttggacttaatcactctgtatttggtaaagtaaagggtgttcagctgtcatcgtacctgcaacacaaaatctctggtttatctcctagcccatctccggctccatcgccatcacaatcaccttctccaagcatgccgacatccttgtcaccttaccctgcatcaagtctccctggtccagctttagccccttcatggagcagacacccttgctttccatgttttaggtgtaatccctctcctgctggtagttcaacggtaaaacctccttgcattgttagagaccccaggctacctccattaatgcattcaccaaagccacccattatgccttccccgccaaaatacctccctccagcagatccaccggttccttcccatgtagttcctcctcgccccttacctaatcccaatcattttccaaaagcagtttctagacccaattctcaaatgatgccaataccttcgccctcaagaccagtgtctcaacattggaaggccccaaggaaaaaagagaatagcagaacttcgaatttctctccaattgcgccatctccatatgctctccttcacacttgaagttatgcttgattggatgcctgggttgcttcgaatgttgggcatgcgtcatcaggaaaatctagccagaagagagggttcactatggttgcagttctgcttcaagcatgaccatgagtcgcaatcgtgggctatgatgcaaacaccaggctttgtttattggctaatgtaactatatgatgaattctaaagctcttcagatcaggttaattgtagatataggtctatacaatgctaattaaccagggtattacgccacgaaggtggctgccctacgcccttatcaaattttaagttctcaccgaagggttgggagcttatacagaggagaatgtaagcactctattactcggagtacacgttctgcaatattactgcttctctgcaagacttcatctctttggacataaagcaaagagaagacaagaaagcactattgatttcatcgcggtggagtaacttagagatggcaacgggactcgatcccagatttccagcgacattagaaaatagggatgcagaagtttcttccccacaaggatgtaaacagggaaaactttttctccaacgtggacgggaaagcattcttcattccgttttaggatccgttaaacttgcacatgacaatgtttttgtg

SEQ ID NO: 21903 - DNA, 1788 bp, Zea Mays
cttcgattccacctccgttgagctaagctgaaatcaaagttggtttcactttggaaaagccagtgtcattccttacttctcacatagacaaactagggaatgacatatttgaagatattggtgtacctaatagcaaggtttccattgtttcaatgcaccccttgacctctaaatactttacacatatcgtttttggtgttcttccttatccaaaagatgcttcaataagtttaccggctctaagtgtgctgagatcatccttaatagagatgatgctccagcagagctcaaggatcagctgaaacttggattgaacttaaggtcatacgagaaaatatattttcagttcaggaatgagattggttcttcagttgaagctccagcaactattgtggcatcagtattagatggaagcagcaatcttttaccagatagattgagacaactagctaagctaatcagagaacctgatgcgaggaatcttggacttaatcactctgtatttggtaaagtaaagggtgttcagctgtcatcgtacctgcaacacaaaatctctggtttatctcctagcccatctccggctccatcgccatcacaatcaccttctccaagcatgccgacatccttgtcaccttaccctgcatcaagtctccctggtccagctttagccccttcatggagcagacacccttgctttccatgttttaggtgtaatccctctcctgctggtagttcaacggtaaaacctccttgcattgttagagaccccaggctacctccattaatgcattcaccaaagccacccattatgccttccccgccaaaatacctccctccagcagatccaccggttccttcccatgtagttcctcctcgccccttacctaatcccaatcattttccaaaagcagtttctagacccaattctcaaatgatgccaataccttcgccctcaagaccagtgtctcaacattggaaggccccaaggaaaaaagagaatagcagaacttcgaatttctctccaattgcgccatctccatatgctctccttcacacttgaagttatgcttgattggatgcctgggttgcttcgaatgttgggcatgcgtcatcaggaaaatctagccagaagagagggttcactatggttgcagttctgcttcaagcatgaccatgagtcgcaatcgtgggctatgatgcaaacaccaggctttgtttattggctaatgtaactatatgatgaattctaaagctcttcagatcaggttaattgtagatataggtctatacaatgctaattaaccagggtattacgccacgaaggtggctgccctacgcccttatcaaattttaagttctcaccgaagggttgggagcttatacagaggagaatgtaagcactctattactcggagtacacgttctgcaatattactggtaacgtattggccataatacaacatacagcttctctgcaagatttcatctgttctattgtggttgagcgtttaaccaatacaacatacagcttctctgcaagacttcatctctttggacataaagcaaagagaagacaagaaagcactattgatttcatcgcggtggagtaacttagagatggcaacgggactcgatcccagatttccagcgacattagaaaatagggatgcagaagtttcttccccacaaggatgtaaacagggaaaactttttctccaacgtggacgggaaagcattcttcattccgttttaggatccgttaaacttgcacatgacaatgtttttgtg

SEQ ID NO: 21904 - DNA, 1873 bp, Zea Mays
ctgcgactgctgaggtatttgcattcattcgaattcgaatcaaacacgcgctccatggaaaaccgtctgctaacacgcgcgcgccatgaaagttgcgttgcatcagcgcctacgtccgacgacgcatcgcactaaagcggagggagggtaaaggcaacggagagtaaaggcgggcctccgctctctctgaaaggccgtgcagctgccggcgtcggcgtgccttttcccggcggcttcccggctcctcgcccgctcggcgtactataatacctcctgcgcttgggagggaggggaagacttgcgaatttgcgatcattctgcccaggaacgaggcggcggcagacgtttcccccaccacctactaccaataattcatcgggtattcccggaatcgatcactgccactcagccagtgagtcatcagtctgccagattggatagctttcgtttcgcccacagcctacggcggcctgacctgtgcagtgcagacgatagtgtttctcttgcatcccccgcacctccctgttggttcgttcttgttggaatgacaaccgccaaggagcttcaggacgaaggctactggcagctgaagaagaaaaataatccatagagttacaacagttacgactaagggagtgaaagcctgaatggggatagacgcaaaagaaaatcttcttttttatgagcaatgagaagtaataccagatcatcaacaggccagcagctttagtgacgtcgatggtgcgatcccggccggtgcaaactgagcatgcggctactgcatgcattactccgtgtcggacgccagatttctctttcttttcaactagacagcagcaagcatcaacgtgcctggaaaaaaactagagaaataatgtaaaagtagttagtataccatacgaagggaaagaggctacatcgcagtctctgaccagactgaaaaaggctgctcagtttttgcagccgcatctgttttctcgctgaaatcaggatcgatgctgtgatttcttccgacctttcaaaggaatgactttgggggtattgtattgttgttttcataccgtgattcattccggtctttctaaggccatgtttgaatgtactatagactacagttaatagttgttcgataaattgctagtgtaattagttggctaacaaatggttagctaactattaccttattttagctagattgagctagctaatgaattaataatgggtagttaagggtgaggctacggatgattggatgtgtctagctaaaagaggttaatggttatagtgttagctgagtcgactattagctctattgcatttaaacaatatctaggcttgaaatcaaatcttgttgagggtggcatctcagatctttcttgcaaattaacaaaaagtatgggtaaatctgccgcaactttatacttgtgcctctacgtactgcttttgcgtgagacaagaccgtggcttctgttcgtcggtttgctactgcctctgtgcctcacgacctgttttgcacgctccccgttctcctccggtaacggcgatctaggaagggtgctgctgactgcctgctgagtgtcgatgccgatcagtttaggaagattagtactagtagtatgccgcaaatggcgatggcacaggctctgcatccattcagaaagagagatgcacgcacgggcacggtaatgtgggtggctataggaaggagtacgtggtctgtcagagaagaagaagaaggggggcagaaaggctatctgatcgctgatcccgcgcgaggacgcgaaaaagaatatctcctgccggccgtcgcctctttggctctttgcttagtggggggttggagacatggagtgtggtggtcagtggaggtgga

SEQ ID NO: 21905 - DNA, 1232 bp, Zea Mays
aaaaggtacgagaactaccaatctactacgagttatggccttagacgagggtgttctctgtgttgcacactcttaggctaacagataccgctgtacagaaaactcaaaccctccaaccctagccggaatcaacaccccgattcactcgctcaggccgctcgagcgttcctcctcctcctgggacgccagtgccgccgccacccaggcctccatcctcctcggcctcctcctcggacgccagtgccaccgccacccaggtctccatcctccccggacgccagcagccggcgccaagtcttcgcttccgtccagaataatccagatgcaaaagggttgtatggagtttcctttccttactatgatgaactttcaatggtatattccaaggacatggccacaggtgaaggtgcggaagacatgacagatgctgttcaaaacttggaagaagagttagttcgtgtaaatgctaatgatgaagaggatggagaggatatgacatctgtagagacaccaaggcgttctgttgactcaacatcatctagctccaagaagcggaagaaagagtggaaaggaaagaagacttcatcaagtgacccgcttcttgatgtgttcaatgaagtgagtggtgatctcaaggttgccaccatgtcaattggaaaaatggcgcaagctatggatcgtgaggcatccaaccaagagaaggcaagagatgaggatccacaacaaaagctaagagagaaggcgatcaatgaggtccggagacttgaatttactggctcagaagttatcaaagcagctggtgtgtttgttaggatgccagatcaaatggggatgttgtttgcacttccagaaccactgaggagggaatacattgtcgacatgctacgtgatgaagccgcaaggagagagagagagaggtcaaagtgaaggtgctggtctagatgttgaatgatggagctttggaagttgttgttggtttagttggtctcaatctgtttacctttagtgttcttcatatgttgttgttgaatgactgtgaatgatgataaaaactgaatttttatgatgttgaacgttgttgaatgttcacgaatggtattgactatggtattgtatctgtgggtagctttcaatgtggtttgttgaatgtcggtacctttcaatatggaaaaaactgaatttttatgagttttgaatgttgtttaatgttcacgaagggaatgatgttgaat

SEQ ID NO: 21906 - DNA, 985 bp, Zea Mays
aatctactacgagttatggccttagacgagggtgttctctgtgttgcacactcttaggctaacagaataatccagatgcaaaagggttgtatggagtttcctttccttactatgatgaactttcaatggtatattccaaggacatggccacaggtgaaggtgcggaagacatgacagatgctgttcaaaacttggaagaagagttagttcgtgtaaatgctaatgatgaagaggatggagaggatatgacatctgtagagacaccaaggcgttctgttgactcaacatcatctagctccaagaagcggaagaaagagtggaaaggaaagaagacttcatcaagtgacccgcttcttgatgtgttcaatgaagtgagtggtgatctcaaggttgccaccatgtcaattggaaaaatggcgcaagctatggatcgtgaggcatccaaccaagagaaggcaagagatgaggatccacaacaaaagctaagagagaaggcgatcaatgaggtccggagacttgaatttactggctcagaagttatcaaagcagctggtgtgtttgttaggatgccagatcaaatggggatgttgtttgcacttccagaaccactgaggagggaatacattgtcgacatgctacgtgatgaagccgcaaggagagagagagagaggtcaaagtgaaggtgctggtctagatgttgaatgatggagctttggaagttgttgttggtttagttggtctcaatctgtttacctttagtgttcttcatatgttgttgttgaatgactgtgaatgatgataaaaactgaatttttatgatgttgaacgttgttgaatgttcacgaatggtattgactatggtattgtatctgtgggtagctttcaatgtggtttgttgaatgtcggtacctttcaatatggaaaaaactgaatttttatgagttttgaatgttgtttaatgttcacgaagggaatgatgttgaat

SEQ ID NO: 21907 - DNA, 1244 bp, Zea Mays
atggatagaagaactttctttattttgtgtgagatgcttagagatgttggtgggctaaaggccacacgcaatatgaccatagaggagatagtggctcattttttgtatacattggctcatcatttgaagaaccgaacaattggaaggtttttctttcgaagcggcgagacagttagtagacagttcaacttatgccttctagctgttctaaagttgcaacatttgcttcttaagacccctgagccaattccagagaatagcactgataatacctggaaaaactttaagaattgtttgggtgcattagacggaaccgctatcaagaataatccagatgcaaaagggttgtatggagtttcctttccttactatgatgaactttcaatggtatattccaaggacatggccacaggtgaaggtgcggaagacatgacagatgctgttcaaaacttggaagaagagttagttcgtgtaaatgctaatgatgaagaggatggagaggatatgacatctgtagagacaccaaggcgttctgttgactcaacatcatctagctccaagaagcggaagaaagagtggaaaggaaagaagacttcatcaagtgacccgcttcttgatgtgttcaatgaagtgagtggtgatctcaaggttgccaccatgtcaattggaaaaatggcgcaagctatggatcgtgaggcatccaaccaagagaaggcaagagatgaggatccacaacaaaagctaagagagaaggcgatcaatgaggtccggagacttgaatttactggctcagaagttatcaaagcagctggtgtgtttgttaggatgccagatcaaatggggatgttgtttgcacttccagaaccactgaggagggaatacattgtcgacatgctacgtgatgaagccgcaaggagagagagagagaggtcaaagtgaaggtgctggtctagatgttgaatgatggagctttggaagttgttgttggtttagttggtctcaatctgtttacctttagtgttcttcatatgttgttgttgaatgactgtgaatgatgataaaaactgaatttttatgatgttgaacgttgttgaatgttcacgaatggtattgactatggtattgtatctgtgggtagctttcaatgtggtttgttgaatgtcggtacctttcaatatggaaaaaactgaatttttatgagttttgaatgttgtttaatgttcacgaagggaatgatgttgaat

SEQ ID NO: 21908 - DNA, 3820 bp, Zea Mays
tttagtcaatcgttatgaactctcttctaatcgctcacttcattggtcgtgttgtaccaagacatatttgtatggagtaaacaataacatcagttagccaaatcaaaaaatatattatacagagagtagagacaatcaataaaaaatcttaaattttttgatggatagtttacgcacggacaaccgattagtatgatatatataaaccgcatcaaagcacagacacgaccaactggacagtgatatgatgttgccaagaccaaaaacccacctaaacctctccggcgtctgtcttccacagtgggacacataaaccatgcgcggtcgcatggacctcctcccgcgcctcctcctccgccgccacgtccaccgccgcgccaaaccagcgtccccatcgccccctccccttccccccaacccgccgcgcccgccgcagaagcccgagcccgtctccatccacggggaaacgtggcacgacagctatgcttggatgggcgcgctctccgacgccgccgccatgcgccacatggacctacacatggaggctgaggagaagtacgccgaggcctgcctcgccgcttgcggcgctgaccgcctcgcccggaagctccagctcgagatggcctcctgccttgcctcggactcgtgcacgccgcccgtccgctggggcccttggctgtactaccgacgagcggacgagggcaagcaataccccgtgctctgccgccgctccgccgcgctccatagcgaattcgtctcgtacagtgacccctccgcaggtttcgacttcacggctgggaagcgcatcgagcagaaattggtggattacaacaaggaggccgagcggttcggaggatactcatatgaggagctgtctgaagtatctccagatcacaggttcattgcatacacaatcattggtttatattgttacaaatgaggaaagaagaccatataggttgttttgtagcatgattggatccaacaaggatgccattctcatgttggaagaacctgatgagaatatttttctaaatatcagacatacgaaggattttcgatatataacgttaaatgtcttttcagatactcactcaaaggtgtatttaataaatgcttctaatcccctttcccaaatgacgcttgtatgggaaggggaatcccaagttcattgcattgttgaacatcatcgtggtcacctttatttgtttacagatgctgcaagagaaggtgtccctgttgattcacattatataatgcagtctgttgtggaatcttctgggccaaacagttggaagaatgttttagttgaggaacctggtgtcattcttgaagatgttgatttttgtgatactcatatggtgctaactctgagacaaggcagaaaactcagactttgttcagttaaattgcctctaactgaagatatcaaagtacctactcatctatcagatttgcgtccaattgacctgcctctccccagtgatgtgtgtcagattgtatctgggccgaattatgattattattcctcaacaatgcgtttcacgatttcatcacctgtgatgcctgatgctgttgttgactacaacttgctgaacggacagtgcaaatagtccaacaacaaacatgcttcatgagcgaacaccgagcactatatggggcttcttttgctgcaaatatgggcaggcaatcctcagataaagcagatttttcaaatgatgattttgttggttgtgcttggaatgagctctctgaatactatgcttgtgaatactatgatgttccatcaaaagatggtgttttggttccattaactttagtatactcgcggaagcacaagcaagatggaaatccaggattacttcatggacatggtgcttacggtgaaattctggataaacgttggcgcagtgaattaaaaactctactggatcgtggttgggtgattgcatatgctgatgttaggggtggtggaggttatggtaagaagtggcaccaagatggttcacgtaccaaaaaaatgaattctgtatatgattttgtttcttgtggagaatttcttcttgaaaaggctatcatacaagaaaataagcttgctggatggggatatagtgctggaggacttctggtggcctcggcaattaattgtcgtccagatttgtttcgtgctgctgttttaaaggtccctttcttggatgtttgcaacacccttctccatcctattgtacctcttacagccattgattatgaagagtttgggtatcccgtggattatgaggaattccttgcaatcaggaagtattctccttatgataacatccagaaggatgttccttacccagctctgtttgtgacgtcatcattcaatacaaggtttggtgtatgggaggcagcaaaatgggttgcaaaagtccgtgaatttactcaatatgatccagagaggccggtaattctcaacctgacaacagatgttgtagaggagagcaagtatttgcagaccagagaattatcattggagaccgctttcctcattaaaatggtctgcagtgtgtgaacaacatgtgtcttattattctgaatcaaaccctgttggtcaaatatgggaagctgaggcaacaatgtcagtcctctccatcctaggcacctgagctatttaatcgattaattggagctttatgagcttttgcagaattcatgaagaatttgtatgtccatatttcctaaatcatgaggtatctccagatgacatggttttatgccactacttacaatagtggcttgtgcctagtggtattatgctcatttgtgagtgagtccagatatcccgtggaacaagtccacaaacatacggttatagagcctctacattatactgcaatgaaatgttgataccctccatgatagtaaaagttgcctttgtatttggaagcatccaacttaatactatttaatagtatccgagcatgcaccgctccagagtcagaacagaacacaaagccagcttcttgttacaattgtagggatcatcagttgtatgcaggaccatccgattcttactgatattttgtcagtatggggatatgttgcaaatgtaccgcagtcgtgtaagcacgatatgtttgaagattcggttggaaaatattcatcctatgcaagtgaatctatggtacagatacgactgctcaatgttttgatgctcatgtctttaagttgcaaattgaggttgacacattcctagggcactgctcagaacaggaggtcatttgaattccagattaccttcgttctttatatatgctggcttgcaccggatttgtagcatggcatcattgtgacatgacctcaatggctatcggcagcacctgttagttttgtaacatgattacacaagaaagtcgtagcacctgttagtttttcaacatgctaacgatcacgcttaaacaagaaaatcgtagagtttgagtctactgtacgtgggttttgcttggctgtaagttcatttgatcttttactgtcgcagtcttcagggtcaacgagcgtaacttgactacatgagcggcctcatctcacgtactggtttttggcttcttggtctgggcgggttagctgccagcatttgtcattgttcaaccgccgtcaaaaaaggtttaccgtcggtccatcgcgagaaccgaactgatggaattggaaccggcaggaacttggcccgaaactgttcatatttcgacaaaagagcatcttcaataggtcataaaaatatatcttctaatatctgactattgggagctttctaaaaatcttagtatcaaaaataaaatct

SEQ ID NO: 21909 - DNA, 4085 bp, Zea Mays
tttagtcaatcgttatgaactctcttctaatcgctcacttcattggtcgtgttgtaccaagacatatttgtatggagtaaacaataacatcagttagccaaatcaaaaaatatattatacagagagtagagacaatcaataaaaaatcttaaattttttgatggatagtttacgcacggacaaccgattagtatgatatatataaaccgcatcaaagcacagacacgaccaactggacagtgatatgatgttgccaagaccaaaaacccacctaaacctctccggcgtctgtcttccacagtgggacacataaaccatgcgcggtcgcatggacctcctcccgcgcctcctcctccgccgccacgtccaccgccgcgccaaaccagcgtccccatcgccccctccccttccccccaacccgccgcgcccgccgcagaagcccgagcccgtctccatccacggggaaacgtggcacgacagctatgcttggatgggcgcgctctccgacgccgccgccatgcgccacatggacctacacatggaggctgaggagaagtacgccgaggcctgcctcgccgcttgcggcgctgaccgcctcgcccggaagctccagctcgagatggcctcctgccttgcctcggactcgtgcacgccgcccgtccgctggggcccttggctgtactaccgacgagcggacgagggcaagcaataccccgtgctctgccgccgctccgccgcgctccatagcgaattcgtctcgtacagtgacccctccgcaggtttcgacttcacggctgggaagcgcatcgagcagaaattggtggattacaacaaggaggccgagcggttcggaggatactcatatgaggagctgtctgaagtatctccagatcacaggttcattgcatacacaatgtatgacaaagataaggactccttcactttaatggttagggacctagtaacaggcacacttcatgataaaccctgtgctgaccgggtgtcaaatatttcatgggctatggatgggaaagcattggtttatattgttacaaatgaggaaagaagaccatataggttgttttgtagcatgattggatccaacaaggatgccattctcatgttggaagaacctgatgagaatatttttctaaatatcagacatacgaaggattttcgatatataacgttaaatgtcttttcagatactcactcaaaggtgtatttaataaatgcttctaatcccctttcccaaatgacgcttgtatgggaaggggaatcccaagttcattgcattgttgaacatcatcgtggtcacctttatttgtttacagatgctgcaagagaaggtgtccctgttgattcacattatataatgcagtctgttgtggaatcttctgggccaaacagttggaaggttcaaattattcatctcctatgctatgttgatttttttctgaacccctgttttctacatatacaagtgcagtccctttgtgactactatacagaagcacttctcccaaaaatcatatacttttagcgaatacatacatgacatatgtaattaagaatgttttagttgaggaacctggtgtcattcttgaagatgttgatttttgtgatactcatatggtgctaactctgagacaaggcagaaaactcagactttgttcagttaaattgcctctaactgaagatatcaaagtacctactcatctatcagatttgcgtccaattgacctgcctctccccagtgatgtgtgtcagattgtatctgggccgaattatgattattattcctcaacaatgcgtttcacgatttcatcacctgtgatgcctgatgctgttgttgactacaacttgctgaacggacagtgcaaatagtccaacaacaaacatgcttcatgagcgaacaccgagcactatatggggcttcttttgctgcaaatatgggcaggcaatcctcagataaagcagatttttcaaatgatgattttgttggttgtgcttggaatgagctctctgaatactatgcttgtgaatactatgatgttccatcaaaagatggtgttttggttccattaactttagtatactcgcggaagcacaagcaagatggaaatccaggattacttcatggacatggtgcttacggtgaaattctggataaacgttggcgcagtgaattaaaaactctactggatcgtggttgggtgattgcatatgctgatgttaggggtggtggaggttatggtaagaagtggcaccaagatggttcacgtaccaaaaaaatgaattctgtatatgattttgtttcttgtggagaatttcttcttgaaaaggctatcatacaagaaaataagcttgctggatggggatatagtgctggaggacttctggtggcctcggcaattaattgtcgtccagatttgtttcgtgctgctgttttaaaggtccctttcttggatgtttgcaacacccttctccatcctattgtacctcttacagccattgattatgaagagtttgggtatcccgtggattatgaggaattccttgcaatcaggaagtattctccttatgataacatccagaaggatgttccttacccagctctgtttgtgacgtcatcattcaatacaaggtttggtgtatgggaggcagcaaaatgggttgcaaaagtccgtgaatttactcaatatgatccagagaggccggtaattctcaacctgacaacagatgttgtagaggagagcaagtatttgcagaccagagaattatcattggagaccgctttcctcattaaaatggtctgcagtgtgtgaacaacatgtgtcttattattctgaatcaaaccctgttggtcaaatatgggaagctgaggcaacaatgtcagtcctctccatcctaggcacctgagctatttaatcgattaattggagctttatgagaattcatgaagaatttgtatgtccatatttcctaaatcatgaggtatctccagatgacatggttttatgccactacttacaatagtggcttgtgcctagtggtattatgctcatttgtgagtgagtccagatatcccgtggaacaagtccacaaacatacggttatagagcctctacattatactgcaatgaaatgttgataccctccatgatagtaaaagttgcctttgtatttggaagcatccaacttaatactatttaatagtatccgagcatgcaccgctccagagtcagaacagaacacaaagccagcttcttgttacaattgtagggatcatcagttgtatgcaggaccatccgattcttactgatattttgtcagtatggggatatgttgcaaatgtaccgcagtcgtgtaagcacgatatgtttgaagattcggttggaaaatattcatcctatgcaagtgaatctatggtacagatacgactgctcaatgttttgatgctcatgtctttaagttgcaaattgaggttgacacattcctagggcactgctcagaacaggaggtcatttgaattccagattaccttcgttctttatatatgctggcttgcaccggatttgtagcatggcatcattgtgacatgacctcaatggctatcggcagcacctgttagttttgtaacatgattacacaagaaagtcgtagcacctgttagtttttcaacatgctaacgatcacgcttaaacaagaaaatcgtagagtttgagtctactgtacgtgggttttgcttggctgtaagttcatttgatcttttactgtcgcagtcttcagggtcaacgagcgtaacttgactacatgagcggcctcatctcacgtactggtttttggcttcttggtctgggcgggttagctgccagcatttgtcattgttcaaccgccgtcaaaaaaggtttaccgtcggtccatcgcgagaaccgaactgatggaattggaaccggcaggaacttggcccgaaactgttcatatttcgacaaaagagcatcttcaataggtcataaaaatatatcttctaatatctgactattgggagctttctaaaaatcttagtatcaaaaataaaatct

SEQ ID NO: 21910 - DNA, 3693 bp, Zea Mays
tttagtcaatcgttatgaactctcttctaatcgctcacttcattggtcgtgttgtaccaagacatatttgtatggagtaaacaataacatcagttagccaaatcaaaaaatatattatacagagagtagagacaatcaataaaaaatcttaaattttttgatggatagtttacgcacggacaaccgattagtatgatatatataaaccgcatcaaagcacagacacgaccaactggacagtgatatgatgttgccaagaccaaaaacccacctaaacctctccggcgtctgtcttccacagtgggacacataaaccatgcgcggtcgcatggacctcctcccgcgcctcctcctccgccgccacgtccaccgccgcgccaaaccagcgtccccatcgccccctccccttccccccaacccgccgcgcccgccgcagaagcccgagcccgtctccatccacggggaaacgtggcacgacagctatgcttggatgggcgcgctctccgacgccgccgccatgcgccacatggacctacacatggaggctgaggagaagtacgccgaggcctgcctcgccgcttgcggcgctgaccgcctcgcccggaagctccagctcgagatggcctcctgccttgcctcggactcgtgcacgccgcccgtccgctggggcccttggctgtactaccgacgagcggacgagggcaagcaataccccgtgctctgccgccgctccgccgcgctccatagcgaattcgtctcgtacagtgacccctccgcaggtttcgacttcacggctgggaagcgcatcgagcagaaattggtggattacaacaaggaggccgagcggttcggaggatactcatatgaggagctgtctgaagtatctccagatcacaggttcattgcatacacaatacatacgaaggattttcgatatataacgttaaatgtcttttcagatactcactcaaaggtgtatttaataaatgcttctaatcccctttcccaaatgacgcttgtatgggaaggggaatcccaagttcattgcattgttgaacatcatcgtggtcacctttatttgtttacagatgctgcaagagaaggtgtccctgttgattcacattatataatgcagtctgttgtggaatcttctgggccaaacagttggaagaatgttttagttgaggaacctggtgtcattcttgaagatgttgatttttgtgatactcatatggtgctaactctgagacaaggcagaaaactcagactttgttcagttaaattgcctctaactgaagatatcaaagtacctactcatctatcagatttgcgtccaattgacctgcctctccccagtgatgtgtgtcagattgtatctgggccgaattatgattattattcctcaacaatgcgtttcacgatttcatcacctgtgatgcctgatgctgttgttgactacaacttgctgaacggacagtgcaaatagtccaacaacaaacatgcttcatgagcgaacaccgagcactatatggggcttcttttgctgcaaatatgggcaggcaatcctcagataaagcagatttttcaaatgatgattttgttggttgtgcttggaatgagctctctgaatactatgcttgtgaatactatgatgttccatcaaaagatggtgttttggttccattaactttagtatactcgcggaagcacaagcaagatggaaatccaggattacttcatggacatggtgcttacggtgaaattctggataaacgttggcgcagtgaattaaaaactctactggatcgtggttgggtgattgcatatgctgatgttaggggtggtggaggttatggtaagaagtggcaccaagatggttcacgtaccaaaaaaatgaattctgtatatgattttgtttcttgtggagaatttcttcttgaaaaggctatcatacaagaaaataagcttgctggatggggatatagtgctggaggacttctggtggcctcggcaattaattgtcgtccagatttgtttcgtgctgctgttttaaaggtccctttcttggatgtttgcaacacccttctccatcctattgtacctcttacagccattgattatgaagagtttgggtatcccgtggattatgaggaattccttgcaatcaggaagtattctccttatgataacatccagaaggatgttccttacccagctctgtttgtgacgtcatcattcaatacaaggtttggtgtatgggaggcagcaaaatgggttgcaaaagtccgtgaatttactcaatatgatccagagaggccggtaattctcaacctgacaacagatgttgtagaggagagcaagtatttgcagaccagagaattatcattggagaccgctttcctcattaaaatggtctgcagtgtgtgaacaacatgtgtcttattattctgaatcaaaccctgttggtcaaatatgggaagctgaggcaacaatgtcagtcctctccatcctaggcacctgagctatttaatcgattaattggagctttatgagcttttgcagaattcatgaagaatttgtatgtccatatttcctaaatcatgaggtatctccagatgacatggttttatgccactacttacaatagtggcttgtgcctagtggtattatgctcatttgtgagtgagtccagatatcccgtggaacaagtccacaaacatacggttatagagcctctacattatactgcaatgaaatgttgataccctccatgatagtaaaagttgcctttgtatttggaagcatccaacttaatactatttaatagtatccgagcatgcaccgctccagagtcagaacagaacacaaagccagcttcttgttacaattgtagggatcatcagttgtatgcaggaccatccgattcttactgatattttgtcagtatggggatatgttgcaaatgtaccgcagtcgtgtaagcacgatatgtttgaagattcggttggaaaatattcatcctatgcaagtgaatctatggtacagatacgactgctcaatgttttgatgctcatgtctttaagttgcaaattgaggttgacacattcctagggcactgctcagaacaggaggtcatttgaattccagattaccttcgttctttatatatgctggcttgcaccggatttgtagcatggcatcattgtgacatgacctcaatggctatcggcagcacctgttagttttgtaacatgattacacaagaaagtcgtagcacctgttagtttttcaacatgctaacgatcacgcttaaacaagaaaatcgtagagtttgagtctactgtacgtgggttttgcttggctgtaagttcatttgatcttttactgtcgcagtcttcagggtcaacgagcgtaacttgactacatgagcggcctcatctcacgtactggtttttggcttcttggtctgggcgggttagctgccagcatttgtcattgttcaaccgccgtcaaaaaaggtttaccgtcggtccatcgcgagaaccgaactgatggaattggaaccggcaggaacttggcccgaaactgttcatatttcgacaaaagagcatcttcaataggtcataaaaatatatcttctaatatctgactattgggagctttctaaaaatcttagtatcaaaaataaaatct

SEQ ID NO: 21911 - DNA, 1910 bp, Zea Mays
ggaatttcgaaccggtaaaatagcagatcgccctcccactccagtcctcccggttttctagggtttaaagagcttgccgagcccgccgtgcgccggccggcacatctccactactttccgccatcgccggagccgaccccttcgtctccgcacgcggcaatggcattctccttcgcctcgccggctgcgtcgaaccctttccagacgccggcgacgccgaatccctttcaaacaccggctccggccacctcgcaggcgccatccctatcgccttcgccgttccagttcagcttccagcagcagccgcagccacagcagcaggtggcgccggcggcgcaacctccgcagccgcagccgcagccgcagccgcagaagctgatgctgtacacgacagatatgaaatctgcgggatacagcaccaagtgggaggagctgcacgccgagtcgcagaaggccttactccagatcgaggacaagatacgggactacaaagacgagtgtgagaggttggaccagtgcagtcgcctttatgactcctcaatctcaaatgccaattttgagcttgatgcgagtcgcattgctcaggaacttggagggaccaccactgtaatggagagagagaaggcttccattcaagagttgatgaatgttgtcaatgaaatgatgtggaacacagaatttggtattaggtcatatctgatgttgaggccaagattcacccgtccaagtgctggagttgcaaatggcggttcttcaaatccttctgctggtgctccacccaatcagccagtggtagatttctacagtggagtcccaaagcgtccttccatttttatgcagcgcactgtcaacaagtttgagtgctatcttgcggagtgttgcaagtggatcggggagctagagcagcttgttcaaatggagacaaataaaagatcatcagattctctagaatctcttccaaaagttatgtcaaatgtgcatgattacttcatctatgttgcttctaaggtggaaaatcttcatcaacatgtcgaatcaatgaaaactgaatatctcaatgaacaacgccgcaccggcaacgggagcgatccatttctggaggcaaacagacgagaagcagctaaacaagaagcagctgccagaagggtccatccaacactgcatctgcctacccctgcgcagcccacggcacagatcgctgcaccagctacaagccaaccgcagcaaccttcctttccgtccgctgcgacttcctcaagcgccttctcaacctttagcactccggcttccgctccatcctcgtctagtctgtttgcaactccaacaactccagctccatcgggcaacctttttggtgcgccaggatcggctcagttgaccacaccatttgggacaccttccactcctacgttagcatcgacgccagctcctggatttgggactagcgctacatctaatttgggtggagctacagcttcaggttccagctttggtggtgcatccaaaggaaggtcgaagccccggggacgacgctagatgtaaatggaccaacgtgaaacgaggatgctcctggttcacttgactgctcccctttccctctatcctatgcaaaatttgtgactacttgtcgccagcaattctagtggagttttaagtgacctattgcatgactactacctttaagcctttgtatcagatataccatcgcattagttgtcataaacttttaatctttgtgccccttcacagtctcttgcctgggtgtcagggtgtgctgtcacaacatagggctgaacaaatctagagttagaacatgccagctggaattccagtttcttctttgaacatgagcgttagcagctcgttccttggtagacaatctcgttctttaatgcacgtatttgatcgtc

SEQ ID NO: 21912 - DNA, 1419 bp, Zea Mays
ctcgaacccgggatggcccagcagaccgcttctttggcatgtccggctcaccagttgcaccgaacttggagggaccaccactgtaatggagagagagaaggcttccattcaagagttgatgaatgttgtcaatgaaatgatgtggaacacagaatttggtattaggtcatatctgatgttgaggccaagattcacccgtccaagtgctggagttgcaaatggcggttcttcaaatccttctgctggtgctccacccaatcagccagtggtagatttctacagtggagtcccaaagcgtccttccatttttatgcagcgcactgtcaacaagtttgagtgctatcttgcggagtgttgcaagtggatcggggagctagagcagcttgttcaaatggagacaaataaaagatcatcagattctctagaatctcttccaaaagttatgtcaaatgtgcatgattacttcatctatgttgcttctaaggtggaaaatcttcatcaacatgtcgaatcaatgaaaactgaatatctcaatgaacaacgccgcaccggcaacgggagcgatccatttctggaggcaaacagacgagaagcagctaaacaagaagcagctgccagaagggtccatccaacactgcatctgcctacccctgcgcagcccacggcacagatcgctgcaccagctacaagccaaccgcagcaaccttcctttccgtccgctgcgacttcctcaagcgccttctcaacctttagcactccggcttccgctccatcctcgtctagtctgtttgcaactccaacaactccagctccatcgggcaacctttttggtgcgccaggatcggctcagttgaccacaccatttgggacaccttccactcctacgttagcatcgacgccagctcctggatttgggactagcgctacatctaatttgggtgggacatctctattttctacaccgtttggaggtggagctacagcttcaggttccagctttggtggtgcatccaaaggaaggtcgaagccccggggacgacgctagatgtaaatggaccaacgtgaaacgaggatgctcctggttcacttgactgctcccctttccctctatcctatgcaaaatttgtgactacttgtcgccagcaattctagtggagttttaagtgacctattgcatgactactacctttaagcctttgtatcagatataccatcgcattagttgtcataaacttttaatctttgtgccccttcacagtctcttgcctgggtgtcagggtgtgctgtcacaacatagggctgaacaaatctagagttagaacatgccagctggaattccagtttcttctttgaacatgagcgttagcagctcgttccttggtagacaatctcgttctttaatgcacgtatttgatcgtc

SEQ ID NO: 21913 - DNA, 873 bp, Zea Mays
gtcagattttacagagtcacttgtacttgtttccttgttaggaggcgaacatcttacaggtaaaatctgatgtgccacaaatgaggacaaggtaggacttcttcacttttgaaccatcagaagaaaggcatgctcacaagcatagacatcgaatctataggattgttcaaactccattgttacatggtaactgaatatgaggccagtcaaccaatccaccagcaaaaccagcacgcatggcaaagagtgaagctctggctttttgtggcatatgtcgtttcttttgtctgtttagctggatccgtgggtttattggtgcaagatgcactgacgaacaagggcccttctgtctggactggtgttgctggcgttctgcaatgtgttcttgtgttgataagcggcctggtgtattggacatgccactcagaagattaagggcgtaatgtcatgagcagacttgcaaggttggtcacagttgtgtgaaggaaattatttctggcaacatatgattttgtgtgatggaaatgacggacactgttcactgctgaatgggatgactagatgtttcatctgtgcatatctgacttttggaaaatgatgtttcttaacaccggtgcatgtgttagccccagcttcttgtgagttgccaatctgtgatgcggtcgtgatcatgcaaatcttttggctaaagctgaaaccggctgcagcaacaagctagtgctactatttacaccatgcctcctagtcaattacagttgacttcatttaagtcgagacgctgtctcggcctgtttcatcgttactccaccgtcccacatatatgaccgtaaccactttttgttttagttccataatataagaagtgttcttcct

SEQ ID NO: 21914 - DNA, 649 bp, Zea Mays
taggaggcgaacatcttacagagtgaagctctggctttttgtggcatatgtcgtttcttttgtctgtttagctggatccgtgggtttattggtgcaagatgcactgacgaacaagggcccttctgtctggactggtgttgctggcgttctgcaatgtgttcttgtgttgataagcggcctggtgtattggacatgccactcagaagattaagggcgtaatgtcatgagcagacttgcaaggttggtcacagttgtgtgaaggaaattatttctggcaacatatgattttgtgtgatggaaatgacggacactgttcactgctgaatgggatgactagatgtttcatctgtgcatatctgacttttggaaaatgatgtttcttaacaccggtgcatgtgttagccccagcttcttgtgagttgccaatctgtgatgcggtcgtgatcatgcaaatcttttggctaaagctgaaaccggctgcagcaacaagctagtgctactatttacaccatgcctcctagtcaattacagttgacttcatttaagtcgagacgctgtctcggcctgtttcatcgttactccaccgtcccacatatatgaccgtaaccactttttgttttagttccataatataagaagtgttcttcct

SEQ ID NO: 21915 - DNA, 2047 bp, Zea Mays
atggcgcggcggaggcgcgacccggtcgcggtggcggcgcggcccgggcagtttttggatgagatcacggcatcacgcacgcagcgcctcatatcgaacgcaagcactgcattcgcaataatgtcgccgtcccgggcgaagcgcaaggtggcacagatcagggagcaagccctctcggcggcggtcggcgacgtggtcgcgcggaccatgtccgcggtggcgggcaggtacgacgcgcacgcgagcgtggacgaccagctggagcgcctcgccacgctgctcgtcatggtgcacagcgccgtggacgaggccgagcgcgtgcacgtcgccaactggtggctccgccgctggctgtggaggctccgctacgccgcgctggacggcgacgaggtgctgctgtccatgaggcagcagcgagcggccgaggcggcggaggcgaccgcgatgacccagagtgcgggcggcaggctctggaacgccgcgacgcgcgtcgtcgtccggtccgcgaagagcctgctcgtgtcgtccaggagcggaggcaggggcggagggcccaatatggctcagtattgcttgagcaataccttgggctggcccactaagagagtaggtcatccgtctcagcctccaccgtaagcgccgtccccacgtcccgcactcccgccggccgcagtcccgctcctgccggcgcgctgcagcagctcggctgctcgcggtcgcaggccgcagcttgtcccgcccggcgcggcggcgcccaggctgaggctgctcgcgcgacattcctgctaggatccgaactaggatcgaggtggccgtgctcaacttcctcgccgcgctagcctccccttccttgccggccatctccgtcctccccctggaatttggtccctagccaattatcacgattcgtcatcagttattgcaagctgtatgatttctagttcagataaccttggtgaaatgtattgcgagcagtatggttagcactgaacaacccagtgtgttacagttcggagctctgccaattgcagtcagcacagtgggttgctaaacgacgcctcgtcgatttatctctcacacaccttctgcaagaggtcactgacacaatttttatctctcaactgaagcaacacctaacttttttggcgtcctccgccactgagcggaggcgacgtggatcggttgaggcgcacggtggagaggttggagcaggcttgcgccgggctaggcgacttcctcaagctgctcgagctggatatcatgaggtcgcaggcgccgccgccggcggcggctgcggctgctgctgctgctccagaaacacgcggctgcagccacgacggcgacccagtggaggatttcgtctccgacaccagcagccagccggacacaagcctcgacgacggatcagaatccgagcatgacgatgacctgagtacctgacctacattttgcgcgagcacatttcgaagcggactacattggctgcacggcagcgatcggcctgcagatcgtgacgcgaaagatccagcgagcggcgggcaagttgaggacgatgccgccagcccctgtgcctggcactgacattaacatcggtgattgcccggcaccagaacctgcagacacggcctggctgcgcgggatggtggccgacatccgcgaggccgtaagactcggcgacaggacggaggtcaacgccgagcgcaggtggctggcggagtggcgccgcgagctgcaggctgtggcggacagagctgaccgcgtgctgcttgcgtcgccgtcacctgtggcatccctgggtgctggaggagacgatgaggtggcgaggatggtgcggagtttggaaacagcggcagcacacctgagggcctacgtcacgctgctcaggtttgctgtcgtggttgttgaaagtagataggattttactagtgctaagaattttttaagtttgctagctgccaacatactctgcgttacaatgggatataaaattttgttttatgatgtttacaccgttaataataagctagcaatttatgttggatcctta

SEQ ID NO: 21916 - DNA, 1770 bp, Zea Mays
atggcgcggcggaggcgcgacccggtcgcggtggcggcgcggcccgggcagtttttggatgagatcacggcatcacgcacgcagcgcctcatatcgaacgcaagcactgcattcgcaataatgtcgccgtcccgggcgaagcgcaaggtggcacagatcagggagcaagccctctcggcggcggtcggcgacgtggtcgcgcggaccatgtccgcggtggcgggcaggtacgacgcgcacgcgagcgtggacgaccagctggagcgcctcgccacgctgctcgtcatggtgcacagcgccgtggacgaggccgagcgcgtgcacgtcgccaactggtggctccgccgctggctgtggaggctccgctacgccgcgctggacggcgacgaggtgctgctgtccatgaggcagcagcgagcggccgaggcggcggaggcgaccgcgatgacccagagtgcgggcggcaggctctggaacgccgcgacgcgcgtcgtcgtccggtccgcgaagagcctgctcgtgtcgtccaggagcggaggcaggggcggagggcccaatatggctcagtattgcttgagcaataccttgggctggcccactaagagagtaggtcatccgtctcagcctccaccgtaagcgccgtccccacgtcccgcactcccgccggccgcagtcccgctcctgccggcgcgctgcagcagctcggctgctcgcggtcgcaggccgcagcttgtcccgcccggcgcggcggcgcccaggctgaggctgctcgcgcgacattcctgctaggatccgaactaggatcgaggtggccgtgctcaacttcctcgccgcgctagcctccccttccttgccggccatctccgtcctccccctgattagtcggagctctgccaattgcagtcagcacagtgggttgctaaacgacgcctcgtcgatttatctctcacacaccttctgcaagaggtcactgacacaatttttatctctcaactgaagcaacacctaacttttttggcgtcctccgccactgagcggaggcgacgtggatcggttgaggcgcacggtggagaggttggagcaggcttgcgccgggctaggcgacttcctcaagctgctcgagctggatatcatgaggtcgcaggcgccgccgccggcggcggctgcggctgctgctgctgctccagaaacacgcggctgcagccacgacggcgacccagtggaggatttcgtctccgacaccagcagccagccggacacaagcctcgacgacggatcagaatccgagcatgacgatgacctgagtacctgacctacattttgcgcgagcacatttcgaagcggactacattggctgcacggcagcgatcggcctgcagatcgtgacgcgaaagatccagcgagcggcgggcaagttgaggacgatgccgccagcccctgtgcctggcactgacattaacatcggtgattgcccggcaccagaacctgcagacacggcctggctgcgcgggatggtggccgacatccgcgaggccgtaagactcggcgacaggacggaggtcaacgccgagcgcaggtggctggcggagtggcgccgcgagctgcaggctgtggcggacagagctgaccgcgtgctgcttgcgtcgccgtcacctgtggcatccctgggtgctggaggagacgatgaggtggcgaggatggtgcggagtttggaaacagcggcagcacacctgagggcctacgtcacgctgctcagaaataactacatgc

SEQ ID NO: 21917 - DNA, 1040 bp, Zea Mays
cgcgggccgaacaaccccagactgggccggccggccggccgtcgcattttccttccttttgggaaaatccttccgcacgaccccgcgttccgccttcgtttctctgcctctcgcctagtgtcgcggtccgacgaccggtgtcgccgccgtcgccgccgccgccgctctaacgccaggtgctgaggccttcgccagcctctttgccggcgacgaaaacccaccagaaaagaagcctctgaggacccagatgcaatagagcttatgtgtcccctatgccgtggcgaggtcaagggatataccttggttgagcctgctcggaagcagctgaatcgcaagaggaggagctgcatggaagacggctgttcgtacatgggcacatacagagagctctgcaagcatgtccaaaagaagcaccctactgcaaacccacgagctgtggaccccttgcatgcttacagatggaagcggcttctatttcgaagttcattgcatgatatgatttgttcaactacttcagaggctatgcgaaggttttgttctcacatgctgcagattgaagaggttgtggctgctttgcgagagggtggtgatcatcgtggcgctaccaatgacgatcaactgatccatgatctcttgacctctcgctgaaatgtgagaacctgtgttgatcctgcaggcaatctttgcatgaatccccaacttggcacccctgccgattcacattttctgacccgacaaagcaaactagtcttcatctgtcctcaatgaaacagactgttaaagctttgatggatttattcattcacagtgataatggctggttgaatggcacggggctttttttcgtactcatctagcctctagtgtgtcatgcgatgcactgttcctgtgcaccctcccactgtatgactatgacataactgtttcttatggaacgcaatgtgttcctgttcataaaacgaaatcttgcccccttttttctgcatttaaatgggctcgtttggtttcctccccggcgaagctgcctggctcatgcagcg

SEQ ID NO: 21918 - DNA, 1155 bp, Zea Mays
ggaaaatccttccgcacgaccccgcgttccgccttcgtttctctgcctctcgcctagtgtcgcggtccgacgaccggtgtcgccgccgtcgccgccgccgccgctctaacgccaggtgctgaggccttcgccagcctctttgccggcgacgaaaacccaccagtcctttcaggatgaccaagtatacgaggaacaaaaaaagttcatcttctcacagtagttccagattcaaaagagtttccagaaaggagatgtcatttgcagtggagaaatacgcatggacaaatgcaacttgtccagtatgcatggaattcccacacagcgctgttcttctactctaaaagaagcctctgaggacccagatgcaatagagcttatgtgtcccctatgccgtggcgaggtcaagggatataccttggttgagcctgctcggaagcagctgaatcgcaagaggaggagctgcatggaagacggctgttcgtacatgggcacatacagagagctctgcaagcatgtccaaaagaagcaccctactgcaaacccacgagctgtggaccccttgcatgcttacagatggaagcggcttctatttcgaagttcattgcatgatatgatttgttcaactacttcagaggctatgcgaaggttttgttctcacatgctgcagattgaagaggttgtggctgctttgcgagagggtggtgatcatcgtggcgctaccaatgacgatcaactgatccatgatctcttgacctctcgctgaaatgtgagaacctgtgttgatcctgcaggcaatctttgcatgaatccccaacttggcacccctgccgattcacattttctgacccgacaaagcaaactagtcttcatctgtcctcaatgaaacagactgttaaagctttgatggatttattcattcacagtgataatggctggttgaatggcacggggctttttttcgtactcatctagcctctagtgtgtcatgcgatgcactgttcctgtgcaccctcccactgtatgactatgacataactgtttcttatggaacgcaatgtgttcctgttcataaaacgaaatcttgcccccttttttctgcatttaaatgggctcgtttggtttcctccccggcgaagctgcctggctcatgcagcg

SEQ ID NO: 21919 - DNA, 1862 bp, Zea Mays
gaccccgcgttccgccttcgtttctctgcctctcgcctagtgtcgcggtccgacgaccggtgtcgccgccgtcgccgccgccgccgctctaacgccaggtgctgaggccttcgccagcctctttgccggcgacgaaaacccaccaggtattcccacccgttctcttcccttcctgctgtgcgaaaccgagcacccaaaccctaacctaaggctatttggctatttgatgcctcctaacttcgaacttcttggttcttgcaaaacttatcggctgttcatcgatgtcccttggctgggtccagccctggtgcacacgatgcctggcttcctgttctgatagttagtataaagaagattttagaaatatcagacacaatattccacatgggcacatatgcctgtgtgatgggatttggtttgacagttttactatgtatcagtatcaccgctgatggttgatacatatgtttttgcatgtttcatgtaaaattcgtgtttctgcaatcacgccgaagttcttttaagtttctctgttattttgagttgttagtctctacttctttacaagtcgcaggacatttgagtagaggtccaatttaggcgcagtcacatggtgagaatgtgttggaattactgtaccttaaatttgttctgtttgaaatgccatttttccagtagcaaccataaatatccaagttgtccattgctatggggtttctaggaatataaaaaatggaccttcccaatctctgtggtgaaaataattatgcgtctctggtatatgcatgccaaatacatctgatttcctctgaagcagttcccgaaccaaaacaagaggttcgaagttggcagtaacagtgcccactgagtttctgatcaaaaccaggcatttctgtaacttatcttacagtcctttcaggatgaccaagtatacgaggaacaaaaaaagttcatcttctcacagtagttccagattcaaaagagtttccagaaaggagatgtcatttgcagtggagaaatacgcatggacaaatgcaacttgtccaaaaagaagcctctgaggacccagatgcaatagagcttatgtgtcccctatgccgtggcgaggtcaagggatataccttggttgagcctgctcggaagcagctgaatcgcaagaggaggagctgcatggaagacggctgttcgtacatgggcacatacagagagctctgcaagcatgtccaaaagaagcaccctactgcaaacccacgagctgtggaccccttgcatgcttacagatggaagcggcttctatttcgaagttcattgcatgatatgatttgttcaactacttcagaggctatgcgaaggttttgttctcacatgctgcagattgaagaggttgtggctgctttgcgagagggtggtgatcatcgtggcgctaccaatgacgatcaactgatccatgatctcttgacctctcgctgaaatgtgagaacctgtgttgatcctgcaggcaatctttgcatgaatccccaacttggcacccctgccgattcacattttctgacccgacaaagcaaactagtcttcatctgtcctcaatgaaacagactgttaaagctttgatggatttattcattcacagtgataatggctggttgaatggcacggggctttttttcgtactcatctagcctctagtgtgtcatgcgatgcactgttcctgtgcaccctcccactgtatgactatgacataactgtttcttatggaacgcaatgtgttcctgttcataaaacgaaatcttgcccccttttttctgcatttaaatgggctcgtttggtttcctccccggcgaagctgcctggctcatgcagcg

SEQ ID NO: 21920 - DNA, 1902 bp, Zea Mays
gaccccgcgttccgccttcgtttctctgcctctcgcctagtgtcgcggtccgacgaccggtgtcgccgccgtcgccgccgccgccgctctaacgccaggtgctgaggccttcgccagcctctttgccggcgacgaaaacccaccaggtattcccacccgttctcttcccttcctgctgtgcgaaaccgagcacccaaaccctaacctaaggctatttggctatttgatgcctcctaacttcgaacttcttggttcttgcaaaacttatcggctgttcatcgatgtcccttggctgggtccagccctggtgcacacgatgcctggcttcctgttctgatagttagtataaagaagattttagaaatatcagacacaatattccacatgggcacatatgcctgtgtgatgggatttggtttgacagttttactatgtatcagtatcaccgctgatggttgatacatatgtttttgcatgtttcatgtaaaattcgtgtttctgcaatcacgccgaagttcttttaagtttctctgttattttgagttgttagtctctacttctttacaagtcgcaggacatttgagtagaggtccaatttaggcgcagtcacatggtgagaatgtgttggaattactgtaccttaaatttgttctgtttgaaatgccatttttccagtagcaaccataaatatccaagttgtccattgctatggggtttctaggaatataaaaaatggaccttcccaatctctgtggtgaaaataattatgcgtctctggtatatgcatgccaaatacatctgatttcctctgaagcagttcccgaaccaaaacaagaggttcgaagttggcagtaacagtgcccactgagtttctgatcaaaaccaggcatttctgtaacttatcttacagtcctttcaggatgaccaagtatacgaggaacaaaaaaagttcatcttctcacagtagttccagattcaaaagagtttccagaaaggagatgtcatttgcagtggagaaatacgcatggacaaatgcaacttgtccagtatgcatggaattcccacacagcgctgttcttctactctaaaagaagcctctgaggacccagatgcaatagagcttatgtgtcccctatgccgtggcgaggtcaagggatataccttggttgagcctgctcggaagcagctgaatcgcaagaggaggagctgcatggaagacggctgttcgtacatgggcacatacagagagctctgcaagcatgtccaaaagaagcaccctactgcaaacccacgagctgtggaccccttgcatgcttacagatggaagcggcttctatttcgaagttcattgcatgatatgatttgttcaactacttcagaggctatgcgaaggttttgttctcacatgctgcagattgaagaggttgtggctgctttgcgagagggtggtgatcatcgtggcgctaccaatgacgatcaactgatccatgatctcttgacctctcgctgaaatgtgagaacctgtgttgatcctgcaggcaatctttgcatgaatccccaacttggcacccctgccgattcacattttctgacccgacaaagcaaactagtcttcatctgtcctcaatgaaacagactgttaaagctttgatggatttattcattcacagtgataatggctggttgaatggcacggggctttttttcgtactcatctagcctctagtgtgtcatgcgatgcactgttcctgtgcaccctcccactgtatgactatgacataactgtttcttatggaacgcaatgtgttcctgttcataaaacgaaatcttgcccccttttttctgcatttaaatgggctcgtttggtttcctccccggcgaagctgcctggctcatgcagcg

SEQ ID NO: 21921 - DNA, 71 bp, Zea Mays
gttggggctcagcttgggggagaccatggcggattccgggagcgacctcgtgcttgggcttgggatggggg

SEQ ID NO: 21922 - DNA, 2396 bp, Zea Mays
atggcggtatggcctgtcctagcctctcactcagcctttggccgggttcgtgcgcctgacacagacacagatctggagacagatgggttggctacttcctcctccagtgcctttgccgagcggcaggacgacgaagcggaggagttgctgtgcggggtgaaggaagaggagtcggctcaggtacaagaaccggccaagaatccggcaggacgtcccaccccactaccccaggaaggggtcgaaacagcggccggccccggccttacttgacctcggcagcactgggttaattccacggagccacgttttctacaagtttcgtgattggtggtgtggggttgatgaacaaaggacttgaagcattactcatccggtcagacgtgtttcgtagaccttgacgctgagctatcggagttgggtttccaaaaaaaggtggagctctgagagagttccgcattcttctaaaggaagtaggagatacccaggaagcagcatggcattttcttacagcaatgggaggacattgccctcgaaatgggaggatgcagagaggtggatcttcagtcccaattccagcgacatgcgtggaagaactacggttgctcatggtcggaggccaaagtctaaaagtggccccctggggcctccaggaagacttggtggacagtattcatctgtttcttcggtgtcattgcttgatagtgagagagttggacctattacatcaaattctcatttttcagcaggagtactaatgccaggacatgtttgtggaggaaaaaatacaaatggggcctattcaggtagaccaattggtgacgaaatcaacattggagaaggagtcagaatttgtccactgaatggtgggtctcatcctattcgaactcccagagttcgcaagcgattagattctgcagtcgaatcatctgcttcattgcctagcacacaagaatctatccaagacgagcaggttgaaatcacagaagattcagcttcaactattgcctgtataatttccaggaaagatgttgcaacacagaccagcccagagctaagtaggtcctcttcacccaacaatagaccaacatttaatcgttccctgtcgacggaacaaatgaaagagagggggagctgtttctcagatcttgatatcagggatgttcagatggatgatcgagtgactctgactaggtggtcaaagcaaaatgtaacacggttgcctaacaagaattcaacaaacataatagagtggaaggaaaaagctgtggaatcaaaatctttgtcctggggctttgccgaagcgaagtgcatatccaagattggtagagaggacacaaaaattactgcatgggaaagtattcaaaaagcaaaagctgaggcagcaattcagaagttaatgattaagatggagaagaaaggatcatcttcgctggataagattttgaacaccctcaagtctgctcagagaaaagcccaggtgatgcttgagcatgagcttgatgcagtaacagcaaaccaagatggaaaaggctctaggaaggcaaaaaagggagcacagcgtagcaagaatggccaaatcagttccctgagtggctgcttcacttgccatgctttttgatacatgtaattccaaaactgagaatcaggatctgagaaattccttcgtactgcctacatcaccgtcatgttctccacatcgaaatctaggtgaacttcagatatctatcagatgtcagtacataatacgataatcccacagctggaaatcagactcggatctttccaagatgctagctgcaggctcttcatctgccatgatagggataatgcaatatctgcagtgccgctctgtgttagtttcgattctgccaatgagacagagaaaatggagcacgaaggaaaaggaggaacggttctgcgtacacctcatgtgcccggttgatgtctcctttatcattgtgtcattacctggcctgccttgtagctaggcactgctgatgtcgatcttgttgccaaaaaggctgtatggatcatacattcacacaaagtgcaattccattccaagatacagcgaaatcttcaggtacgaggagaaagcatggcctgcttgtgcgtgtgactagttgggcaccctgctgggtactggaatggaaccacgctcccttgttgcttttgtttggtacagtgctggttgttgctacctatatttgctttacagcagcgtcggtgtgtagctcttttaggaaactgagatgttggtttggcctggaaacttaacaatatcgtcacacacatatatgtacatatggggatgaagatatgatcgtcagtatgccatcctttaaaaaaaaagattctcattttacggcagttgttcatctgaaatgttagggagt

SEQ ID NO: 21923 - DNA, 2659 bp, Zea Mays
cctgtcctagcctctcactcaggtgaccgcaacccttccacagagagcaagcgaatggtacacaagaatttgttatcagcgaagtagacaaagtaggatggccccgaattcttttgacttgagctataggcatcatcaccgtcaccatcctagacccttgtagcaacaaaaacgagggtgctttttttttttctgacacgagaaaatgagcgccgttggattatcttcacctttcactccccctctttctgagatctgctttttaaacactgattgtatgatggtggttgcatgcagcctttggccgggttcgtgcgcctgacacagacacagatctggagacagatgggttggctacttcctcctccagtgcctttgccgagcggcaggacgacgaagcggaggagttgctgtgcggggtgaaggaagaggagtcggctcaggtacaagaaccggccaagaatccggcaggacgtcccaccccactaccccaggaaggggtcgaaacagcggccggccccggccttacttgacctcggcagcactgggttaattccacggagccacgttttctacaagtttcgtgattggtggtgtggggttgatgaacaaaggacttgaagcattactcatccggtcagacgtgtttcgtagaccttgacgctgagctatcggagttgggtttccaaaaaaaggtggagctctgagagagttccgcattcttctaaaggaagtaggagatacccaggaagcagcatggcattttcttacagcaatgggaggacattgccctcgaaatgggaggatgcagagaggtggatcttcagtcccaattccagcgacatgcgtggaagaactacggttgctcatggtcggaggccaaagtctaaaagtggccccctggggcctccaggaagacttggtggacagtattcatctgtttcttcggtgtcattgcttgatagtgagagagttggacctattacatcaaattctcatttttcagcaggagtactaatgccaggacatgtttgtggaggaaaaaatacaaatggggcctattcaggtagaccaattggtgacgaaatcaacattggagaaggagtcagaatttgtccactgaatggtgggtctcatcctattcgaactcccagagttcgcaagcgattagattctgcagtcgaatcatctgcttcattgcctagcacacaagaatctatccaagacgagcaggttgaaatcacagaagattcagcttcaactattgcctgtataatttccaggaaagatgttgcaacacagaccagcccagagctaagtaggtcctcttcacccaacaatagaccaacatttaatcgttccctgtcgacggaacaaatgaaagagagggggagctgtttctcagatcttgatatcagggatgttcagatggatgatcgagtgactctgactaggtggtcaaagcaaaatgtaacacggttgcctaacaagaattcaacaaacataatagagtggaaggaaaaagctgtggaatcaaaatctttgtcctggggctttgccgaagcgaagtgcatatccaagattggtagagaggacacaaaaattactgcatgggaaagtattcaaaaagcaaaagctgaggcagcaattcagaagttaatgattaagatggagaagaaaggatcatcttcgctggataagattttgaacaccctcaagtctgctcagagaaaagcccaggtgatgcttgagcatgagcttgatgcagtaacagcaaaccaagatggaaaaggctctaggaaggcaaaaaagggagcacagcgtagcaagaatggccaaatcagttccctgagtggctgcttcacttgccatgctttttgatacatgtaattccaaaactgagaatcaggatctgagaaattccttcgtactgcctacatcaccgtcatgttctccacatcgaaatctaggtgaacttcagatatctatcagatgtcagtacataatacgataatcccacagctggaaatcagactcggatctttccaagatgctagctgcaggctcttcatctgccatgatagggataatgcaatatctgcagtgccgctctgtgttagtttcgattctgccaatgagacagagaaaatggagcacgaaggaaaaggaggaacggttctgcgtacacctcatgtgcccggttgatgtctcctttatcattgtgtcattacctggcctgccttgtagctaggcactgctgatgtcgatcttgttgccaaaaaggctgtatggatcatacattcacacaaagtgcaattccattccaagatacagcgaaatcttcaggtacgaggagaaagcatggcctgcttgtgcgtgtgactagttgggcaccctgctgggtactggaatggaaccacgctcccttgttgcttttgtttggtacagtgctggttgttgctacctatatttgctttacagcagcgtcggtgtgtagctcttttaggaaactgagatgttggtttggcctggaaacttaacaatatcgtcacacacatatatgtacatatggggatgaagatatgatcgtcagtatgccatcctttaaaaaaaaagattctcattttacggcagttgttcatctgaaatgttagggagt

SEQ ID NO: 21924 - DNA, 2443 bp, Zea Mays
ccgttggattatcttcacctttcactccccctctttctgagatctgctttttaaacactgattgtatgatggtggttgcatgcagcctttggccgggttcgtgcgcctgacacagacacagatctggagacagatgggttggctacttcctcctccagtgcctttgccgagcggcaggacgacgaagcggaggagttgctgtgcggggtgaaggaagaggagtcggctcaggtacaagaaccggccaagaatccggcaggacgtcccaccccactaccccaggggtcgaaacagcggccggccccggccttacttgacctcggcagcactgggttaattccacggagccacgttttctacaagtttcgtgattggtggtgtggggttgatgaacaaaggacttgaagcattactcatccggtcagacgtgtttcgtagaccttgacgctgagctatcggagttgggtttccaaaaaaaggtggagctctgagagagttccgcattcttctaaaggaagtaggagatacccaggaagcagcatggcattttcttacagcaatgggaggacattgccctcgaaatgggaggatgcagagaggtggatcttcagtcccaattccagcgacatgcgtggaagaactacggttgctcatggtcggaggccaaagtctaaaagtggccccctggggcctccaggaagacttggtggacagtattcatctgtttcttcggtgtcattgcttgatagtgagagagttggacctattacatcaaattctcatttttcagcaggagtactaatgccaggacatgtttgtggaggaaaaaatacaaatggggcctattcaggtagaccaattggtgacgaaatcaacattggagaaggagtcagaatttgtccactgaatggtgggtctcatcctattcgaactcccagagttcgcaagcgattagattctgcagtcgaatcatctgcttcattgcctagcacacaagaatctatccaagacgagcaggttgaaatcacagaagattcagcttcaactattgcctgtataatttccaggaaagatgttgcaacacagaccagcccagagctaagtaggtcctcttcacccaacaatagaccaacatttaatcgttccctgtcgacggaacaaatgaaagagagggggagctgtttctcagatcttgatatcagggatgttcagatggatgatcgagtgactctgactaggtggtcaaagcaaaatgtaacacggttgcctaacaagaattcaacaaacataatagagtggaaggaaaaagctgtggaatcaaaatctttgtcctggggctttgccgaagcgaagtgcatatccaagattggtagagaggacacaaaaattactgcatgggaaagtattcaaaaagcaaaagctgaggcagcaattcagaagttaatgattaagatggagaagaaaggatcatcttcgctggataagattttgaacaccctcaagtctgctcagagaaaagcccaggtgatgcttgagcatgagcttgatgcagtaacagcaaaccaagatggaaaaggctctaggaaggcaaaaaagggagcacagcgtagcaagaatggccaaatcagttccctgagtggctgcttcacttgccatgctttttgatacatgtaattccaaaactgagaatcaggatctgagaaattccttcgtactgcctacatcaccgtcatgttctccacatcgaaatctaggtgaacttcagatatctatcagatgtcagtacataatacgataatcccacagctggaaatcagactcggatctttccaagatgctagctgcaggctcttcatctgccatgatagggataatgcaatatctgcagtgccgctctgtgttagtttcgattctgccaatgagacagagaaaatggagcacgaaggaaaaggaggaacggttctgcgtacacctcatgtgcccggttgatgtctcctttatcattgtgtcattacctggcctgccttgtagctaggcactgctgatgtcgatcttgttgccaaaaaggctgtatggatcatacattcacacaaagtgcaattccattccaagatacagcgaaatcttcaggtacgaggagaaagcatggcctgcttgtgcgtgtgactagttgggcaccctgctgggtactggaatggaaccacgctcccttgttgcttttgtttggtacagtgctggttgttgctacctatatttgctttacagcagcgtcggtgtgtagctcttttaggaaactgagatgttggtttggcctggaaacttaacaatatcgtcacacacatatatgtacatatggggatgaagatatgatcgtcagtatgccatcctttaaaaaaaaagattctcattttacggcagttgttcatctgaaatgttagggagt

SEQ ID NO: 21925 - DNA, 2436 bp, Zea Mays
ccgttggattatcttcacctttcactccccctctttctgagatctgctttttaaacactgattgtatgatggtggttgcatgcagcctttggccgggttcgtgcgcctgacacagacacagatctggagacagatgggttggctacttcctcctccagtgcttctgcagcctttgccgagcggcaggacgacgaagcggaggagttgctgtgcggggtgaaggaagaggagtcggctcaggtacaagaaccggccaagaatccggcaggacgtcccaccccactaccccaggggtcgaaacagcggccggccccggccttacttgacctcggcagcactgggttaattccacggagccacgttttctacaagtttcgtgattggtggtgtggggttgatgaacaaaggacttgaagcattactcatccggtcagacgtgtttcgtagaccttgacgctgagctatcggagttgggtttccaaaaaaaggtggagctctgagagagttccgcattcttctaaaggaagtaggagatacccaggaagcagcatggcattttcttacagcaatgggaggacattgccctcgaaatgggaggatgcagagaggtggatcttcagtcccaattccagcgacatgcgtggaagaactacggttgctcatggtcggaggccaaagtctaaaagtggccccctggggcctccaggaagacttggtggacagtattcatctgtttcttcggtgtcattgcttgatagtgagagagttggacctattacatcaaattctcatttttcagcaggagtactaatgccaggacatgtttgtggaggaaaaaatacaaatggggcctattcaggtagaccaattggtgacgaaatcaacattggagaaggagtcagaatttgtccactgaatggtgggtctcatcctattcgaactcccagagttcgcaagcgattagattctgcagtcgaatcatctgcttcattgcctagcacacaagaatctatccaagacgagcaggttgaaatcacagaagattcagcttcaactattgcctgtataatttccaggaaagatgttgcaacacagaccagcccagagctaagtaggtcctcttcacccaacaatagaccaacatttaatcgttccctgtcgacggaacaaatgaaagagagggggagctgtttctcagatcttgatatcagggatgttcagatggatgatcgagtgactctgactaggtggtcaaagcaaaatgtaacacggttgcctaacaagaattcaacaaacataatagagtggaaggaaaaagctgtggaatcaaaatctttgtcctggggctttgccgaagcgaagtgcatatccaagattggtagagaggacacaaaaattactgcatgggaaagtattcaaaaagcaaaagctgaggcagcaattcagaagttaatgattaagatggagaagaaaggatcatcttcgctggataagattttgaacaccctcaagtctgctcagagaaaagcccaggtgatgcttgagcatgagcttgatgcagtaacagcaaaccaagatggaaaaggctctaggaaggcaaaaaagggagcacagcgtagcaagaatggccaaatcagttccctgagtggctgcttcacttgccatgctttttgatacatgaatcaggatctgagaaattccttcgtactgcctacatcaccgtcatgttctccacatcgaaatctaggtgaacttcagatatctatcagatgtcagtacataatacgataatcccacagctggaaatcagactcggatctttccaagatgctagctgcaggctcttcatctgccatgatagggataatgcaatatctgcagtgccgctctgtgttagtttcgattctgccaatgagacagagaaaatggagcacgaaggaaaaggaggaacggttctgcgtacacctcatgtgcccggttgatgtctcctttatcattgtgtcattacctggcctgccttgtagctaggcactgctgatgtcgatcttgttgccaaaaaggctgtatggatcatacattcacacaaagtgcaattccattccaagatacagcgaaatcttcaggtacgaggagaaagcatggcctgcttgtgcgtgtgactagttgggcaccctgctgggtactggaatggaaccacgctcccttgttgcttttgtttggtacagtgctggttgttgctacctatatttgctttacagcagcgtcggtgtgtagctcttttaggaaactgagatgttggtttggcctggaaacttaacaatatcgtcacacacatatatgtacatatggggatgaagatatgatcgtcagtatgccatcctttaaaaaaaaagattctcattttacggcagttgttcatctgaaatgttagggagt

SEQ ID NO: 21926 - DNA, 2440 bp, Zea Mays
ccgttggattatcttcacctttcactccccctctttctgagatctgctttttaaacactgattgtatgatggtggttgcatgcagcctttggccgggttcgtgcgcctgacacagacacagatctggagacagatgggttggctacttcctcctccagtgcttctgcagcctttgccgagcggcaggacgacgaagcggaggagttgctgtgcggggtgaaggaagaggagtcggctcaggtacaagaaccggccaagaatccggcaggacgtcccaccccactaccccaggaaggggtcgaaacagcggccggccccggccttacttgacctcggcagcactgggttaattccacggagccacgttttctacaagtttcgtgattggtggtgtggggttgatgaacaaaggacttgaagcattactcatccggtcagacgtgtttcgtagaccttgacgctgagctatcggagttgggtttccaaaaaaaggtggagctctgagagagttccgcattcttctaaaggaagtaggagatacccaggaagcagcatggcattttcttacagcaatgggaggacattgccctcgaaatgggaggatgcagagaggtggatcttcagtcccaattccagcgacatgcgtggaagaactacggttgctcatggtcggaggccaaagtctaaaagtggccccctggggcctccaggaagacttggtggacagtattcatctgtttcttcggtgtcattgcttgatagtgagagagttggacctattacatcaaattctcatttttcagcaggagtactaatgccaggacatgtttgtggaggaaaaaatacaaatggggcctattcaggtagaccaattggtgacgaaatcaacattggagaaggagtcagaatttgtccactgaatggtgggtctcatcctattcgaactcccagagttcgcaagcgattagattctgcagtcgaatcatctgcttcattgcctagcacacaagaatctatccaagacgagcaggttgaaatcacagaagattcagcttcaactattgcctgtataatttccaggaaagatgttgcaacacagaccagcccagagctaagtaggtcctcttcacccaacaatagaccaacatttaatcgttccctgtcgacggaacaaatgaaagagagggggagctgtttctcagatcttgatatcagggatgttcagatggatgatcgagtgactctgactaggtggtcaaagcaaaatgtaacacggttgcctaacaagaattcaacaaacataatagagtggaaggaaaaagctgtggaatcaaaatctttgtcctggggctttgccgaagcgaagtgcatatccaagattggtagagaggacacaaaaattactgcatgggaaagtattcaaaaagcaaaagctgaggcagcaattcagaagttaatgattaagatggagaagaaaggatcatcttcgctggataagattttgaacaccctcaagtctgctcagagaaaagcccaggtgatgcttgagcatgagcttgatgcagtaacagcaaaccaagatggaaaaggctctaggaaggcaaaaaagggagcacagcgtagcaagaatggccaaatcagttccctgagtggctgcttcacttgccatgctttttgatacatgaatcaggatctgagaaattccttcgtactgcctacatcaccgtcatgttctccacatcgaaatctaggtgaacttcagatatctatcagatgtcagtacataatacgataatcccacagctggaaatcagactcggatctttccaagatgctagctgcaggctcttcatctgccatgatagggataatgcaatatctgcagtgccgctctgtgttagtttcgattctgccaatgagacagagaaaatggagcacgaaggaaaaggaggaacggttctgcgtacacctcatgtgcccggttgatgtctcctttatcattgtgtcattacctggcctgccttgtagctaggcactgctgatgtcgatcttgttgccaaaaaggctgtatggatcatacattcacacaaagtgcaattccattccaagatacagcgaaatcttcaggtacgaggagaaagcatggcctgcttgtgcgtgtgactagttgggcaccctgctgggtactggaatggaaccacgctcccttgttgcttttgtttggtacagtgctggttgttgctacctatatttgctttacagcagcgtcggtgtgtagctcttttaggaaactgagatgttggtttggcctggaaacttaacaatatcgtcacacacatatatgtacatatggggatgaagatatgatcgtcagtatgccatcctttaaaaaaaaagattctcattttacggcagttgttcatctgaaatgttagggagt

SEQ ID NO: 21927 - DNA, 779 bp, Zea Mays
cacacactttctgttacataaggaatcaggatctgagaaattccttcgtactgcctacatcaccgtcatgttctccacatcgaaatctaggtgaacttcagatatctatcagatgtcagtacataatacgataatcccacagctggaaatcagactcggatctttccaagatgctagctgcaggctcttcatctgccatgatagggataatgcaatatctgcagtgccgctctgtgttagtttcgattctgccaatgagacagagaaaatggagcacgaaggaaaaggaggaacggttctgcgtacacctcatgtgcccggttgatgtctcctttatcattgtgtcattacctggcctgccttgtagctaggcactgctgatgtcgatcttgttgccaaaaaggctgtatggatcatacattcacacaaagtgcaattccattccaagatacagcgaaatcttcaggtacgaggagaaagcatggcctgcttgtgcgtgtgactagttgggcaccctgctgggtactggaatggaaccacgctcccttgttgcttttgtttggtacagtgctggttgttgctacctatatttgctttacagcagcgtcggtgtgtagctcttttaggaaactgagatgttggtttggcctggaaacttaacaatatcgtcacacacatatatgtacatatggggatgaagatatgatcgtcagtatgccatcctttaaaaaaaaagattctcattttacggcagttgttcatctgaaatgttagggagt

SEQ ID NO: 21928 - DNA, 1534 bp, Zea Mays
cggagaccacgacctgtgacttggacaggcaagcaggaggaaggggatggagtggcgccgttagcgaggcaaggttcagtctactcgttgacgttcgacagatcccagagcaccctcggcggggccgccgccagctgtggcggtagccgtggcatccccaagggtttcggctccgtgaacatggacgagctgctccggagcatctggaccgcagaggagacccaggccaaggcctccgcctctatcgcaggagcgagcgcggggatgccccccacgccgatgcagcggcagggatcgtcgctcacactgccccgcatgctcagcaccaagacggtcgacgaggcgtggagaaatctcgtgcgcgacgaaccgccgcagggggcggacggcggcggacaccagccgccccaccgccagtcaacgctcggggagatgactctggaggagttcttggtcagagctggcgcggtcaaggagaaccccgcttctgctcctccagcgccgccacccatggtgccgccgcggccggtacctgttgcccctaaaagctccgccttttttggggatttaccgggtgccgacgacgacgcagctacggcagcggtagggtttgcaccggtcggcatggtggatctggccctgataccgcccagggcggcaggcatgggaggcagcgccatggctgtgcaaacagcgaatgattcgggggagaaggcatggaggcggagtggagaaagtggtggagaggcggcggcggaggatgatcaagaacagggagtccgccgcgaggtcccgagcgcgcaaacaggcttatacaatggagttagaagccgaagttcagaaactcagagagcagaatcaggaactggagaggaaacaggcagaaattatggaaatgcagaacaacgaggtatcagaaatgttgaaggatccattcggacggaagaaacggctgtgcttgcgaagaacgttgacggccccctggtgacgattgcctagaacagcacatgacttgcacttgctacgtacctgcaggggcgtttgggatctgtagataatttctctcctatagtgtagcgatgaacccatgaacatgaacataatctaaatgattgtactgttagctcccttctgccgcttacgtagtactggagtaccgtattggtggagtcgaaaactgacatgtaaattatgtacgtagtagagaacaaaatggagtgaagccggtcgcaagagttgtggcttcagtcatcctccagagcttgtgcagagttgcctaggttttgcatcttgctggcacatccagactccagagcttgtgcagagttgtctaggttttgccatcttccagagcttgtgcagagaatgaatgattttaaaagatccatgactgggtatggattgatgggcaacaaacatggcagggttcaggaaatgattcaccgttaaaacaaccttctcctagcatgtcttagaaaaacatgcgatatccactataacattaactagatcgttaatagtgtagttcttcctt

SEQ ID NO: 21929 - DNA, 783 bp, Zea Mays
gtcacagccttttgctgaattcatgcatgtcttactgaccaaggcaccaagcaatttgcttatacaatggagttagaagccgaagttcagaaactcagagagcagaatcaggaactggagaggaaacaggcagaaattatggaaatgcagaacaacgaggtatcagaaatgttgaaggatccattcggacggaagaaacggctgtgcttgcgaagaacgttgacggccccctggtgacgattgcctagaacagcacatgacttgcacttgctacgtacctgcaggggcgtttgggatctgtagataatttctctcctatagtgtagcgatgaacccatgaacatgaacataatctaaatgattgtactgttagctcccttctgccgcttacgtagtactggagtaccgtattggtggagtcgaaaactgacatgtaaattatgtacgtagtagagaacaaaatggagtgaagccggtcgcaagagttgtggcttcagtcatcctccagagcttgtgcagagttgcctaggttttgcatcttgctggcacatccagactccagagcttgtgcagagttgtctaggttttgccatcttccagagcttgtgcagagaatgaatgattttaaaagatccatgactgggtatggattgatgggcaacaaacatggcagggttcaggaaatgattcaccgttaaaacaaccttctcctagcatgtcttagaaaaacatgcgatatccactataacattaactagatcgttaatagtgtagttcttcctt

SEQ ID NO: 21930 - DNA, 1613 bp, Zea Mays
cgccgcaaagccattccatcctttaaatcgcccgaggcgacggggcgagcgactcatctccctccccagacaagcggcgacacgccagggcggagagcacacaccgaagcgggccgcggcggcggcgcaggcgcaggcgcttacatgggagtagaggcgggcgggtgcgggcggagggcggtcgtgaccgggttctacgtctggggctgggagttcctcaccgccctcctgctcttctcggccgccgccgccgccgcagactcttactagctagctagccacctcttcttcctcctccttgtagttaatcgtcggcgccgagcgagagatggtggaggaaggcgccaccgcggcggcgtcgaggagcgggccggcgccgttcctgagcaagacgcaccagatggtggaggagcggggcacggacgaggtgatctcgtgggcggagcaaggccgctccttcgtggtgtggaagcccgtggagctggcgcgcgacctcctcccgctccacttcaagcactgcaacttctcctcctttgtccgccagctcaacacctacggtttccggaaggtggtgccggaccggtgggagttcgcgaacgagaatttccggcgaggcgagcaaggcctcctgtccggcatccgtcgccgcaagtcaacgacgccgcagccatccaagtacggcggcggcagcgtcgtgaacaccgcgttccctccgccgttgccccttccgcctcccgcgtcggtcaccacgtctggcggtggcggtgccggtggcgctggcaacgagcgcagctcctcgtcggcatcgtcgccgccacggacagacgacctgaccagcgagaacgagcagctcaagaaggacaaccgcacgctgtccaccgagctggcgcaggcgcgtcggcactgcgaggagctcctgggcttcctctcgcgcttcctcgacgtccggcagctcgaccttgggctgctcatgcaggaagacgtgcgagcgggtgccggtgacgacgccgcgccgcgccgcgcaatggtcagccagctagagcgcggcggcgaggaggggaagagcgtgaagctgttcggcgtactcctcacggatgccgcaaggaagagggcccggtgcgaggaggcggcggccagcgagcggcccattaagatgatcagaatcggcgagccgtggatcggcgtcccgtcgtcgggcccggggcggtgcggcggcgggaattaaggtaaggtatggttggaactgatgcgccacggccggccgtgtgacagctttattacagcgagcgcatgttcgagtcgtggatgctttttgtgcgtgtttgtatttgtcatccaaggtgaggttgatggcaaggataattccagtgctgtggtaaaactgtgaaggcagaacacagggcacaggagataaccgtaacgcatgttaaaagttaattatgggatgatttggaggtagcaagattgaaagtagggaactagggatgaccggatgagtagacggtctagaaagacaagcccatatgtttggaatggaatattatcgtttttatatgttttgttaatctgttagtatttgtttggctgcactctaatacatcatatatttcatc

SEQ ID NO: 21931 - DNA, 2251 bp, Zea Mays
aaacaaaacaaaagtcgcgagccgccggcaacagcagctgtccgtccgagtcttcgcttcgcttcgcttccatttcgtcgccgttgcacctcccatagtaatagtcccccattcaatccgctcggtccaaatccacgtcttttgtcgtggggtggtgtctggcattgcattattggaggatcgaaaccatcgccaccgcaccaatgatccccttctccgtcctcgccggcgccctcgtcttgctcgtcggcgtcgccgatgccctgcccgggtaccagataagctgcggcgcgacgtcggacaaggtcgcggggaacgtgacatgggtcgccgacggggcgttcatccacgccggcaaggtggcggagctggactccccgggcgtcatgccgatgctctcctcgctcaggtacttcccgccggacgcgtcgtccgccgccaagtactgctacgcggtcccggcggcgatgcacgccaggtacctggtccgcacgacgtactactacggcgggttcgacggcggcggggcgccgccggtgttcgaccagatcatcgacggcacgcggtggagcgcggtggacacggcggggggctacgcccgcgggctcgccacgtactacgaggccgtggtggaggccgcggggaaggagctcagcgtctgcctcgccaggagcgccgccaccgcgcccggccggagccccttcatctccgcgctcgaggtggtgccgctcgaggagtccgtgtacagcgccgtcaacttcaccgcctacgcgctgagcaccgtcgcgcgccacagcttcggccacaacggctccatcatcggctatccagacgatcggttcaaccgatactgggagccgtacagcgacgggggcatcccggtggtggagagccaggcgagcgtggcgacggaggcgttctggaacaagcctccggaggccgtgttccggcgaggcctgacggcgagcagagacaagagcctggagctccagtggccgccggcgccgctgccggccgcgagctactacctggcgctctacttccaggacaaccgggggccgagcgcgctcagctggagggtgttcgacgtcgcggtcaacggccagcccttcttcgccggcctcaacgtctccacggcggggtgcatggtgtacggcgtcgactggccgctatccgggcagacaaggatcacgctgacgccggcgctggagtcccccgtcgggccgctgatcaacgcggcggagctcatgatggtcgtcccgctcggtgggaggacgcatcccagagacgtaatcggcatgcaggagctggccagaggattcacgaacccgccgtcggactggagaggtgatccatgcttgccccaggggaactcgtggactggtgtcacctgcaaccaagatccactggcaagagtaactgggctagttggaggatcgatatctaacaacattgccaatctgactgcaatttccagcatttggcttgtcgggaacaatttgaccggcccgattccagatctgaaccacctcctgcatgtagtctctttgcacctggaggacaacggactgacaggcccgctccctgaatcgctcggaaaccttacaagacttgaggaactgtccgtgcagaacaacagcctacaaggaacaattccaagcagcatcaggaacagagcggcggtggacccaaggtttaggttccagtacacacctgggaacaaccttagctaacaagtgcattacaggaaggcaaaaatatctgactgctgttccttacccaatttcgggtgcttcggaccattttccttcccttttttgaatcacgattttttgttgtacttcggaatgtatacttatctcttcccctgtaaagatgcatttttgtcatagaaaaaaaacgaggactatattttattgaacgagaaaacgagaaggcttattgctttagacgaattttcataagagcaatgcgtgtacaacccatccgaacaacatctttatgaacaaaaggtcaatctttgagtggttgctcacttgttcagggcttgtatgttttgtttttcaatccaaatggatagagtgggattgaatgagtttcaatcctaaacaagtcaaaatcttttataattttttctaatcttatttaatctatatgagataggaatactgaacaaaagcttaaaagcttatatggatcaaaagcttaaactattcggttatagtttcttatacaaaaaatctttctcaat

SEQ ID NO: 21932 - DNA, 2825 bp, Zea Mays
aaacaaaacaaaagtcgcgagccgccggcaacagcagctgtccgtccgagtcttcgcttcgcttcgcttccatttcgtcgccgttgcacctcccatagtaatagtcccccattcaatccgctcggtccaaatccacgtcttttgtcgtggggtggtgtctggcattgcattattggaggatcgaaaccatcgccaccgcaccaatgatccccttctccgtcctcgccggcgccctcgtcttgctcgtcggcgtcgccgatgccctgcccgggtaccagataagctgcggcgcgacgtcggacaaggtcgcggggaacgtgacatgggtcgccgacggggcgttcatccacgccggcaaggtggcggagctggactccccgggcgtcatgccgatgctctcctcgctcaggtacttcccgccggacgcgtcgtccgccgccaagtactgctacgcggtcccggcggcgatgcacgccaggtacctggtccgcacgacgtactactacggcgggttcgacggcggcggggcgccgccggtgttcgaccagatcatcgacggcacgcggtggagcgcggtggacacggcggggggctacgcccgcgggctcgccacgtactacgaggccgtggtggaggccgcggggaaggagctcagcgtctgcctcgccaggagcgccgccaccgcgcccggccggagccccttcatctccgcgctcgaggtggtgccgctcgaggagtccgtgtacagcgccgtcaacttcaccgcctacgcgctgagcaccgtcgcgcgccacagcttcggccacaacggctccatcatcggctatccagacgatcggttcaaccgatactgggagccgtacagcgacgggggcatcccggtggtggagagccaggcgagcgtggcgacggaggcgttctggaacaagcctccggaggccgtgttccggcgaggcctgacggcgagcagagacaagagcctggagctccagtggccgccggcgccgctgccggccgcgagctactacctggcgctctacttccaggacaaccgggggccgagcgcgctcagctggagggtgttcgacgtcgcggtcaacggccagcccttcttcgccggcctcaacgtctccacggcggggtgcatggtgtacggcgtcgactggccgctatccgggcagacaaggatcacgctgacgccggcgctggagtcccccgtcgggccgctgatcaacgcggcggagctcatgatggtcgtcccgctcggtgggaggacgcatcccagagacgtaatcggcatgcaggagctggccagaggattcacgaacccgccgtcggactggagaggtgatccatgcttgccccaggggaactcgtggactggtgtcacctgcaaccaagatccactggcaagagtaactgggctcaacctcacaaatttcagagttggaggatcgatatctaacaacattgccaatctgactgcaatttccagcatttggcttgtcgggaacaatttgaccggcccgattccagatctgaaccacctcctgcatgtagtctctttgcacctggaggacaacggactgacaggcccgctccctgaatcgctcggaaaccttacaagacttgaggaactgtccgtgcagaacaacagcctacaaggaacaattccaagcagcatcaggaacagagcggcggtggacccaaggtttaggttccagccatgcaatccagcccggaattactccgcagcccatgatccgtcagcagcatccccagcctgttgtcccaataggcccgtactgacccaagatatgaagatatctacctcgtgtcttgtccacctcctcaattatctcatcgttcctcgcgctcatcgcccactttgccgtcgatgcatttcccactcccgcctcttcgccggcgatgaccgccgcctcccacgtcctaacctcctcggcttctctatgacgactcctccgaacccctccccgctcctgtcctcccgcccgaacccctcccttcctctccaccgccgcccccggttcccccactccccggccgccgccaacaccaccggcgccgcatcggcgccggactggttccgccctcgccgtactccggactcggacccgtccatctccggcggccgcgtcaccgcgcgtgatcctggcgttcgcgtcaaggccaaggagggcgccgaggaggaaaaagataagaaggctaagaggaggagatggtgggagcgctggtcgggggacaaggagagctacctggtggacgatgtggagccgctccccatcccattgaccgtgccagagacggagcccatgtcgcgggaggagctggaccgccggctcagctgcgacgtcgagatcgatgaatgcaagacggtctcatacgagtggacaggcaagtgccggagctgccaggggacgggactggtcagctacttcaggaagaagggcaaggagaccatttgcaagtgtgtgccatgcgccgggattggttatgtgaggaaaattacacttcgtgaggacattcaaaagatagacgagctagacaatgagaaactaccatagtttgaaaggcacgatactagcttggaggggttattctttaagcactgtaaacttttgtgttcaaaaaaaaacattgcaaacttagcaatggtgtctagtaattgtaccccttttatcttggttatttgctgatagatatgataacgatcgatacagaaaagaaaataataattgtatcccttttgtaaattcttttagcacgttggtatggtccatctgtttctctcctttgtggttgag

SEQ ID NO: 21933 - DNA, 1023 bp, Zea Mays
attgttctttttcagccacttggacttgggtgcagattcttgctccattaaacgagtagtgcacgacgatctagacgcctcgatctgatcgtcgcgcgatagatgccgttgtgctctcactggcagtgccctatttgtcgaccaccaaatctgcgcgcgtagagaataagctaagctgcaaaaggtcagaaaaaaaaacaggggtgtagatacaagccgtgataaacaacagccttgccaaattggcttgcttatataagagcaataggtctcaacaagttgctgcacacaggaaaagaaagggcatatcgaggaggtttttagggtggtggtggtgttgtgaggagctgctgccgctgctctccagtctccaccgatggcgatcaagaacatgacggtggacgagttcaaggagtggctgcggcggttcgacacggaccaggacgggcgcatcagccgcgacgagctgcggcgcgctctgcgtgccatccgctcccggttcacggggtggaggagcaggcagggcatcagttatgccgacacagacggcgacggctacatcgacgacagcgaggtcgatggcctcatcgagttcgcgcagaagaacctcggcctcaagatcgtcgcctactgatctcacatggagcgcggcgcgtggcgggcggggggtgggacgcactggctcgccatgagctatagctatagcgacaatgcaactcaccatcactctctccggctaaaataagagctgcttgatctatcatcgcttgtctgttaaaattgctttccatgtacttagtctattcgagttcgggatcacgcactagctctctacgctgttgttgtgtgatctatgtaaggtgtgtataatggtacccgtgcgtggctgccttcgtcggcttgcatagcctagctccggccgtgtcatgggtgctatgatgttaatttgtataactcattatgatgtacaatttatattttaaatattttttcatatgacaaaataaaagtaaatttgttcat

SEQ ID NO: 21934 - DNA, 933 bp, Zea Mays
ccattgcctcctactccacgggaatccagacccaggaaggacaggacagcagccaggaggcccgaccgagaggctgcataagtaaccgcggctttccgcgccgattcccacctaatcccatcgttaccagtcatcaccttccaactcgcaacgcacccacagtccctcaccgcccgcaccgcacacaggcgcgacgaagcagaaaagtatggccgctgccacagcgacggcggcggtgctgggatgcagcaggctccagagcgacattgcgggcgccggcataccgaagaagggaaaggtggggaggtcgccgccggcggaggaggtggaggcgttcctcgccgcagcggagcgcggcatggcgcggcgcttcgcggtcaagtacaactatgacgtcgtcaaggacgctcccatggacggcggccggtacgagtgggtccgagtgcggcccggttaactgccagatccaatccaagaggtcgcctcgtgtcctctcctgtctgtctctacttctcttgtaacagtcgcttactacccgtgtaacgcttcgcttagctgtaactaaattatgctcacgagatgggattaatcatgtgaaggcccaaccttgtacgttagtggtgtgcggttaacgtgtccttccttagtccagagaggaaaaagctgtaacttgtcgctgttcttccatttgtcgggtctctgttcatactacatcaatgaaacagatattcaggcaggcccacagacacctctctcctcgagagctaaaacaggagatcgacaatgaaaacagctcgcaactcagctagcagaggacttcatttgagcagtcacctggctttattcgatttccttccagttttcgccacgtgccttgcaaaccaattccgaacatgcggcgtaactaaaataaaccttacgaaaaacaaaaaa

SEQ ID NO: 21935 - DNA, 1277 bp, Zea Mays
ccattgcctcctactccacgggaatccagacccaggaaggacaggacagcagccaggaggcccgaccgagaggctgcataagtaaccgcggctttccgcgccgattcccacctaatcccatcgttaccagtcatcaccttccaactcgcaacgcacccacagtccctcaccgcccgcaccgcacacaggcgcgacgaagcagaaaagtatggccgctgccacagcgacggcggcggtgctgggatgcagcaggctccagagcgacattgcgggcgccggcataccgaagaagggaaaggtggggaggtcgccgccggcggaggaggtggaggcgttcctcgccgcagcggagcgcggcatggcgcggcgcttcgcggtcaagtgagtagagtatagtatgtcagctccacctgcctgccgctccctgttcctgctgaattgagcccaggcctccttttgggacggctccaactcgtcactgggccttttcgcgctggcacaggctgtggagctttccacaggccaataggcaatagctagcccctttttttactttagtttccatttattcatattcatttttttaaaaaaaaaagatacaaattcacttcggctctgactctctccacaccctttgccgaatccgaacaaactgttcccaacttcacatgccgggagcgcgttaatcagcgtgtaccattttggatcttttggttgtgttcaaggtacaactatgacgtcgtcaaggacgctcccatggacggcggccggtacgagtgggtccgagtgcggcccggttaactgccagatccaatccaagaggtcgcctcgtgtcctctcctgtctgtctctacttctcttgtaacagtcgcttactacccgtgtaacgcttcgcttagctgtaactaaattatgctcacgagatgggattaatcatgtgaaggcccaaccttgtacgttagtggtgtgcggttaacgtgtccttccttagtccagagaggaaaaagctgtaacttgtcgctgttcttccatttgtcgggtctctgttcatactacatcaatgaaacagatattcaggcaggcccacagacacctctctcctcgagagctaaaacaggagatcgacaatgaaaacagctcgcaactcagctagcagaggacttcatttgagcagtcacctggctttattcgatttccttccagttttcgccacgtgccttgcaaaccaattccgaacatgcggcgtaactaaaataaaccttacgaaaaacaaaaaa

SEQ ID NO: 21936 - DNA, 1763 bp, Zea Mays
aattgagaacacttcttctagtcttttgttctcattcattaggtaatttaggattgtatgtgaacgtctgaagatagtgatatattggtgatttgtaaatctctttcaaaatatggtattgagctatccctgttactagtttatttgagaaattgtattagggagttgctatgaactaaccctaatcacacacactcctaactcccatcccatcccatcccatcccagccgccacagctgctgctcgccctctccctgtctcctctctctttccagccacggtttccccttcccccatccgcgcgctagggcacgaggcaaatctgtggccctctcctagtctcctgaagtccgactcagccgtctcccagctcccgctcgctcgaactcgggttggggaggcacggagtcactgaccccttcgcgttaggcggtgcccttaccggctcttcgtctaaggtgtagtcaagctgccggccacgcccggcacccccctatccagtacaaggccttctccgagatccagtacaaggtcgtcgtctccaagatctgaccccgacgctagtgaggagggaagagtgggtggacgaagtgggggaggatgagcgaggagaggccggtgccgcggcgggagagcccgtggggtctgcctgagggcgacacgcggcagcccaaggctcaccgctgcaacgaccgcgccgaggacgtcgtccaggcttgctttgaagggaacccattcaagacagttccaggcccatttaagctcttctggcaatgcatgcgctcaaaacctggcttccactatgggtctaagcagcagtatttcggtccagaaaaccttgtatgaggttttatctgtgagcgaagacgctacgtatgatgaaattcgtgcagcatacaggtctgctgctctgaacacacaccctgacaaggcacggacacctctcgagtcatgtgttctttccggtgagcaacaggaattttctagtgtgcagaaagcatgggaaatcctacgccatcctacatctagagcagactacgataagcagctgcagtcatccagacagaacatcgagatcatcgcatctgaagtccaagtcggggatatgatcattgagagcactgccgatgccgatactgtagagctgtcgtacccatgcaggtgcggtgattacttttccatcacttcgtgcgagcttagcgggatgggaatttccgtcagtggagatggagatggagaggtagagctgcaggcgtccgattctccgtcggcttccgttgttctgggctgcggctcttgttctctcaaaatacggttggttttatagatggaactccatgatatatattgtgtgcggctcagcaatgctcactttaaactttagcagccaccacatgtttctcaaacactatgcctcctggtctgccgaaatcaaaatagtgcagcttaaccttgcctgttcctatttccgggagagatgtcgagtttgtaacctgatggtggttgcgttgtgataaatgacgttttttgaccgttgttatcagctaaccaccgctgtcgaatccagctgctgggaaatccaaagttgttccggtggtggttattcggtagatgagatcttcagttaatgttgttttacaggcccgatttaatggtcccatctgccagccattcacctaaataatagctaaactaatgttttggcatcagctaaatgagtgtctttgatagatgctgatgagaagcagtgttagttgcggcc

SEQ ID NO: 21937 - DNA, 2033 bp, Zea Mays
cttcttctagtcttttgttctcattcattaggtaatttaggattgtatgtgaacgtctgaagatagtgatatattggtgatttgtaaatctctttcaaaatatggtattgagctatccctgttactagtttatttgagaaattgtattagggagttgctatgaactaaccctaatcacacacactcctaactcccatcccatcccatcccatcccagccgccacagctgctgctcgccctctccctgtctcctctctctttccagccacggtttccccttcccccatccgcgcgctagggcacgaggcaaatctgtggccctctcctagtctcctgaagtccgactcagccgtctcccagctcccgctcgctcgaactcgggttggggaggcacggagtcactgaccccttcgcgttaggcggtgcccttaccggctcttcgtctaaggtgtagtcaagctgccggccacgcccggcacccccctatccagtacaaggccttctccgagatccagtacaaggtcgtcgtctccaagatctgaccccgacgctagtgaggagggaagagtgggtggacgaagtgggggaggatgagcgaggagaggccggtgccgcggcgggagagcccgtggggtctgcctgagggcgacacgcggcagcccaaggctcaccgctgcaacgaccgcgccgaggacgtcgtccaggcttgctttgaagggaacccattcaagacagttccaggcccatttaagctcttctggcaatgcatgcgctcaaaacctggggaggaaccaaccgagccctatacctacctgcagctagatcctccgagaagggtggaagtgaatctggagcaaacaggaagtgaaccttgaacgagcatgcctagtttagcatctcgtgcctatttgtcttcacctttcgagcagactttttcctcctagggatcacatcatgtgagcacaaagctgcatatgtttggatgtttatataatctacctaataaaccgtgatccccagagctgcctgtccaggctgccaactccttgaaatttgctgatgctggtgtaagaattgtgcccctttcttctgataaatggtgcacgcccaagtccacatgccgccagacatcagagctagtgcatctgaatgcttccactatgggtctaagcagcagtatttcggtccagaaaaccttgtatgaggttttatctgtgagcgaagacgctacgtatgatgaaattcgtgcagcatacagtgtgcagaaagcatgggaaatcctacgccatcctacatctagagcagactacgataagcagctgcagtcatccagacagaacatcgagatcatcgcatctgaagtccaagtcggggatatgatcattgagagcactgccgatgccgatactgtagagctgtcgtacccatgcaggtgcggtgattacttttccatcacttcgtgcgagcttagcgggatgggaatttccgtcagtggagatggagatggagaggtagagctgcaggcgtccgattctccgtcggcttccgttgttctgggctgcggctcttgttctctcaaaatacggttggttttatagatggaactccatgatatatattgtgtgcggctcagcaatgctcactttaaactttagcagccaccacatgtttctcaaacactatgcctcctggtctgccgaaatcaaaatagtgcagcttaaccttgcctgttcctatttccgggagagatgtcgagtttgtaacctgatggtggttgcgttgtgataaatgacgttttttgaccgttgttatcagctaaccaccgctgtcgaatccagctgctgggaaatccaaagttgttccggtggtggttattcggtagatgagatcttcagttaatgttgttttacaggcccgatttaatggtcccatctgccagccattcacctaaataatagctaaactaatgttttggcatcagctaaatgagtgtctttgatagatgctgatgagaagcagtgttagttgcggcc

SEQ ID NO: 21938 - DNA, 1841 bp, Zea Mays
cattcattaggtaatttaggattgtatgtgaacgtctgaagatagtgatatattggtgatttgtaaatctctttcaaaatatggtattgagctatccctgttactagtttatttgagaaattgtattagggagttgctatgaactaaccctaatcacacacactcctaactcccatcccatcccatcccatcccagccgccacagctgctgctcgccctctccctgtctcctctctctttccagccacggtttccccttcccccatccgcgcgctagggcacgaggcaaatctgtggccctctcctagtctcctgaagtccgactcagccgtctcccagctcccgctcgctcgaactcgggttggggaggcacggagtcactgaccccttcgcgttaggcggtgcccttaccggctcttcgtctaaggtgtagtcaagctgccggccacgcccggcacccccctatccagtacaaggccttctccgagatccagtacaaggtcgtcgtctccaagatctgaccccgacgctagtgaggagggaagagtgggtggacgaagtgggggaggatgagcgaggagaggccggtgccgcggcgggagagcccgtggggtctgcctgagggcgacacgcggcagcccaaggctcaccgctgcaacgaccgcgccgaggacgtcgtccaggcttgctttgaagggaacccattcaagacagttccaggcccatttaagctcttctggcaatgcatgcgctcaaaacctggaggtatttcacgaatggacctgtggttttcagggaggaaccaaccgagccctatacctacctgcagctagatcctccgagaagggtggaagtgaatctggagcaaacaggaagtgaaccttgaacgagcatgcctagtttagcatctcgtgcctatttgtcttcacctttcgagcagactttttcctcctagggatcacatcatcttccactatgggtctaagcagcagtatttcggtccagaaaaccttgtatgaggttttatctgtgagcgaagacgctacgtatgatgaaattcgtgcagcatacagaaagcatgggaaatcctacgccatcctacatctagagcagactacgataagcagctgcagtcatccagacagaacatcgagatcatcgcatctgaagtccaagtcggggatatgatcattgagagcactgccgatgccgatactgtagagctgtcgtacccatgcaggtgcggtgattacttttccatcacttcgtgcgagcttagcgggatgggaatttccgtcagtggagatggagatggagaggtagagctgcaggcgtccgattctccgtcggcttccgttgttctgggctgcggctcttgttctctcaaaatacggttggttttatagatggaactccatgatatatattgtgtgcggctcagcaatgctcactttaaactttagcagccaccacatgtttctcaaacactatgcctcctggtctgccgaaatcaaaatagtgcagcttaaccttgcctgttcctatttccgggagagatgtcgagtttgtaacctgatggtggttgcgttgtgataaatgacgttttttgaccgttgttatcagctaaccaccgctgtcgaatccagctgctgggaaatccaaagttgttccggtggtggttattcggtagatgagatcttcagttaatgttgttttacaggcccgatttaatggtcccatctgccagccattcacctaaataatagctaaactaatgttttggcatcagctaaatgagtgtctttgatagatgctgatgagaagcagtgttagttgcggcc

SEQ ID NO: 21939 - DNA, 1985 bp, Zea Mays
attgtatgtgaacgtctgaagatagtgatatattggtgatttgtaaatctctttcaaaatatggtattgagctatccctgttactagtttatttgagaaattgtattagggagttgctatgaactaaccctaatcacacacactcctaactcccatcccatcccatcccatcccagccgccacagctgctgctcgccctctccctgtctcctctctctttccagccacggtttccccttcccccatccgcgcgctagggcacgaggcaaatctgtggccctctcctagtctcctgaagtccgactcagccgtctcccagctcccgctcgctcgaactcgggttggggaggcacggagtcactgaccccttcgcgttaggcggtgcccttaccggctcttcgtctaaggtgtagtcaagctgccggccacgcccggcacccccctatccagtacaaggccttctccgagatccagtacaaggtcgtcgtctccaagatctgaccccgacgctagtgaggagggaagagtgggtggacgaagtgggggaggatgagcgaggagaggccggtgccgcggcgggagagcccgtggggtctgcctgagggcgacacgcggcagcccaaggctcaccgctgcaacgaccgcgccgaggacgtcgtccaggcttgctttgaagggaacccattcaagacagttccaggcccatttaagctcttctggcaatgcatgcgctcaaaacctggggaggaaccaaccgagccctatacctacctgcagctagatcctccgagaagggtggaagtgaatctggagcaaacaggaagtgaaccttgaacgagcatgcctagtttagcatctcgtgcctatttgtcttcacctttcgagcagactttttcctcctagggatcacatcatgtgagcacaaagctgcatatgtttggatgtttatataatctacctaataaaccgtgatccccagagctgcctgtccaggctgccaactccttgaaatttgctgatgctggtgtaagaattgtgcccctttcttctgataaatggtgcacgcccaagtccacatgccgccagacatcagagctagtgcatctgaatgcttccactatgggtctaagcagcagtatttcggtccagaaaaccttgtatgaggttttatctgtgagcgaagacgctacgtatgatgaaattcgtgcagcatacagaaagcatgggaaatcctacgccatcctacatctagagcagactacgataagcagctgcagtcatccagacagaacatcgagatcatcgcatctgaagtccaagtcggggatatgatcattgagagcactgccgatgccgatactgtagagctgtcgtacccatgcaggtgcggtgattacttttccatcacttcgtgcgagcttagcgggatgggaatttccgtcagtggagatggagatggagaggtagagctgcaggcgtccgattctccgtcggcttccgttgttctgggctgcggctcttgttctctcaaaatacggttggttttatagatggaactccatgatatatattgtgtgcggctcagcaatgctcactttaaactttagcagccaccacatgtttctcaaacactatgcctcctggtctgccgaaatcaaaatagtgcagcttaaccttgcctgttcctatttccgggagagatgtcgagtttgtaacctgatggtggttgcgttgtgataaatgacgttttttgaccgttgttatcagctaaccaccgctgtcgaatccagctgctgggaaatccaaagttgttccggtggtggttattcggtagatgagatcttcagttaatgttgttttacaggcccgatttaatggtcccatctgccagccattcacctaaataatagctaaactaatgttttggcatcagctaaatgagtgtctttgatagatgctgatgagaagcagtgttagttgcggcc

SEQ ID NO: 21940 - DNA, 1789 bp, Zea Mays
attgtatgtgaacgtctgaagatagtgatatattggtgatttgtaaatctctttcaaaatatggtattgagctatccctgttactagtttatttgagaaattgtattagggagttgctatgaactaaccctaatcacacacactcctaactcccatcccatcccatcccatcccagccgccacagctgctgctcgccctctccctgtctcctctctctttccagccacggtttccccttcccccatccgcgcgctagggcacgaggcaaatctgtggccctctcctagtctcctgaagtccgactcagccgtctcccagctcccgctcgctcgaactcgggttggggaggcacggagtcactgaccccttcgcgttaggcggtgcccttaccggctcttcgtctaaggtgtagtcaagctgccggccacgcccggcacccccctatccagtacaaggccttctccgagatccagtacaaggtcgtcgtctccaagatctgaccccgacgctagtgaggagggaagagtgggtggacgaagtgggggaggatgagcgaggagaggccggtgccgcggcgggagagcccgtggggtctgcctgagggcgacacgcggcagcccaaggctcaccgctgcaacgaccgcgccgaggacgtcgtccaggcttgctttgaagggaacccattcaagacagttccaggcccatttaagctcttctggcaatgcatgcgctcaaaacctggggaggaaccaaccgagccctatacctacctgcagctagatcctccgagaagggtggaagtgaatctggagcaaacaggaagtgaaccttgaacgagcatgcctagtttagcatctcgtgcctatttgtcttcacctttcgagcagactttttcctcctagggatcacatcatcttccactatgggtctaagcagcagtatttcggtccagaaaaccttgtatgaggttttatctgtgagcgaagacgctacgtatgatgaaattcgtgcagcatacagaaagcatgggaaatcctacgccatcctacatctagagcagactacgataagcagctgcagtcatccagacagaacatcgagatcatcgcatctgaagtccaagtcggggatatgatcattgagagcactgccgatgccgatactgtagagctgtcgtacccatgcaggtgcggtgattacttttccatcacttcgtgcgagcttagcgggatgggaatttccgtcagtggagatggagatggagaggtagagctgcaggcgtccgattctccgtcggcttccgttgttctgggctgcggctcttgttctctcaaaatacggttggttttatagatggaactccatgatatatattgtgtgcggctcagcaatgctcactttaaactttagcagccaccacatgtttctcaaacactatgcctcctggtctgccgaaatcaaaatagtgcagcttaaccttgcctgttcctatttccgggagagatgtcgagtttgtaacctgatggtggttgcgttgtgataaatgacgttttttgaccgttgttatcagctaaccaccgctgtcgaatccagctgctgggaaatccaaagttgttccggtggtggttattcggtagatgagatcttcagttaatgttgttttacaggcccgatttaatggtcccatctgccagccattcacctaaataatagctaaactaatgttttggcatcagctaaatgagtgtctttgatagatgctgatgagaagcagtgttagttgcggcc

SEQ ID NO: 21941 - DNA, 2305 bp, Zea Mays
attgtatgtgaacgtctgaagatagtgatatattggtgatttgtaaatctctttcaaaatatggtattgagctatccctgttactagtttatttgagaaattgtattagggagttgctatgaactaaccctaatcacacacactcctaactcccatcccatcccatcccatcccagccgccacagctgctgctcgccctctccctgtctcctctctctttccagccacggtttccccttcccccatccgcgcgctagggcacgaggcaaatctgtggccctctcctagtctcctgaagtccgactcagccgtctcccagctcccgctcgctcgaactcgggttggggaggcacggagtcactgaccccttcgcgttaggcggtgcccttaccggctcttcgtctaaggtgtagtcaagctgccggccacgcccggcacccccctatccagtacaaggccttctccgagatccagtacaaggtcgtcgtctccaagatctgaccccgacgctagtgaggagggaagagtgggtggacgaagtgggggaggatgagcgaggagaggccggtgccgcggcgggagagcccgtggggtctgcctgagggcgacacgcggcagcccaaggctcaccgctgcaacgaccgcgccgaggacgtcgtccaggcttgctttgaagggaacccattcaagacagttccaggcccatttaagctcttctggcaatgcatgcgctcaaaacctggggaggaaccaaccgagccctatacctacctgcagctagatcctccgagaagggtggaagtgaatctggagcaaacaggaagtgaaccttgaacgagcatgcctagtttagcatctcgtgcctatttgtcttcacctttcgagcagactttttcctcctagggatcacatcatgtgagcacaaagctgcatatgtttggatgtttatataatctacctaataaaccgtgatccccagagctgcctgtccaggctgccaactccttgaaatttgctgatgctggtgtaagaattgtgcccctttcttctgataaatggtgcacgcccaagtccacatgccgccagacatcagagctagtgcatctgaatggttgtgctcctgttctgaaacagagtgatccatatggtttttgtgtgtttgtccatactttcatatagcatactagtgtagccgtacagtttacaagctgtatataaggccatccatccattctccagttctcttggtgcatctgaactattttgtcttaagaggggcatttggccccttggttgccaaacacccgagtgaaaaaaaaatctcccagggaattgaagtgtcatttaaaatccccttggtgcattactttcctggcttttttgtccatttgttgccaaactagccctaactgttctttttaccccttccagcttccactatgggtctaagcagcagtatttcggtccagaaaaccttgtatgaggttttatctgtgagcgaagacgctacgtatgatgaaattcgtgcagcatacagaaagcatgggaaatcctacgccatcctacatctagagcagactacgataagcagctgcagtcatccagacagaacatcgagatcatcgcatctgaagtccaagtcggggatatgatcattgagagcactgccgatgccgatactgtagagctgtcgtacccatgcaggtgcggtgattacttttccatcacttcgtgcgagcttagcgggatgggaatttccgtcagtggagatggagatggagaggtagagctgcaggcgtccgattctccgtcggcttccgttgttctgggctgcggctcttgttctctcaaaatacggttggttttatagatggaactccatgatatatattgtgtgcggctcagcaatgctcactttaaactttagcagccaccacatgtttctcaaacactatgcctcctggtctgccgaaatcaaaatagtgcagcttaaccttgcctgttcctatttccgggagagatgtcgagtttgtaacctgatggtggttgcgttgtgataaatgacgttttttgaccgttgttatcagctaaccaccgctgtcgaatccagctgctgggaaatccaaagttgttccggtggtggttattcggtagatgagatcttcagttaatgttgttttacaggcccgatttaatggtcccatctgccagccattcacctaaataatagctaaactaatgttttggcatcagctaaatgagtgtctttgatagatgctgatgagaagcagtgttagttgcggcc

SEQ ID NO: 21942 - DNA, 2111 bp, Zea Mays
ctctttcaaaatatggtattgagctatccctgttactagtttatttgagaaattgtattagggagttgctatgaactaaccctaatcacacacactcctaactcccatcccatcccatcccatcccagccgccacagctgctgctcgccctctccctgtctcctctctctttccagccacggtttccccttcccccatccgcgcgctagggcacgaggcaaatctgtggccctctcctagtctcctgaagtccgactcagccgtctcccagctcccgctcgctcgaactcgggttggggaggcacggagtcactgaccccttcgcgttaggcggtgcccttaccggctcttcgtctaaggtgtagtcaagctgccggccacgcccggcacccccctatccagtacaaggccttctccgagatccagtacaaggtcgtcgtctccaagatctgaccccgacgctagtgaggcttgctttgaagggaacccattcaagacagttccaggcccatttaagctcttctggcaatgcatgcgctcaaaacctggggaggaaccaaccgagccctatacctacctgcagctagatcctccgagaagggtggaagtgaatctggagcaaacaggaagtgaaccttgaacgagcatgcctagtttagcatctcgtgcctatttgtcttcacctttcgagcagactttttcctcctagggatcacatcatgtgagcacaaagctgcatatgtttggatgtttatataatctacctaataaaccgtgatccccagagctgcctgtccaggctgccaactccttgaaatttgctgatgctggtgtaagaattgtgcccctttcttctgataaatggtgcacgcccaagtccacatgccgccagacatcagagctagtgcatctgaatggttgtgctcctgttctgaaacagagtgatccatatggtttttgtgtgtttgtccatactttcatatagcatactagtgtagccgtacagtttacaagctgtatataaggccatccatccattctccagttctcttggtgcatctgaactattttgtcttaagaggggcatttggccccttggttgccaaacacccgagtgaaaaaaaaatctcccagggaattgaagtgtcatttaaaatccccttggtgcattactttcctggcttttttgtccatttgttgccaaactagccctaactgttctttttaccccttccagcttccactatgggtctaagcagcagtatttcggtccagaaaaccttgtatgaggttttatctgtgagcgaagacgctacgtatgatgaaattcgtgcagcatacagaaagcatgggaaatcctacgccatcctacatctagagcagactacgataagcagctgcagtcatccagacagaacatcgagatcatcgcatctgaagtccaagtcggggatatgatcattgagagcactgccgatgccgatactgtagagctgtcgtacccatgcaggtgcggtgattacttttccatcacttcgtgcgagcttagcgggatgggaatttccgtcagtggagatggagatggagaggtagagctgcaggcgtccgattctccgtcggcttccgttgttctgggctgcggctcttgttctctcaaaatacggttggttttatagatggaactccatgatatatattgtgtgcggctcagcaatgctcactttaaactttagcagccaccacatgtttctcaaacactatgcctcctggtctgccgaaatcaaaatagtgcagcttaaccttgcctgttcctatttccgggagagatgtcgagtttgtaacctgatggtggttgcgttgtgataaatgacgttttttgaccgttgttatcagctaaccaccgctgtcgaatccagctgctgggaaatccaaagttgttccggtggtggttattcggtagatgagatcttcagttaatgttgttttacaggcccgatttaatggtcccatctgccagccattcacctaaataatagctaaactaatgttttggcatcagctaaatgagtgtctttgatagatgctgatgagaagcagtgttagttgcggcc

SEQ ID NO: 21943 - DNA, 2118 bp, Zea Mays
ctctttcaaaatatggtattgagctatccctgttactagtttatttgagaaattgtattagggagttgctatgaactaaccctaatcacacacactcctaactcccatcccatcccatcccatcccagccgccacagctgctgctcgccctctccctgtctcctctctctttccagccacggtttccccttcccccatccgcgcgctagggcacgaggcaaatctgtggccctctcctagtctcctgaagtccgactcagccgtctcccagctcccgctcgctcgaactcgggttggggaggcacggagtcactgaccccttcgcgttaggcggtgcccttaccggctcttcgtctaaggtgtagtcaagctgccggccacgcccggcacccccctatccagtacaaggccttctccgagatccagtacaaggtcgtcgtctccaagatctgaccccgacgctagtgaggcttgctttgaagggaacccattcaagacagttccaggcccatttaagctcttctggcaatgcatgcgctcaaaacctggggaggaaccaaccgagccctatacctacctgcagctagatcctccgagaagggtggaagtgaatctggagcaaacaggaagtgaaccttgaacgagcatgcctagtttagcatctcgtgcctatttgtcttcacctttcgagcagactttttcctcctagggatcacatcatgtgagcacaaagctgcatatgtttggatgtttatataatctacctaataaaccgtgatccccagagctgcctgtccaggctgccaactccttgaaatttgctgatgctggtgtaagaattgtgcccctttcttctgataaatggtgcacgcccaagtccacatgccgccagacatcagagctagtgcatctgaatggttgtgctcctgttctgaaacagagtgatccatatggtttttgtgtgtttgtccatactttcatatagcatactagtgtagccgtacagtttacaagctgtatataaggccatccatccattctccagttctcttggtgcatctgaactattttgtcttaagaggggcatttggccccttggttgccaaacacccgagtgaaaaaaaaatctcccagggaattgaagtgtcatttaaaatccccttggtgcattactttcctggcttttttgtccatttgttgccaaactagccctaactgttctttttaccccttccagcttccactatgggtctaagcagcagtatttcggtccagaaaaccttgtatgaggttttatctgtgagcgaagacgctacgtatgatgaaattcgtgcagcatacagtgtgcagaaagcatgggaaatcctacgccatcctacatctagagcagactacgataagcagctgcagtcatccagacagaacatcgagatcatcgcatctgaagtccaagtcggggatatgatcattgagagcactgccgatgccgatactgtagagctgtcgtacccatgcaggtgcggtgattacttttccatcacttcgtgcgagcttagcgggatgggaatttccgtcagtggagatggagatggagaggtagagctgcaggcgtccgattctccgtcggcttccgttgttctgggctgcggctcttgttctctcaaaatacggttggttttatagatggaactccatgatatatattgtgtgcggctcagcaatgctcactttaaactttagcagccaccacatgtttctcaaacactatgcctcctggtctgccgaaatcaaaatagtgcagcttaaccttgcctgttcctatttccgggagagatgtcgagtttgtaacctgatggtggttgcgttgtgataaatgacgttttttgaccgttgttatcagctaaccaccgctgtcgaatccagctgctgggaaatccaaagttgttccggtggtggttattcggtagatgagatcttcagttaatgttgttttacaggcccgatttaatggtcccatctgccagccattcacctaaataatagctaaactaatgttttggcatcagctaaatgagtgtctttgatagatgctgatgagaagcagtgttagttgcggcc

SEQ ID NO: 21944 - DNA, 1631 bp, Zea Mays
tagggagttgctatgaactaaccctaatcacacacactcctaactcccatcccatcccatcccatcccagccgccacagctgctgctcgccctctccctgtctcctctctctttccagccacggtttccccttcccccatccgcgcgctagggcacgaggcaaatctgtggccctctcctagtctcctgaagtccgactcagccgtctcccagctcccgctcgctcgaactcgggttggggaggcacggagtcactgaccccttcgcgttaggcggtgcccttaccggctcttcgtctaaggtgtagtcaagctgccggccacgcccggcacccccctatccagtacaaggccttctccgagatccagtacaaggtcgtcgtctccaagatctgaccccgacgctagtgaggcttgctttgaagggaacccattcaagacagttccaggcccatttaagctcttctggcaatgcatgcgctcaaaacctggggaggaaccaaccgagccctatacctacctgcagctagatcctccgagaagggtggaagtgaatctggagcaaacaggaagtgaaccttgaacgagcatgcctagtttagcatctcgtgcctatttgtcttcacctttcgagcagactttttcctcctagggatcacatcatcttccactatgggtctaagcagcagtatttcggtccagaaaaccttgtatgaggttttatctgtgagcgaagacgctacgtatgatgaaattcgtgcagcatacaggtctgctgctctgaacacacaccctgacaaggcacggacacctctcgagtcatgtgttctttccggtgagcaacaggaattttctagtgtgcagaaagcatgggaaatcctacgccatcctacatctagagcagactacgataagcagctgcagtcatccagacagaacatcgagatcatcgcatctgaagtccaagtcggggatatgatcattgagagcactgccgatgccgatactgtagagctgtcgtacccatgcaggtgcggtgattacttttccatcacttcgtgcgagcttagcgggatgggaatttccgtcagtggagatggagatggagaggtagagctgcaggcgtccgattctccgtcggcttccgttgttctgggctgcggctcttgttctctcaaaatacggttggttttatagatggaactccatgatatatattgtgtgcggctcagcaatgctcactttaaactttagcagccaccacatgtttctcaaacactatgcctcctggtctgccgaaatcaaaatagtgcagcttaaccttgcctgttcctatttccgggagagatgtcgagtttgtaacctgatggtggttgcgttgtgataaatgacgttttttgaccgttgttatcagctaaccaccgctgtcgaatccagctgctgggaaatccaaagttgttccggtggtggttattcggtagatgagatcttcagttaatgttgttttacaggcccgatttaatggtcccatctgccagccattcacctaaataatagctaaactaatgttttggcatcagctaaatgagtgtctttgatagatgctgatgagaagcagtgttagttgcggcc

SEQ ID NO: 21945 - DNA, 2963 bp, Zea Mays
cacactcctaactcccatcccatcccatcccatcccagccgccacagctgctgctcgccctctccctgtctcctctctctttccagccacggtttccccttcccccatccgcgcgctagggcacgaggcaaatctgtggccctctcctagtctcctgaagtccgactcagccgtctcccagctcccgctcgctcgaactcgggttggggaggcacggagtcactgaccccttcgcgttaggcggtgcccttaccggctcttcgtctaaggtgtagtcaagctgccggccacgcccggcacccccctatccagtacaaggccttctccgagatccagtacaaggtcgtcgtctccaagatctgaccccgacgctagtgaggcttgctttgaagggaacccattcaagacagttccaggcccatttaagctcttctggcaatgcatgcgctcaaaacctgggtatgtgtaccttgttattatttatgcgcttaccttctggcatatctcatgattctcatctgatctgcaataagatacgagacaaatatttgatggttctgatgcattaagcactaggttgatgataaatagaaatagacgagctcttatcggggaaatctaaactagcatgtactgactagagtgaagttaattgtaaggagggccactttatcgtgtttatatctttgctatttatttactgaggaggatgtcaactagtaactgcagagatcgctcatgaaggttaatcttgcaagagataaggttttgctggtttcggaactatttactaaggagcaacgttgtgcaggatattgattagtaactacgcatggctttgctcaatttttattttccctgtaactgacatagttactgcattgtgtgcattagtttataatgtggattttggcattctcatagaagctatatgagttccctctccattgatctgaatcaccatagttcatggagtgactgcctgctagtttttggactgtctgtgccatctggtagttagtttctctcagaaaatggccttttgggttgcaagctttcacatgtgatgcattgacgttgcatcttttgtgaaagttgttcttttagttatattgttgggaaggattcttttatgcatagggtagatgtgaaacctgacatatgattagtcagaatatgatatgcatctcagcctggttagtcaataggcaaagttgggtgtactgaggcaacctgtctggcagcttccagttgaagcaagctaatgtgagaacagcttataagcaagtaattgctactgaactgaaatgaacaagtatggttttctgctatgacacaacttgaaaagggtgtgaaaacctctaatgtcatgacattttttatatcgaacataaacttattcctataagattaaaagttgaatacttcagaaaactggtgtacagaagacaccaacttgaggacttcattcaagcttgctgcatgcagccagatgatccaactaggataatggtttgacttgtttaggcaagcatctggttcacaacttaggcatggcccatggcattgtgacaggtggcccttagccttaggtgtgccaactttctaagttacggtgaccttttttcgctgccacaagctagacaaaaaaaagtgtgggaacaccaggttttctaagccgaatgatccaaaaagactgctggattcttcttcgtgcttatttcaatattgaaaattttgcattgtgtattatcaccctgaagatttattcccctttttcattgtcatcagaggtatttcacgaatggacctgtggttttcagggaggaaccaaccgagccctatacctacctgcagctagatcctccgagaagggtggaagtgaatctggagcaaacaggaagtgaaccttgaacgagcatgcctagtttagcatctcgtgcctatttgtcttcacctttcgagcagactttttcctcctagggatcacatcatcttccactatgggtctaagcagcagtatttcggtccagaaaaccttgtatgaggttttatctgtgagcgaagacgctacgtatgatgaaattcgtgcagcatacaggtctgctgctctgaacacacaccctgacaaggcacggacacctctcgagtcatgtgttctttccggtgagcaacaggaattttctagtgtgcagaaagcatgggaaatcctacgccatcctacatctagagcagactacgataagcagctgcagtcatccagacagaacatcgagatcatcgcatctgaagtccaagtcggggatatgatcattgagagcactgccgatgccgatactgtagagctgtcgtacccatgcaggtgcggtgattacttttccatcacttcgtgcgagcttagcgggatgggaatttccgtcagtggagatggagatggagaggtagagctgcaggcgtccgattctccgtcggcttccgttgttctgggctgcggctcttgttctctcaaaatacggttggttttatagatggaactccatgatatatattgtgtgcggctcagcaatgctcactttaaactttagcagccaccacatgtttctcaaacactatgcctcctggtctgccgaaatcaaaatagtgcagcttaaccttgcctgttcctatttccgggagagatgtcgagtttgtaacctgatggtggttgcgttgtgataaatgacgttttttgaccgttgttatcagctaaccaccgctgtcgaatccagctgctgggaaatccaaagttgttccggtggtggttattcggtagatgagatcttcagttaatgttgttttacaggcccgatttaatggtcccatctgccagccattcacctaaataatagctaaactaatgttttggcatcagctaaatgagtgtctttgatagatgctgatgagaagcagtgttagttgcggcc

SEQ ID NO: 21946 - DNA, 484 bp, Zea Mays
ctaactcccatcccatcccatcccatcccagccgccacagctgctgctcgccctctccctgtctcctctctctttccagccacggtttccccttcccccatccgcgcgctagggcacgaggcaaatctgtggccctctcctagtctcctgaagtccgactcagccgtctcccagctcccgctcgctcgaactcgggttggggaggcacggagtcactgaccccttcgcgttaggcggtgcccttaccggctcttcgtctaaggtgtagtcaagctgccggccacgcccggcacccccctatccagtacaaggccttctccgagatccagtacaaggtcgtcgtctccaagatctgaccccgacgctagtgaggcttgctttgaagggaacccattcaagacagttccaggcccatttaagctcttctggcaatgcatgcgctcaaaacctggaggtatttcacgaatggacctgtggttttcag

SEQ ID NO: 21947 - DNA, 2246 bp, Zea Mays
tcccatcccatcccatcccatcccagccgccacagctgctgctcgccctctccctgtctcctctctctttccagccacggtttccccttcccccatccgcgcgctagggcacgaggcaaatctgtggccctctcctagtctcctgaagtccgactcagccgtctcccagctcccgctcgctcgaactcgggttggggaggcacggagtcactgaccccttcgcgttaggcggtgcccttaccggctcttcgtctaaggtgtagtcaagctgccggccacgcccggcacccccctatccagtacaaggccttctccgagatccagtacaaggtcgtcgtctccaagatctgaccccgacgctagtgagggaagagtgggtggacgaagtgggggaggatgagcgaggagaggccggtgccgcggcgggagagcccgtggggtctgcctgagggcgacacgcggcagcccaaggctcaccgctgcaacgaccgcgccgaggacgtcgtccaggcttgctttgaagggaacccattcaagacagttccaggcccatttaagctcttctggcaatgcatgcgctcaaaacctggggaggaaccaaccgagccctatacctacctgcagctagatcctccgagaagggtggaagtgaatctggagcaaacaggaagtgaaccttgaacgagcatgcctagtttagcatctcgtgcctatttgtcttcacctttcgagcagactttttcctcctagggatcacatcatgtgagcacaaagctgcatatgtttggatgtttatataatctacctaataaaccgtgatccccagagctgcctgtccaggctgccaactccttgaaatttgctgatgctggtgtaagaattgtgcccctttcttctgataaatggtgcacgcccaagtccacatgccgccagacatcagagctagtgcatctgaatggttgtgctcctgttctgaaacagagtgatccatatggtttttgtgtgtttgtccatactttcatatagcatactagtgtagccgtacagtttacaagctgtatataaggccatccatccattctccagttctcttggtgcatctgaactattttgtcttaagaggggcatttggccccttggttgccaaacacccgagtgaaaaaaaaatctcccagggaattgaagtgtcatttaaaatccccttggtgcattactttcctggcttttttgtccatttgttgccaaactagccctaactgttctttttaccccttccagcttccactatgggtctaagcagcagtatttcggtccagaaaaccttgtatgaggttttatctgtgagcgaagacgctacgtatgatgaaattcgtgcagcatacaggtctgctgctctgaacacacaccctgacaaggcacggacacctctcgagtcatgtgttctttccggtgagcaacaggaattttctagtgtgcagaaagcatgggaaatcctacgccatcctacatctagagcagactacgataagcagctgcagtcatccagacagaacatcgagatcatcgcatctgaagtccaagtcggggatatgatcattgagagcactgccgatgccgatactgtagagctgtcgtacccatgcaggtgcggtgattacttttccatcacttcgtgcgagcttagcgggatgggaatttccgtcagtggagatggagatggagaggtagagctgcaggcgtccgattctccgtcggcttccgttgttctgggctgcggctcttgttctctcaaaatacggttggttttatagatggaactccatgatatatattgtgtgcggctcagcaatgctcactttaaactttagcagccaccacatgtttctcaaacactatgcctcctggtctgccgaaatcaaaatagtgcagcttaaccttgcctgttcctatttccgggagagatgtcgagtttgtaacctgatggtggttgcgttgtgataaatgacgttttttgaccgttgttatcagctaaccaccgctgtcgaatccagctgctgggaaatccaaagttgttccggtggtggttattcggtagatgagatcttcagttaatgttgttttacaggcccgatttaatggtcccatctgccagccattcacctaaataatagctaaactaatgttttggcatcagctaaatgagtgtctttgatagatgctgatgagaagcagtgttagttgcggcc

SEQ ID NO: 21948 - DNA, 2652 bp, Zea Mays
atttttacgaagttaacgtgaatgacaaaagggtgcgcatcatttggagtcttaaaaaatccaaatttctccactgttggatggctgttgggccggccgataaacaattttcccgttcgagcgtctcgcttctcccgttcccgatcccgatcccgatcccgatcccgatccctgcgtcctttcgcttatcccgttgatccggcgttcactcgtgcgatctcctgtggcgacaactgggcgatcgacgccgccgctgctgtcgccgtcctatacgagaggtgcgcaggcgttcgttggtcccttcgccaggcttttgtctacccttcgccgacgacgagcacaagccagatttctttgtctgacttgtggaagcctcttacaactattgtacaaggctgctgtattgaagatgtctgagttccttgacctagagctacaagatgggataaggatgccctggaatgttattccaggcacaaaacaggagactgtgaactgtgtgattcctgtttccgctatctacacacctttgaaaccaatttctgatatccctgttcttccatattcacctcttcgctgtcgcatgtgtcgttccatcctcaaccctttctccattgttgactatgttgctaagatttgggtctgttcattctgctttcaacgcaaccagttccctcaacactactcttcgatctcagaaaataatctccctgcggaactctttcctcagtacaccaccgtcgagtacatatcttcaactgaaactggtcctatagttccaccggttttcatttttgttgtagatacttgcatgattgaagaagaaattggttatttgaagtctgcactggcacaagctgttgagctattgccagataattctcttgttggattcattacgttcgggacgtatgtgcaggttcatgaattgggttttggcttattgccaaaatcatatgtattcaaaggaacaaaggaggtcaccaaggagcaaatattggaacaaatgtgcttttttgcggggaagaaaatgcctaccacaggcgtgattgctggtaccagagatggcctttcatctgagagcatctctagatttctgctgcctgcttctgaatgcgagtttgtattgaactcagttatagaagaaatacaaaaggacccttggcctgttccagctgatcagcgtgcatctaggtgcactggagctgccttaagtgttgcagccaatctccttggggtttgtgttcctggatcaggtgctaggataatggcatttgttggtggtccatctacggagggccctggtcctattgtatccaaatccttatcagagcccattcgttcacacaaagaccttgataaagactcggcaccactctatgataaagctgttaagttttatgatcaaattgcaaagcagcttgtgcaccaagggcatgtgctggatttgtttgcttgtgcagttgaccaggttggagtcgctgaaatgaaggttgcgattgagaagactggaggaattgttgtccttgctgaaagttttggtcattctgttttcaaagactcacttctccgcatctttcagtcaacagatgacaaccttggtttatcattcaatggtattcttgaaattaactgttcaaaggatgtaaaggttcaaggcatcattggaccctgttcttccctggagaagaaaagtcctttgtcttccgacactgttattggtcaaggaaacactagcgcttggaagatgtgcggccttgacaggaagacatcactttgcttggtatatgatattgcaaaaaaagatggcccagattcaattgctcaatcagcaaacaatcagttctacttccagttcttaacctactatcagcataatgagggtcagatgagattaagatcgaccacaatctccagaagatgggtctctggtgacaaccatgtggaggaactagtagctggctttgatcaagaagctgcagctgcagtcatggcacgcttggtgtcatttaagatggaaactgaggttgattttgacccagtaaggtggcttgatcgagctttgatacgtttatgctcaaaatttggagattatcagaaggagacaccctcatcgttcagtttatccccacggctatcaatatttccccaatttatatttaatttgaggcgttctcagtttgttcaggtttttaataacagtcctgatgaaactgcgtattttaggatgatgttggacagagagaatgtaaccaatacagttgtgatgattcaaccttcacttatatcctattcatttcaatcagggccagagccagttctcttggatgcaactgcaattgcttctgacaagatccttttattggactcttattttactgttgtcatattccatggggtaaccattgcgcagtggcgaaatgctggctaccaagatcaagaaggtcacgaggtttttgctcagttgttaaaagctccacatgaggaagctaatttaataataaaggagcgatttcctgtaccccgtttggtagtctgtgatcaatatggatctcaggctcgatttttactggcgaagttaaatccatcagtgacatataactcggacaatccctcccctggtggagacgtcatattcacagatgatgtgag

SEQ ID NO: 21949 - DNA, 2663 bp, Zea Mays
atttttacgaagttaacgtgaatgacaaaagggtgcgcatcatttggagtcttaaaaaatccaaatttctccactgttggatggctgttgggccggccgataaacaattttcccgttcgagcgtctcgcttctcccgttcccgatcccgatcccgatcccgatcccgatccctgcgtcctttcgcttatcccgttgatccggcgttcactcgtgcgatctcctgtggcgacaactgggcgatcgacgccgccgctgctgtcgccgtcctatacgagaggtgcgcaggcgttcgttggtcccttcgccaggcttttgtctacccttcgccgacgacgagcacaatttatttgcaggccagatttctttgtctgacttgtggaagcctcttacaactattgtacaaggctgctgtattgaagatgtctgagttccttgacctagagctacaagatgggataaggatgccctggaatgttattccaggcacaaaacaggagactgtgaactgtgtgattcctgtttccgctatctacacacctttgaaaccaatttctgatatccctgttcttccatattcacctcttcgctgtcgcatgtgtcgttccatcctcaaccctttctccattgttgactatgttgctaagatttgggtctgttcattctgctttcaacgcaaccagttccctcaacactactcttcgatctcagaaaataatctccctgcggaactctttcctcagtacaccaccgtcgagtacatatcttcaactgaaactggtcctatagttccaccggttttcatttttgttgtagatacttgcatgattgaagaagaaattggttatttgaagtctgcactggcacaagctgttgagctattgccagataattctcttgttggattcattacgttcgggacgtatgtgcaggttcatgaattgggttttggcttattgccaaaatcatatgtattcaaaggaacaaaggaggtcaccaaggagcaaatattggaacaaatgtgcttttttgcggggaagaaaatgcctaccacaggcgtgattgctggtaccagagatggcctttcatctgagagcatctctagatttctgctgcctgcttctgaatgcgagtttgtattgaactcagttatagaagaaatacaaaaggacccttggcctgttccagctgatcagcgtgcatctaggtgcactggagctgccttaagtgttgcagccaatctccttggggtttgtgttcctggatcaggtgctaggataatggcatttgttggtggtccatctacggagggccctggtcctattgtatccaaatccttatcagagcccattcgttcacacaaagaccttgataaagactcggcaccactctatgataaagctgttaagttttatgatcaaattgcaaagcagcttgtgcaccaagggcatgtgctggatttgtttgcttgtgcagttgaccaggttggagtcgctgaaatgaaggttgcgattgagaagactggaggaattgttgtccttgctgaaagttttggtcattctgttttcaaagactcacttctccgcatctttcagtcaacagatgacaaccttggtttatcattcaatggtattcttgaaattaactgttcaaaggatgtaaaggttcaaggcatcattggaccctgttcttccctggagaagaaaagtcctttgtcttccgacactgttattggtcaaggaaacactagcgcttggaagatgtgcggccttgacaggaagacatcactttgcttggtatatgatattgcaaaaaaagatggcccagattcaattgctcaatcagcaaacaatcagttctacttccagttcttaacctactatcagcataatgagggtcagatgagattaagatcgaccacaatctccagaagatgggtctctggtgacaaccatgtggaggaactagtagctggctttgatcaagaagctgcagctgcagtcatggcacgcttggtgtcatttaagatggaaactgaggttgattttgacccagtaaggtggcttgatcgagctttgatacgtttatgctcaaaatttggagattatcagaaggagacaccctcatcgttcagtttatccccacggctatcaatatttccccaatttatatttaatttgaggcgttctcagtttgttcaggtttttaataacagtcctgatgaaactgcgtattttaggatgatgttggacagagagaatgtaaccaatacagttgtgatgattcaaccttcacttatatcctattcatttcaatcagggccagagccagttctcttggatgcaactgcaattgcttctgacaagatccttttattggactcttattttactgttgtcatattccatggggtaaccattgcgcagtggcgaaatgctggctaccaagatcaagaaggtcacgaggtttttgctcagttgttaaaagctccacatgaggaagctaatttaataataaaggagcgatttcctgtaccccgtttggtagtctgtgatcaatatggatctcaggctcgatttttactggcgaagttaaatccatcagtgacatataactcggacaatccctcccctggtggagacgtcatattcacagatgatgtgag

SEQ ID NO: 21950 - DNA, 2592 bp, Zea Mays
aaaaaatccaaatttctccactgttggatggctgttgggccggccgataaacaattttcccgttcgagcgtctcgcttctcccgttcccgatcccgatcccgatcccgatcccgatccctgcgtcctttcgcttatcccgttgatccggcgttcactcgtgcgatctcctgtggcgacaactgggcgatcgacgccgccgctgctgtcgccgtcctatacgagaggtgcgcaggcgttcgttggtcccttcgccaggcttttgtctacccttcgccgacgacgagcacaagccagatttctttgtctgacttgtggaagcctcttacaactattgtacaaggctgctgtattgaagatgtctgagttccttgacctagagctacaagatgggataaggatgccctggaatgttattccaggcacaaaacaggagactgtgaactgtgtgattcctgtttccgctatctacacacctttgaaaccaatttctgatatccctgttcttccatattcacctcttcgctgtcgcatgtgtcgttccatcctcaaccctttctccattgttgactatgttgctaagatttgggtctgttcattctgctttcaacgcaaccagttccctcaacactactcttcgatctcagaaaataatctccctgcggaactctttcctcagtacaccaccgtcgagtacatatcttcaactgaaactggtcctatagttccaccggttttcatttttgttgtagatacttgcatgattgaagaagaaattggttatttgaagtctgcactggcacaagctgttgagctattgccagataattctcttgttggattcattacgttcgggacgtatgtgcaggttcatgaattgggttttggcttattgccaaaatcatatgtattcaaaggaacaaaggaggtcaccaaggagcaaatattggaacaaatgtgcttttttgcggggaagaaaatgcctaccacaggcgtgattgctggtaccagagatggcctttcatctgagagcatctctagatttctgctgcctgcttctgaatgcgagtttgtattgaactcagttatagaagaaatacaaaaggacccttggcctgttccagctgatcagcgtgcatctaggtgcactggagctgccttaagtgttgcagccaatctccttggggtttgtgttcctggatcaggtgctaggataatggcatttgttggtggtccatctacggagggccctggtcctattgtatccaaatccttatcagagcccattcgttcacacaaagaccttgataaagactcggcaccactctatgataaagctgttaagttttatgatcaaattgcaaagcagcttgtgcaccaagggcatgtgctggatttgtttgcttgtgcagttgaccaggttggagtcgctgaaatgaaggttgcgattgagaagactggaggaattgttgtccttgctgaaagttttggtcattctgttttcaaagactcacttctccgcatctttcagtcaacagatgacaaccttggtttatcattcaatggtattcttgaaattaactgttcaaaggatgtaaaggttcaaggcatcattggaccctgttcttccctggagaagaaaagtcctttgtcttccgacactgttattggtcaaggaaacactagcgcttggaagatgtgcggccttgacaggaagacatcactttgcttggtatatgatattgcaaaaaaagatggcccagattcaattgctcaatcagcaaacaatcagttctacttccagttcttaacctactatcagcataatgagggtcagatgagattaagatcgaccacaatctccagaagatgggtctctggtgacaaccatgtggagtagctggctttgatcaagaagctgcagctgcagtcatggcacgcttggtgtcatttaagatggaaactgaggttgattttgacccagtaaggtggcttgatcgagctttgatacgtttatgctcaaaatttggagattatcagaaggagacaccctcatcgttcagtttatccccacggctatcaatatttccccaatttatatttaatttgaggcgttctcagtttgttcaggtttttaataacagtcctgatgaaactgcgtattttaggatgatgttggacagagagaatgtaaccaatacagttgtgatgattcaaccttcacttatatcctattcatttcaatcagggccagagccagttctcttggatgcaactgcaattgcttctgacaagatccttttattggactcttattttactgttgtcatattccatggggtaaccattgcgcagtggcgaaatgctggctaccaagatcaagaaggtcacgaggtttttgctcagttgttaaaagctccacatgaggaagctaatttaataataaaggagcgatttcctgtaccccgtttggtagtctgtgatcaatatggatctcaggctcgatttttactggcgaagttaaatccatcagtgacatataactcggacaatccctcccctggtggagacgtcatattcacagatgatgtgag

SEQ ID NO: 21951 - DNA, 2618 bp, Zea Mays
aaaaaatccaaatttctccactgttggatggctgttgggccggccgataaacaattttcccgttcgagcgtctcgcttctcccgttcccgatcccgatcccgatcccgatcccgatccctgcgtcctttcgcttatcccgttgatccggcgttcactcgtgcgatctcctgtggcgacaactgggcgatcgacgccgccgctgctgtcgccgtcctatacgagaggtgcgcaggcgttcgttggtcccttcgccaggcttttgtctacccttcgccgacgacgagcacaatttatttgcaggccagatttctttgtctgacttgtggaagcctcttacaactattgtacaaggctgctgtattgaagatgtctgagttccttgacctagagctacaagatgggataaggatgccctggaatgttattccaggcacaaaacaggagactgtgaactgtgtgattcctgtttccgctatctacacacctttgaaaccaatttctgatatccctgttcttccatattcacctcttcgctgtcgcatgtgtcgttccatcctcaaccctttctccattgttgactatgttgctaagatttgggtctgttcattctgctttcaacgcaaccagttccctcaacactactcttcgatctcagaaaataatctccctgcggaactctttcctcagtacaccaccgtcgagtacatatcttcaactgaaactggtcctatagttccaccggttttcatttttgttgtagatacttgcatgattgaagaagaaattggttatttgaagtctgcactggcacaagctgttgagctattgccagataattctcttgttggattcattacgttcgggacgtatgtgcaggttcatgaattgggttttggcttattgccaaaatcatatgtattcaaaggaacaaaggaggtcaccaaggagcaaatattggaacaaatgtgcttttttgcggggaagaaaatgcctaccacaggcgtgattgctggtaccagagatggcctttcatctgagagcatctctagatttctgctgcctgcttctgaatgcgagtttgtattgaactcagttatagaagaaatacaaaaggacccttggcctgttccagctgatcagcgtgcatctaggtgcactggagctgccttaagtgttgcagccaatctccttggggtttgtgttcctggatcaggtgctaggataatggcatttgttggtggtccatctacggagggccctggtcctattgtatccaaatccttatcagagcccattcgttcacacaaagaccttgataaagactcggcaccactctatgataaagctgttaagttttatgatcaaattgcaaagcagcttgtgcaccaagggcatgtgctggatttgtttgcttgtgcagttgaccaggttggagtcgctgaaatgaaggttgcgattgagaagactggaggaattgttgtccttgctgaaagttttggtcattctgttttcaaagactcacttctccgcatctttcagtcaacagatgacaaccttggtttatcattcaatggtattcttgaaattaactgttcaaaggatgtaaaggttcaaggcatcattggaccctgttcttccctggagaagaaaagtcctttgtcttccgacactgttattggtcaaggaaacactagcgcttggaagatgtgcggccttgacaggaagacatcactttgcttggtatatgatattgcaaaaaaagatggcccagattcaattgctcaatcagcaaacaatcagttctacttccagttcttaacctactatcagcataatgagggtcagatgagattaagatcgaccacaatctccagaagatgggtctctggtgacaaccatgtggaggaactagtagctggctttgatcaagaagctgcagctgcagtcatggcacgcttggtgtcatttaagatggaaactgagtattccaggttgattttgacccagtaaggtggcttgatcgagctttgatacgtttatgctcaaaatttggagattatcagaaggagacaccctcatcgttcagtttatccccacggctatcaatatttccccaatttatatttaatttgaggcgttctcagtttgttcaggtttttaataacagtcctgatgaaactgcgtattttaggatgatgttggacagagagaatgtaaccaatacagttgtgatgattcaaccttcacttatatcctattcatttcaatcagggccagagccagttctcttggatgcaactgcaattgcttctgacaagatccttttattggactcttattttactgttgtcatattccatggggtaaccattgcgcagtggcgaaatgctggctaccaagatcaagaaggtcacgaggtttttgctcagttgttaaaagctccacatgaggaagctaatttaataataaaggagcgatttcctgtaccccgtttggtagtctgtgatcaatatggatctcaggctcgatttttactggcgaagttaaatccatcagtgacatataactcggacaatccctcccctggtggagacgtcatattcacagatgatgtgag

SEQ ID NO: 21952 - DNA, 2613 bp, Zea Mays
aaaaaatccaaatttctccactgttggatggctgttgggccggccgataaacaattttcccgttcgagcgtctcgcttctcccgttcccgatcccgatcccgatcccgatcccgatccctgcgtcctttcgcttatcccgttgatccggcgttcactcgtgcgatctcctgtggcgacaactgggcgatcgacgccgccgctgctgtcgccgtcctatacgagaggtgcgcaggcgttcgttggtcccttcgccaggcttttgtctacccttcgccgacgacgagcacaagccagatttctttgtctgacttgtggaagcctcttacaactattgtacaaggctgctgtattgaagatgtctgagttccttgacctagagctacaagatgggataaggatgccctggaatgttattccaggcacaaaacaggagactgtgaactgtgtgattcctgtttccgctatctacacacctttgaaaccaatttctgatatccctgttcttccatattcacctcttcgctgtcgcatgtgtcgttccatcctcaaccctttctccattgttgactatgttgctaagatttgggtctgttcattctgctttcaacgcaaccagttccctcaacactactcttcgatctcagaaaataatctccctgcggaactctttcctcagtacaccaccgtcgagtacatatcttcaactgaaactggtcctatagttccaccggttttcatttttgttgtagatacttgcatgattgaagaagaaattggttatttgaagtctgcactggcacaagctgttgagctattgccagataattctcttgttggattcattacgttcgggacgtatgtgcaggttcatgaattgggttttggcttattgccaaaatcatatgtattcaaaggaacaaaggaggtcaccaaggagcaaatattggaacaaatgtgcttttttgcggggaagaaaatgcctaccacaggcgtgattgctggtaccagagatggcctttcatctgagagcatctctagatttctgctgcctgcttctgaatgcgagtttgtattgaactcagttatagaagaaatacaaaaggacccttggcctgttccagctgatcagcgtgcatctaggtgcactggagctgccttaagtgttgcagccaatctccttggggtttgtgttcctggatcaggtgctaggataatggcatttgttggtggtccatctacggagggccctggtcctattgtatccaaatccttatcagagcccattcgttcacacaaagaccttgataaagactcggcaccactctatgataaagctgttaagttttatgatcaaattgcaaagcagcttgtgcaccaagggcatgtgctggatttgtttgcttgtgcagttgaccaggttggagtcgctgaaatgaaggttgcgattgagaagactggaggaattgttgtccttgctgaaagttttggtcattctgttttcaaagactcacttctccgcatctttcagtcaacagatgacaaccttggtttatcattcaatggtattcttgaaattaactgttcaaaggatgtaaaggttcaaggcatcattggaccctgttcttccctggagaagaaaagtcctttgtcttccgacactgttattggtcaaggaaacactagcgcttggaagatgtgcggccttgacaggaagacatcactttgcttggtatatgatattgcaaaaaaagatggcccagattcaattgctcaatcagcaaacaatcagttctacttccagttcttaacctaaatgcaacattcagctatcagcataatgagggtcagatgagattaagatcgaccacaatctccagaagatgggtctctggtgacaaccatgtggaggaactagtagctggctttgatcaagaagctgcagctgcagtcatggcacgcttggtgtcatttaagatggaaactgaggttgattttgacccagtaaggtggcttgatcgagctttgatacgtttatgctcaaaatttggagattatcagaaggagacaccctcatcgttcagtttatccccacggctatcaatatttccccaatttatatttaatttgaggcgttctcagtttgttcaggtttttaataacagtcctgatgaaactgcgtattttaggatgatgttggacagagagaatgtaaccaatacagttgtgatgattcaaccttcacttatatcctattcatttcaatcagggccagagccagttctcttggatgcaactgcaattgcttctgacaagatccttttattggactcttattttactgttgtcatattccatggggtaaccattgcgcagtggcgaaatgctggctaccaagatcaagaaggtcacgaggtttttgctcagttgttaaaagctccacatgaggaagctaatttaataataaaggagcgatttcctgtaccccgtttggtagtctgtgatcaatatggatctcaggctcgatttttactggcgaagttaaatccatcagtgacatataactcggacaatccctcccctggtggagacgtcatattcacagatgatgtgag

SEQ ID NO: 21953 - DNA, 2350 bp, Zea Mays
ggtcttccttgcacttgagctgattgaacttttatttgcaggccagatttctttgtctgacttgtggaagcctcttacaactattgtacaaggctgctgtattgaagatgtctgagttccttgacctagagctacaagatgggataaggatgccctggaatgttattccaggcacaaaacaggagactgtgaactgtgtgattcctgtttccgctatctacacacctttgaaaccaatttctgatatccctgttcttccatattcacctcttcgctgtcgcatgtgtcgttccatcctcaaccctttctccattgttgactatgttgctaagatttgggtctgttcattctgctttcaacgcaaccagttccctcaacactactcttcgatctcagaaaataatctccctgcggaactctttcctcagtacaccaccgtcgagtacatatcttcaactgaaactggtcctatagttccaccggttttcatttttgttgtagatacttgcatgattgaagaagaaattggttatttgaagtctgcactggcacaagctgttgagctattgccagataattctcttgttggattcattacgttcgggacgtatgtgcaggttcatgaattgggttttggcttattgccaaaatcatatgtattcaaaggaacaaaggaggtcaccaaggagcaaatattggaacaaatgtgcttttttgcggggaagaaaatgcctaccacaggcgtgattgctggtaccagagatggcctttcatctgagagcatctctagatttctgctgcctgcttctgaatgcgagtttgtattgaactcagttatagaagaaatacaaaaggacccttggcctgttccagctgatcagcgtgcatctaggtgcactggagctgccttaagtgttgcagccaatctccttggggtttgtgttcctggatcaggtgctaggataatggcatttgttggtggtccatctacggagggccctggtcctattgtatccaaatccttatcagagcccattcgttcacacaaagaccttgataaagactcggcaccactctatgataaagctgttaagttttatgatcaaattgcaaagcagcttgtgcaccaagggcatgtgctggatttgtttgcttgtgcagttgaccaggttggagtcgctgaaatgaaggttgcgattgagaagactggaggaattgttgtccttgctgaaagttttggtcattctgttttcaaagactcacttctccgcatctttcagtcaacagatgacaaccttggtttatcattcaatggtattcttgaaattaactgttcaaaggatgtaaaggttcaaggcatcattggaccctgttcttccctggagaagaaaagtcctttgtcttccgacactgttattggtcaaggaaacactagcgcttggaagatgtgcggccttgacaggaagacatcactttgcttggtatatgatattgcaaaaaaagatggcccagattcaattgctcaatcagcaaacaatcagttctacttccagttcttaacctactatcagcataatgagggtcagatgagattaagatcgaccacaatctccagaagatgggtctctggtgacaaccatgtggaggaactagtagctggctttgatcaagaagctgcagctgcagtcatggcacgcttggtgtcatttaagatggaaactgaggttgattttgacccagtaaggtggcttgatcgagctttgatacgtttatgctcaaaatttggagattatcagaaggagacaccctcatcgttcagtttatccccacggctatcaatatttccccaatttatatttaatttgaggcgttctcagtttgttcaggtttttaataacagtcctgatgaaactgcgtattttaggatgatgttggacagagagaatgtaaccaatacagttgtgatgattcaaccttcacttatatcctattcatttcaatcagggccagagccagttctcttggatgcaactgcaattgcttctgacaagatccttttattggactcttattttactgttgtcatattccatggggtaaccattgcgcagtggcgaaatgctggctaccaagatcaagaaggtcacgaggtttttgctcagttgttaaaagctccacatgaggaagctaatttaataataaaggagcgatttcctgtaccccgtttggtagtctgtgatcaatatggatctcaggctcgatttttactggcgaagttaaatccatcagtgacatataactcggacaatccctcccctggtggagacgtcatattcacagatgatgtgag

SEQ ID NO: 21954 - DNA, 1207 bp, Zea Mays
agatctccggatcgctgatccactagtcgagaatccagatctctcgcctgctcgctaccaaataccaaccacgaagaacaggaagaatgcccaaactgtcgtgtcgggtgctctttgcggctcttctcatcgcttcgctagccgctctgctcgtccggttcccgatccacaggctcctcaatccccacgccgccatggaccccgactccgagctcgagttcgagatgcccggcgtcttgcgtgtgtacaagaccggccgcgtcgagcgcttcgacggcaccgagaccgtcccgccctgccccgatggcgatcccgccaacggcgtcgcgtccaaggacatcgtcctggaccccgccgcaggcatctccgcccgcctctacctacccgcgggagtggatgccgggaagaagctccccgtcgttgtgttcttccacggcggtgcgttcatggtccacaccgccgcctccccgctgtaccacatctacgccgcctccctcgctgccgcggtgcccgccgtcgtcgtctccgttgactaccgcctagcgcccgagcaccgcatccccgccgcctacgacgacgcattcgcggccttgaaggcggtcatcgccgcgtgccgcgcggatggcgccgaggcggaagctgagccctggctcgccgctcacggcgacgcctcccgcatcgtccttgcgggggacagcgccggcggtaacatggcgcacaacgtggcgataaggctgcgcaaggaaggcggcatcgagggttacggcgacatggtcagcggcgtcgtcctcctgtacccttatttctgggggaaggagccgctgggcgcggagcccacggatcccggctaccgcgcaatgttcgatcccacttgggaattcatctgcggcggaaagttcggcctcgaccacccctacgtcaacccaatggcatcgccggaggagtggaggcagcttggttcccgccgcgtgctggtgaccacggcggaccagtgctggttcgtggagagggcaagggcttacgcagagggaatcaagaagtgcggctgggagggggagctcgagttctacgagaccaagggtgaggcgcacgtcttcttcttgcctaaacacggcagcgaaaaagccgtgaaggagctcgccctcgtggccgaattcgtccggcgctgttgagtatcagcgtcaaaatagtgttatgatcagaagag

SEQ ID NO: 21955 - DNA, 2717 bp, Zea Mays
cgacgccgctggcggtggccgcgataactacaacccgagaggccgagaccaattcccaccacaacacacaaggaagcctgcgcaccgccaccaccattcaccgccgccgaagcccgattcccagagacgcctctccttgcccccgtccccaaccccaaccaaagccaccgccgaatcgccttaatctggctggagcgcgccttggagccgtccggacctcagagctcacggggaatctttaatggcgtcggagtcgcatcgccagccataggagcctgattgacagaggcgccgattgccgactgccgactggcaactggcgaggcgatcacttgtcaatcctgtgctatccttttctcggcgcattgtcttgctttgttgatgcatacggcaccgccgatgaatggccgatctcggaggccggcagcggcgcgcggcgcgaaagcggcccccaagagcgacagcagagtgatggagaaggatccgaggaaggccgcgacaccggcgaagggaccggccaacgcgggcacccgggtcaccatgaacagaatccagtcgagagagcgcaagctcgcgctgcagcaagatgtggataagctcaagaagaagctgcgccacgaggagaacgtccaccgcgctctggagcgggcgttcacgcggccgctcggcgccctgcctcgcctgccgccgtatctgccgtctcagacgctagctcttctcgcggaggtggcggtgcttgaggaggaggtcgtccggctggaggagcaagtggtgagtttccggcaagggatctaccaggaggcgatcatcttctcctccaccaagaacgcccagctccccgacggccaagttcccgtgccggcgcagctcgtaccgtcgtacccggtgctgaattccgaggtctcaccggcgacagtgagccaaggtcctccagaccatcctcccggcgctcgtccgtcgccgcacagcggcgtggccaacggcaagcaaacgccacggaaccccgttgctacctcgccgagccaggatgaccggtccggggcagggaaagagaaccagtcgtgcagcaacacgccgagcacgagcagccgccagtcgccgtcgcagcagaagacgcccaagtgcagggcgacgccgcctgacaggcgcagggttactcctgctcagtgtgtagatggtgttcgcgtcgtccatgcagacaagccctgctgttgcgcctgaccgtaaacggcctgccgacgctgctgctggcactggcagcaactctgacaacgtgacgacgtcccacgacgacgcgagctcgagcgtgccgaacaaagtatcggaggagctgctccggtgcctgctggccatcttctcgcagatggggggctcggctgctggcggcggccgaggactaggagacgaggaccagcaggcgctgtccccgtcggtctccggctccagcgagagctcggcgtcgtcggaggcggacgcgtacccgcaggacccctacggcatcctggagctgggcgccagggacatcggcgcctacaagcggttccacgtggtcgacgccgcgtccttcgacggcaacggcgacacgcctctcgttcgtcggagactcaaggccttgctgcggaggctgtcgtcggttgacctggcggggctctcccatcagcagaagctggccttctggatcaacgtctacaattcctgcatgatgaacgcgttcctggagcatgggatacctaccaccccgcaaatgctcgtggcgatgatgcccaaggccaccgtgagcgttggtgggcgcacgcacagcgccatgtccatcgagcatttcatcctgaggctgccctacagcgccaagcaggtgaaggtgagccgggaaggggccaagtgcgacgacggcgacgtgacggcggcgcgcggcgcgttcgggctggagtggcccgagcccctcgtcaccttcgcgctctcctgcggcagctggtcgtcccccgcggtgagggtgtacacggcggcgcgcgtggaggaggagctggaggcggcgaagcgggagtacctacaggcggccgcgggcgtgtgggcggcggggaggctggcggtcccgaagctcctgcactggtacctgctggacttcgccaaggacgtggacgcgctcatggactgggtctgcctgcagctgccgccggagctgcggcaggaggcggtgcgggccgtggaggtcggccgccgcgccggcgccggcggccgcgtccgggtcctcccgtacgagttcaggttcaggtacctgttggcctcctgacgacgcgtgcgtactacggtagggagtagtgtagtgccgtgcgtactggaggtagtagtagtaatgtagtagttcgtgcgcaggtctttgcaataataaaacggagatgggattgactatgcagtttttattactagcgttttgtgctgtatgtgtggattcggtagcggtgtaatggtggtttgtgcgcgcgaggaacgtttctactgtgccgtgcggctgtgctccatccacacagcctgcatttttttttttttgcgagcagggttggttggttggttgtcagctggtttcggaaagcacaaaggacactgccactgcagtgcagtgcagtgcacgctgtctctgtcactgatgattaacctggacctgcagccttttttttttgccttttaccttccatcccggtatgtttccccactgatgattg

SEQ ID NO: 21956 - DNA, 2670 bp, Zea Mays
ggccgagaccaattcccaccacaacacacaaggaagcctgcgcaccgccaccaccattcaccgccgccgaagcccgattcccagagacgcctctccttgcccccgtccccaaccccaaccaaagccaccgccgaatcgccttaatctggctggagcgcgccttggagccgtccggacctcagagctcacggggaatctttaatggcgtcggagtcgcatcgccagccataggagcctgattgacagaggcgccgattgccgactgccgactggcaactggcgaggcgatcacttgtcaatcctgtgctatccttttctcggcgcattgtcttgctttgttgatgcatacggcaccgccgatgaatggccgatctcggaggccggcagcggcgcgcggcgcgaaagcggcccccaagagcgacagcagagtgatggagaaggatccgaggaaggccgcgacaccggcgaagggaccggccaacgcgggcacccgggtcaccatgaacagaatccagtcgagagagcgcaagctcgcgctgcagcaagatgtggataagctcaagaagaagctgcgccacgaggagaacgtccaccgcgctctggagcgggcgttcacgcggccgctcggcgccctgcctcgcctgccgccgtatctgccgtctcagacgctagctcttctcgcggaggtggcggtgcttgaggaggaggtcgtccggctggaggagcaagtggtgagtttccggcaagggatctaccaggaggcgatcatcttctcctccaccaagaacgcccagctccccgacggccaagttcccgtgccggcgcagctcgtaccgtcgtacccggtgctgaattccgaggtctcaccggcgacagtgagccaaggtcctccagaccatcctcccggcgctcgtccgtcgccgcacagcggcgtggccaacggcaagcaaacgccacggaaccccgttgctacctcgccgagccaggatgaccggtccggggcagggaaagagaaccagtcgtgcagcaacacgccgagcacgagcagccgccagtcgccgtcgcagcagaagacgcccaagtgcagggcgacgccgcctgacaggcgcagggttactcctgctcagatggtgttcgcgtcgtccatgcagacaagccctgctgttgcgcctgaccgtaaacggcctgccgacgctgctgctggcactggcagcaactctgacaacgtgacgacgtcccacgacgacgcgagctcgagcgtgccgaacaaagtatcggaggagctgctccggtgcctgctggccatcttctcgcagatggggggctcggctgctggcggcggccgaggactaggagacgaggaccagcaggcgctgtccccgtcggtctccggctccagcgagagctcggcgtcgtcggaggcggacgcgtacccgcaggacccctacggcatcctggagctgggcgccagggacatcggcgcctacaagcggttccacgtggtcgacgccgcgtccttcgacggcaacggcgacacgcctctcgttcgtcggagactcaaggccttgctgcggaggctgtcgtcggttgacctggcggggctctcccatcagcagaagctggccttctggatcaacgtctacaattcctgcatgatgaacgcgttcctggagcatgggatacctaccaccccgcaaatgctcgtggcgatgatgcccaaggccaccgtgagcgttggtgggcgcacgcacagcgccatgtccatcgagcatttcatcctgaggctgccctacagcgccaagcaggtgaaggtgagccgggaaggggccaagtgcgacgacggcgacgtgacggcggcgcgcggcgcgttcgggctggagtggcccgagcccctcgtcaccttcgcgctctcctgcggcagctggtcgtcccccgcggtgagggtgtacacggcggcgcgcgtggaggaggagctggaggcggcgaagcgggagtacctacaggcggccgcgggcgtgtgggcggcggggaggctggcggtcccgaagctcctgcactggtacctgctggacttcgccaaggacgtggacgcgctcatggactgggtctgcctgcagctgccgccggagctgcggcaggaggcggtgcgggccgtggaggtcggccgccgcgccggcgccggcggccgcgtccgggtcctcccgtacgagttcaggttcaggtacctgttggcctcctgacgacgcgtgcgtactacggtagggagtagtgtagtgccgtgcgtactggaggtagtagtagtaatgtagtagttcgtgcgcaggtctttgcaataataaaacggagatgggattgactatgcagtttttattactagcgttttgtgctgtatgtgtggattcggtagcggtgtaatggtggtttgtgcgcgcgaggaacgtttctactgtgccgtgcggctgtgctccatccacacagcctgcatttttttttttttgcgagcagggttggttggttggttgtcagctggtttcggaaagcacaaaggacactgccactgcagtgcagtgcagtgcacgctgtctctgtcactgatgattaacctggacctgcagccttttttttttgccttttaccttccatcccggtatgtttccccactgatgattg

SEQ ID NO: 21957 - DNA, 2645 bp, Zea Mays
gccgagaccaattcccaccacaacacacaaggaagcctgcgcaccgccaccaccattcaccgccgccgaagcccgattcccagagacgcctctccttgcccccgtccccaaccccaaccaaagccaccgccgaatcgccttaatctggctggagcgcgccttggagccgtccggacctcagagctcacggggaatctttaatggcgtcggagtcgcatcgccagccataggagcctgattgacagaggcgccgattgccgactgccgactggcaactggcgaggcgatcacttgtcaatcctgtgctatccttttctcggcgcattgtcttgctttgttgatgcatacggcaccgccgatgaatggccgatctcggaggccggcagcggcgcgcggcgcgaaagcggcccccaagagcgacagcagagtgatggagaaggatccgaggaaggccgcgacaccggcgaagggaccggccaacgcgggcacccgggtcaccatgaacagaatccagtcgagagagcgcaagctcgcgctgcagcaagatgtggataagctcaagaagaagctgcgccacgaggagaacgtccaccgcgctctggagcgggcgttcacgcggccgctcggcgccctgcctcgcctgccgccgtatctgccgtctcagacgctagctcttctcgcggaggtggcggtgcttgaggaggaggtcgtccggctggaggagcaagtggtgagtttccggcaagggatctaccaggaggcgatcatcttctcctccaccaagaacgcccagctccccgacggccaagttcccgtgccggcgcagctcgtaccgtcgtacccggtgctgaattccgaggtctcaccggcgacagtgagccaaggtcctccagaccatcctcccggcgctcgtccgtcgccgcacagcggcgtggccaacggcaagcaaacgccacggaaccccgttgctacctcgccgagccaggatgaccggtccggggcagggaaagagaaccagtcgtgcagcaacacgccgagcacgagcagccgccagtcgccgtcgcagcagaagacgcccaagtgcagggcgacgccgcctgacaggcgcagggttactcctgctcagacaagccctgctgttgcgcctgaccgtaaacggcctgccgacgctgctgctggcactggcagcaactctgacaacgtgacgacgtcccacgacgacgcgagctcgagcgtgccgaacaaagtatcggaggagctgctccggtgcctgctggccatcttctcgcagatggggggctcggctgctggcggcggccgaggactaggagacgaggaccagcaggcgctgtccccgtcggtctccggctccagcgagagctcggcgtcgtcggaggcggacgcgtacccgcaggacccctacggcatcctggagctgggcgccagggacatcggcgcctacaagcggttccacgtggtcgacgccgcgtccttcgacggcaacggcgacacgcctctcgttcgtcggagactcaaggccttgctgcggaggctgtcgtcggttgacctggcggggctctcccatcagcagaagctggccttctggatcaacgtctacaattcctgcatgatgaacgcgttcctggagcatgggatacctaccaccccgcaaatgctcgtggcgatgatgcccaaggccaccgtgagcgttggtgggcgcacgcacagcgccatgtccatcgagcatttcatcctgaggctgccctacagcgccaagcaggtgaaggtgagccgggaaggggccaagtgcgacgacggcgacgtgacggcggcgcgcggcgcgttcgggctggagtggcccgagcccctcgtcaccttcgcgctctcctgcggcagctggtcgtcccccgcggtgagggtgtacacggcggcgcgcgtggaggaggagctggaggcggcgaagcgggagtacctacaggcggccgcgggcgtgtgggcggcggggaggctggcggtcccgaagctcctgcactggtacctgctggacttcgccaaggacgtggacgcgctcatggactgggtctgcctgcagctgccgccggagctgcggcaggaggcggtgcgggccgtggaggtcggccgccgcgccggcgccggcggccgcgtccgggtcctcccgtacgagttcaggttcaggtacctgttggcctcctgacgacgcgtgcgtactacggtagggagtagtgtagtgccgtgcgtactggaggtagtagtagtaatgtagtagttcgtgcgcaggtctttgcaataataaaacggagatgggattgactatgcagtttttattactagcgttttgtgctgtatgtgtggattcggtagcggtgtaatggtggtttgtgcgcgcgaggaacgtttctactgtgccgtgcggctgtgctccatccacacagcctgcatttttttttttttgcgagcagggttggttggttggttgtcagctggtttcggaaagcacaaaggacactgccactgcagtgcagtgcagtgcacgctgtctctgtcactgatgattaacctggacctgcagccttttttttttgccttttaccttccatcccggtatgtttccccactgatgattg

SEQ ID NO: 21958 - DNA, 2965 bp, Zea Mays
gccgagaccaattcccaccacaacacacaaggaagcctgcgcaccgccaccaccattcaccgccgccgaagcccgattcccagagacgcctctccttgcccccgtccccaaccccaaccaaagccaccgccgaatcgccttaatctggctggagcgcgccttggagccgtccggacctcagagctcacggggaatctttaatggcgtcggagtcgcatcgccagccataggagcctgattgacagaggcgccgattgccgactgccgactggcaactggcgaggcgatcacttgtcaatcctgtgctatccttttctcggcgcattgtcttgctttgttgatgcatacggcaccgccgatgaatggccgatctcggaggccggcagcggcgcgcggcgcgaaagcggcccccaagagcgacagcagagtgatggagaaggatccgaggaaggccgcgacaccggcgaagggaccggccaacgcgggcacccgggtcaccatgaacagaatccagtcgagagagcgcaagctcgcgctgcagcaagatgtggataagctcaagaagaagctgcgccacgaggagaacgtccaccgcgctctggagcgggcgttcacgcggccgctcggcgccctgcctcgcctgccgccgtatctgccgtctcagacgctagctcttctcgcggaggtggcggtgcttgaggaggaggtcgtccggctggaggagcaagtggtgagtttccggcaagggatctaccaggaggcgatcatcttctcctccaccaagaacgcccagctccccgacggccaagttcccgtgccggcgcagctcgtaccgtcgtacccggtgctgaattccgaggtctcaccggcgacagtgagccaaggtcctccagaccatcctcccggcgctcgtccgtcgccgcacagcggcgtggccaacggcaagcaaacgccacggaaccccgttgctacctcgccgagccaggatgaccggtccggggcagggaaagagaaccagtcgtgcagcaacacgccgagcacgagcagccgccagtcgccgtcgcagcagaagacgcccaagtgcagggcgacgccgcctgacaggcgcagggttactcctgctcagtgtgtagatggtgttcgcgtcgtccatgcagacaagccctgctgttgcgcctgaccgtaaacggcctgccgacgctgctgctggcactggcagcaactctgacaacgtgacgacgtcccacgacgacgcgagctcgagcgtgccgaacaaagtatcggaggagctgctccggtgcctgctggccatcttctcgcagatggggggctcggctgctggcggcggccgaggactaggagacgaggaccagcaggcgctgtccccgtcggtctccggctccagcgagagctcggcgtcgtcggaggcggacgcgtacccgcaggacccctacggcatcctggagctgggcgccagggacatcggcgcctacaagcggttccacgtggtcgacgccgcgtccttcgacggcaacggcgacacgcctctcgttcgtcggagactcaaggccttgctgcggaggctgtcgtcggttgacctggcggggctctcccatcagcagaagctggccttctggatcaacgtctacaattcctgcatgatgaacgtaagccatcgggcagtcacatttcagagttgggtgtttcctcttcttgtgtgtttttttttaaaagaagaagacagcaaaattcgcaattcggtttgctattaaagcaactactaacagcctggacatgtgggtactagcttccgggatgcgtgttctttaagcctggtgtctggcggcatgcatgtctgtacagtggcctggccgtgggaagctgcctggttcgccattaataaacctttgcataaagaaatgctccatgtcccccttccctgatcatgattagcaggcgttcctggagcatgggatacctaccaccccgcaaatgctcgtggcgatgatgcccaaggccaccgtgagcgttggtgggcgcacgcacagcgccatgtccatcgagcatttcatcctgaggctgccctacagcgccaagcaggtgaaggtgagccgggaaggggccaagtgcgacgacggcgacgtgacggcggcgcgcggcgcgttcgggctggagtggcccgagcccctcgtcaccttcgcgctctcctgcggcagctggtcgtcccccgcggtgagggtgtacacggcggcgcgcgtggaggaggagctggaggcggcgaagcgggagtacctacaggcggccgcgggcgtgtgggcggcggggaggctggcggtcccgaagctcctgcactggtacctgctggacttcgccaaggacgtggacgcgctcatggactgggtctgcctgcagctgccgccggagctgcggcaggaggcggtgcgggccgtggaggtcggccgccgcgccggcgccggcggccgcgtccgggtcctcccgtacgagttcaggttcaggtacctgttggcctcctgacgacgcgtgcgtactacggtagggagtagtgtagtgccgtgcgtactggaggtagtagtagtaatgtagtagttcgtgcgcaggtctttgcaataataaaacggagatgggattgactatgcagtttttattactagcgttttgtgctgtatgtgtggattcggtagcggtgtaatggtggtttgtgcgcgcgaggaacgtttctactgtgccgtgcggctgtgctccatccacacagcctgcatttttttttttttgcgagcagggttggttggttggttgtcagctggtttcggaaagcacaaaggacactgccactgcagtgcagtgcagtgcacgctgtctctgtcactgatgattaacctggacctgcagccttttttttttgccttttaccttccatcccggtatgtttccccactgatgattg

SEQ ID NO: 21959 - DNA, 3123 bp, Zea Mays
ccgagaccaattcccaccacaacacacaaggaagcctgcgcaccgccaccaccattcaccgccgccgaagcccgattcccagagacgcctctccttgcccccgtccccaaccccaaccaaagccaccgccgaatcgccttaatctggctggagcgcgccttggagccgtccggacctcagagctcacggggaatctttaatggcgtcggagtcgcatcgccagccataggagcctgattgacagaggcgccgattgccgactgccgactggcaactggcgaggcgatcacttgtcaatcctgtgctatccttttctcggcgcattgtcttgctttgttgatgcatacggcaccgccgatgaatggccgatctcggaggccggcagcggcgcgcggcgcgaaagcggcccccaagagcgacagcagagggggtgacaatgtgcggtaatttccccgttcccgccaccaatttctgagttcctcgatcgtcagcaatttgttgcggtgtccatattttgtacgacgaattaattggtgtggcaagagtacaacgacgaactcatgaacagtgctgttcttgcgagcgaagaatggttggtgacggtgacctggtggtgtttatgacaagatctcgacgcggcgggttgtttggcctctgggctctgccctagttgtctttgagagctactcgcaccgagatggagtagtatctcttcaatgccccctgattccctgagccccaattttttttccttctttagtttcttttaagcctttatctttcagagcagaggaatctgcgctttgcttccgtcagtaaccttctttctcagctcaattaggcgcctctttttctcttttaatgatggtgtctgtgttcaggtgatggagaaggatccgaggaaggccgcgacaccggcgaagggaccggccaacgcgggcacccgggtcaccatgaacagaatccagtcgagagagcgcaagctcgcgctgcagcaagatgtggataagctcaagaagaagctgcgccacgaggagaacgtccaccgcgctctggagcgggcgttcacgcggccgctcggcgccctgcctcgcctgccgccgtatctgccgtctcagacgctagctcttctcgcggaggtggcggtgcttgaggaggaggtcgtccggctggaggagcaagtggtgagtttccggcaagggatctaccaggaggcgatcatcttctcctccaccaagaacgcccagctccccgacggccaagttcccgtgccggcgcagctcgtaccgtcgtacccggtgctgaattccgaggtctcaccggcgacagtgagccaaggtcctccagaccatcctcccggcgctcgtccgtcgccgcacagcggcgtggccaacggcaagcaaacgccacggaaccccgttgctacctcgccgagccaggatgaccggtccggggcagggaaagagaaccagtcgtgcagcaacacgccgagcacgagcagccgccagtcgccgtcgcagcagaagacgcccaagtgcagggcgacgccgcctgacaggcgcagggttactcctgctcagatggtgttcgcgtcgtccatgcagacaagccctgctgttgcgcctgaccgtaaacggcctgccgacgctgctgctggcactggcagcaactctgacaacgtgacgacgtcccacgacgacgcgagctcgagcgtgccgaacaaagtatcggaggagctgctccggtgcctgctggccatcttctcgcagatggggggctcggctgctggcggcggccgaggactaggagacgaggaccagcaggcgctgtccccgtcggtctccggctccagcgagagctcggcgtcgtcggaggcggacgcgtacccgcaggacccctacggcatcctggagctgggcgccagggacatcggcgcctacaagcggttccacgtggtcgacgccgcgtccttcgacggcaacggcgacacgcctctcgttcgtcggagactcaaggccttgctgcggaggctgtcgtcggttgacctggcggggctctcccatcagcagaagctggccttctggatcaacgtctacaattcctgcatgatgaacgcgttcctggagcatgggatacctaccaccccgcaaatgctcgtggcgatgatgcccaaggccaccgtgagcgttggtgggcgcacgcacagcgccatgtccatcgagcatttcatcctgaggctgccctacagcgccaagcaggtgaaggtgagccgggaaggggccaagtgcgacgacggcgacgtgacggcggcgcgcggcgcgttcgggctggagtggcccgagcccctcgtcaccttcgcgctctcctgcggcagctggtcgtcccccgcggtgagggtgtacacggcggcgcgcgtggaggaggagctggaggcggcgaagcgggagtacctacaggcggccgcgggcgtgtgggcggcggggaggctggcggtcccgaagctcctgcactggtacctgctggacttcgccaaggacgtggacgcgctcatggactgggtctgcctgcagctgccgccggagctgcggcaggaggcggtgcgggccgtggaggtcggccgccgcgccggcgccggcggccgcgtccgggtcctcccgtacgagttcaggttcaggtacctgttggcctcctgacgacgcgtgcgtactacggtagggagtagtgtagtgccgtgcgtactggaggtagtagtagtaatgtagtagttcgtgcgcaggtctttgcaataataaaacggagatgggattgactatgcagtttttattactagcgttttgtgctgtatgtgtggattcggtagcggtgtaatggtggtttgtgcgcgcgaggaacgtttctactgtgccgtgcggctgtgctccatccacacagcctgcatttttttttttttgcgagcagggttggttggttggttgtcagctggtttcggaaagcacaaaggacactgccactgcagtgcagtgcagtgcacgctgtctctgtcactgatgattaacctggacctgcagccttttttttttgccttttaccttccatcccggtatgtttccccactgatgattg

SEQ ID NO: 21960 - DNA, 3182 bp, Zea Mays
ccaattcccaccacaacacacaaggaagcctgcgcaccgccaccaccattcaccgccgccgaagcccgattcccagagacgcctctccttgcccccgtccccaaccccaaccaaagccaccgccgaatcgccttaatctggctggagcgcgccttggagccgtccggacctcagagctcacggggaatctttaatggcgtcggagtcgcatcgccagccataggagcctgattgacagaggcgccgattgccgactgccgactggcaactggcgaggcgatcacttgtcaatcctgtgctatccttttctcggcgcattgtcttgctttgttgatgcatacggcaccgccgatgaatggccgatctcggaggccggcagcggcgcgcggcgcgaaagcggcccccaagagcgacagcagagtacgtgcttcgtcaatctctctgagttctttgcattcggtttctacagggcttggaagtctgtaccattcgttgaattgaacgtccaggggggtgacaatgtgcggtaatttccccgttcccgccaccaatttctgagttcctcgatcgtcagcaatttgttgcggtgtccatattttgtacgacgaattaattggtgtggcaagagtacaacgacgaactcatgaacagtgctgttcttgcgagcgaagaatggttggtgacggtgacctggtggtgtttatgacaagatctcgacgcggcgggttgtttggcctctgggctctgccctagttgtctttgagagctactcgcaccgagatggagtagtatctcttcaatgccccctgattccctgagccccaattttttttccttctttagtttcttttaagcctttatctttcagagcagaggaatctgcgctttgcttccgtcagtaaccttctttctcagctcaattaggcgcctctttttctcttttaatgatggtgtctgtgttcaggtgatggagaaggatccgaggaaggccgcgacaccggcgaagggaccggccaacgcgggcacccgggtcaccatgaacagaatccagtcgagagagcgcaagctcgcgctgcagcaagatgtggataagctcaagaagaagctgcgccacgaggagaacgtccaccgcgctctggagcgggcgttcacgcggccgctcggcgccctgcctcgcctgccgccgtatctgccgtctcagacgctagctcttctcgcggaggtggcggtgcttgaggaggaggtcgtccggctggaggagcaagtggtgagtttccggcaagggatctaccaggaggcgatcatcttctcctccaccaagaacgcccagctccccgacggccaagttcccgtgccggcgcagctcgtaccgtcgtacccggtgctgaattccgaggtctcaccggcgacagtgagccaaggtcctccagaccatcctcccggcgctcgtccgtcgccgcacagcggcgtggccaacggcaagcaaacgccacggaaccccgttgctacctcgccgagccaggatgaccggtccggggcagggaaagagaaccagtcgtgcagcaacacgccgagcacgagcagccgccagtcgccgtcgcagcagaagacgcccaagtgcagggcgacgccgcctgacaggcgcagggttactcctgctcagacaagccctgctgttgcgcctgaccgtaaacggcctgccgacgctgctgctggcactggcagcaactctgacaacgtgacgacgtcccacgacgacgcgagctcgagcgtgccgaacaaagtatcggaggagctgctccggtgcctgctggccatcttctcgcagatggggggctcggctgctggcggcggccgaggactaggagacgaggaccagcaggcgctgtccccgtcggtctccggctccagcgagagctcggcgtcgtcggaggcggacgcgtacccgcaggacccctacggcatcctggagctgggcgccagggacatcggcgcctacaagcggttccacgtggtcgacgccgcgtccttcgacggcaacggcgacacgcctctcgttcgtcggagactcaaggccttgctgcggaggctgtcgtcggttgacctggcggggctctcccatcagcagaagctggccttctggatcaacgtctacaattcctgcatgatgaacgcgttcctggagcatgggatacctaccaccccgcaaatgctcgtggcgatgatgcccaaggccaccgtgagcgttggtgggcgcacgcacagcgccatgtccatcgagcatttcatcctgaggctgccctacagcgccaagcaggtgaaggtgagccgggaaggggccaagtgcgacgacggcgacgtgacggcggcgcgcggcgcgttcgggctggagtggcccgagcccctcgtcaccttcgcgctctcctgcggcagctggtcgtcccccgcggtgagggtgtacacggcggcgcgcgtggaggaggagctggaggcggcgaagcgggagtacctacaggcggccgcgggcgtgtgggcggcggggaggctggcggtcccgaagctcctgcactggtacctgctggacttcgccaaggacgtggacgcgctcatggactgggtctgcctgcagctgccgccggagctgcggcaggaggcggtgcgggccgtggaggtcggccgccgcgccggcgccggcggccgcgtccgggtcctcccgtacgagttcaggttcaggtacctgttggcctcctgacgacgcgtgcgtactacggtagggagtagtgtagtgccgtgcgtactggaggtagtagtagtaatgtagtagttcgtgcgcaggtctttgcaataataaaacggagatgggattgactatgcagtttttattactagcgttttgtgctgtatgtgtggattcggtagcggtgtaatggtggtttgtgcgcgcgaggaacgtttctactgtgccgtgcggctgtgctccatccacacagcctgcatttttttttttttgcgagcagggttggttggttggttgtcagctggtttcggaaagcacaaaggacactgccactgcagtgcagtgcagtgcacgctgtctctgtcactgatgattaacctggacctgcagccttttttttttgccttttaccttccatcccggtatgtttccccactgatgattg

SEQ ID NO: 21961 - DNA, 3005 bp, Zea Mays
cccaccacaacacacaaggaagcctgcgcaccgccaccaccattcaccgccgccgaagcccgattcccagagacgcctctccttgcccccgtccccaaccccaaccaaagccaccgccgaatcgccttaatctggctggagcgcgccttggagccgtccggacctcagagctcacggggaatctttaatggcgtcggagtcgcatcgccagccataggagcctgattgacagaggcgccgattgccgactgccgactggcaactggcgaggcgatcacttgtcaatcctgtgctatccttttctcggcgcattgtcttgctttgttgatgcatacggcaccgccgatgaatggccgatctcggaggccggcagcggcgcgcggcgcgaaagcggcccccaagagcgacagcagagtgatggagaaggatccgaggaaggccgcgacaccggcgaagggaccggccaacgcgggcacccgggtcaccatgaacagaatccagtcgagagagcgcaagctcgcgctgcagcaagatgtggataagctcaagaagaagctgcgccacgaggagaacgtccaccgcgctctggagcgggcgttcacgcggccgctcggcgccctgcctcgcctgccgccgtatctgccgtctcagacgctagctcttctcgcggaggtggcggtgcttgaggaggaggtcgtccggctggaggagcaagtggtgagtttccggcaagggatctaccaggaggcgatcatcttctcctccaccaagaacgcccagctccccgacggccaagttcccgtgccggcgcagctcgtaccgtcgtacccggtgctgaattccgaggtctcaccggcgacagtgagccaaggtcctccagaccatcctcccggcgctcgtccgtcgccgcacagcggcgtggccaacggcaagcaaacgccacggaaccccgttgctacctcgccgagccaggatgaccggtccggggcagggaaagagaaccagtcgtgcagcaacacgccgagcacgagcagccgccagtcgccgtcgcagcagaagacgcccaagtgcagggcgacgccgcctgacaggcgcagggttactcctgctcagacaagccctgctgttgcgcctgaccgtaaacggcctgccgacgctgctgctggcactggcagcaactctgacaacgtgacgacgtcccacgacgacgcgagctcgagcgtgccgaacaaagtatcggaggagctgctccggtgcctgctggccatcttctcgcagatggggggctcggctgctggcggcggccgaggactaggagacgaggaccagcaggcgctgtccccgtcggtctccggctccagcgagagctcggcgtcgtcggaggcggacgcgtacccgcaggacccctacggcatcctggagctgggcgccagggacatcggcgcctacaagcggttccacgtggtcgacgccgcgtccttcgacggcaacggcgacacgcctctcgttcgtcggagactcaaggccttgctgcggaggctgtcgtcggttgacctggcggggctctcccatcagcagaagctggccttctggatcaacgtctacaattcctgcatgatgaacgtaagccatcgggcagtcacatttcagagttgggtgtttcctcttcttgtgtgtttttttttaaaagaagaagacagcaaaattcgcaattcggtttgctattaaagcaactactaacagcctggacatgtgggtactagcttccgggatgcgtgttctttaagcctggtgtctggcggcatgcatgtctgtacagtggcctggccgtgggaagctgcctggttcgccattaataaacctttgcataaagaaatgctccatgtcccccttccctgatcatgattagcaggcgcgcgcctaatcaactcttcatgctgccgctactgtgcatggtttttggccaaactcagatcttaataccgtactactgcaggcgttcctggagcatgggatacctaccaccccgcaaatgctcgtggcgatgatgcccaaggccaccgtgagcgttggtgggcgcacgcacagcgccatgtccatcgagcatttcatcctgaggctgccctacagcgccaagcaggtgaaggtgagccgggaaggggccaagtgcgacgacggcgacgtgacggcggcgcgcggcgcgttcgggctggagtggcccgagcccctcgtcaccttcgcgctctcctgcggcagctggtcgtcccccgcggtgagggtgtacacggcggcgcgcgtggaggaggagctggaggcggcgaagcgggagtacctacaggcggccgcgggcgtgtgggcggcggggaggctggcggtcccgaagctcctgcactggtacctgctggacttcgccaaggacgtggacgcgctcatggactgggtctgcctgcagctgccgccggagctgcggcaggaggcggtgcgggccgtggaggtcggccgccgcgccggcgccggcggccgcgtccgggtcctcccgtacgagttcaggttcaggtacctgttggcctcctgacgacgcgtgcgtactacggtagggagtagtgtagtgccgtgcgtactggaggtagtagtagtaatgtagtagttcgtgcgcaggtctttgcaataataaaacggagatgggattgactatgcagtttttattactagcgttttgtgctgtatgtgtggattcggtagcggtgtaatggtggtttgtgcgcgcgaggaacgtttctactgtgccgtgcggctgtgctccatccacacagcctgcatttttttttttttgcgagcagggttggttggttggttgtcagctggtttcggaaagcacaaaggacactgccactgcagtgcagtgcagtgcacgctgtctctgtcactgatgattaacctggacctgcagccttttttttttgccttttaccttccatcccggtatgtttccccactgatgattg

SEQ ID NO: 21962 - DNA, 2319 bp, Zea Mays
attttttttccttctttagtttcttttaagcctttatctttcagagcagaggaatctgcgctttgcttccgtgatggagaaggatccgaggaaggccgcgacaccggcgaagggaccggccaacgcgggcacccgggtcaccatgaacagaatccagtcgagagagcgcaagctcgcgctgcagcaagatgtggataagctcaagaagaagctgcgccacgaggagaacgtccaccgcgctctggagcgggcgttcacgcggccgctcggcgccctgcctcgcctgccgccgtatctgccgtctcagacgctagctcttctcgcggaggtggcggtgcttgaggaggaggtcgtccggctggaggagcaagtggtgagtttccggcaagggatctaccaggaggcgatcatcttctcctccaccaagaacgcccagctccccgacggccaagttcccgtgccggcgcagctcgtaccgtcgtacccggtgctgaattccgaggtctcaccggcgacagtgagccaaggtcctccagaccatcctcccggcgctcgtccgtcgccgcacagcggcgtggccaacggcaagcaaacgccacggaaccccgttgctacctcgccgagccaggatgaccggtccggggcagggaaagagaaccagtcgtgcagcaacacgccgagcacgagcagccgccagtcgccgtcgcagcagaagacgcccaagtgcagggcgacgccgcctgacaggcgcagggttactcctgctcagtgtgtagatggtgttcgcgtcgtccatgcagacaagccctgctgttgcgcctgaccgtaaacggcctgccgacgctgctgctggcactggcagcaactctgacaacgtgacgacgtcccacgacgacgcgagctcgagcgtgccgaacaaagtatcggaggagctgctccggtgcctgctggccatcttctcgcagatggggggctcggctgctggcggcggccgaggactaggagacgaggaccagcaggcgctgtccccgtcggtctccggctccagcgagagctcggcgtcgtcggaggcggacgcgtacccgcaggacccctacggcatcctggagctgggcgccagggacatcggcgcctacaagcggttccacgtggtcgacgccgcgtccttcgacggcaacggcgacacgcctctcgttcgtcggagactcaaggccttgctgcggaggctgtcgtcggttgacctggcggggctctcccatcagcagaagctggccttctggatcaacgtctacaattcctgcatgatgaacgcgttcctggagcatgggatacctaccaccccgcaaatgctcgtggcgatgatgcccaaggccaccgtgagcgttggtgggcgcacgcacagcgccatgtccatcgagcatttcatcctgaggctgccctacagcgccaagcaggtgaaggtgagccgggaaggggccaagtgcgacgacggcgacgtgacggcggcgcgcggcgcgttcgggctggagtggcccgagcccctcgtcaccttcgcgctctcctgcggcagctggtcgtcccccgcggtgagggtgtacacggcggcgcgcgtggaggaggagctggaggcggcgaagcgggagtacctacaggcggccgcgggcgtgtgggcggcggggaggctggcggtcccgaagctcctgcactggtacctgctggacttcgccaaggacgtggacgcgctcatggactgggtctgcctgcagctgccgccggagctgcggcaggaggcggtgcgggccgtggaggtcggccgccgcgccggcgccggcggccgcgtccgggtcctcccgtacgagttcaggttcaggtacctgttggcctcctgacgacgcgtgcgtactacggtagggagtagtgtagtgccgtgcgtactggaggtagtagtagtaatgtagtagttcgtgcgcaggtctttgcaataataaaacggagatgggattgactatgcagtttttattactagcgttttgtgctgtatgtgtggattcggtagcggtgtaatggtggtttgtgcgcgcgaggaacgtttctactgtgccgtgcggctgtgctccatccacacagcctgcatttttttttttttgcgagcagggttggttggttggttgtcagctggtttcggaaagcacaaaggacactgccactgcagtgcagtgcagtgcacgctgtctctgtcactgatgattaacctggacctgcagccttttttttttgccttttaccttccatcccggtatgtttccccactgatgattg

SEQ ID NO: 21963 - DNA, 836 bp, Zea Mays
ccacggtcgatggtcgaaacgttcaggcacacgcggcgctgcagtatacaacgaagcgagtgtggaaaagcaaggcagcgcgacgaagcggcgccgccagctccccaaaacctccccagctgccacctcctctgcctccctgcgtcccccgagcaaagcagaacaaggggggaaaaagttgacatacgcttgcagcgatggcctttgccgcccgcgccgcgctcgtgcgcgtcctccctccgcgaccatcgccgacctcccaaccgaagcagctcaagcaaggtctaggcggccgcggcgggtcctcgctcgccgttcgggcgaaggactccgatgacttcggggcccttctgtcggagaagctcgatgcgcaggcgcctgagaagcgggatgggcgggatggttttgggagggaggcgagtagcgtggaggaggagaaggaggtgcagggcgagccggcttcgtggggtgtgctcaaccagatcggcgtcgagttggactctgacaaatcatattctgctctcatatatggcacatctgctcttgttgcaatttggatatcatcaattgtggtttctgcacttgattcagtccctttggttcctcaagtgatggaagttgttggtcttggcttcacaatttggttcacatcgagatacctgatatttaaggagaaccgtgatgaacttttcacgagagtcagctccatcaagaagcaaattttggggtctcatgagaactgagcgtctctcttacgttctgttctgttaactggtactgtgttttattgaagatgtttttttttggaataaacagtacatttttttgtttaaaag

SEQ ID NO: 21964 - DNA, 1097 bp, Zea Mays
gaaacgttcaggcacacgcggcgctgcagtatacaacgaagcgagtgtggaaaagcaaggcagcgcgacgaagcggcgccgccagctccccaaaacctccccagctgccacctcctctgcctccctgcgtcccccgagcaaagcagaacaaggggggaaaaagttgacatacgcttgcagcgatggcctttgccgcccgcgccgcgctcgtgcgcgtcctccctccgcgaccatcgccgacctcccaaccgaagcagctcaagcaaggtctaggcggccgcggcgggtcctcgctcgccgttcgggcgaaggactccgatgacttcggggcccttctgtcggagaagctcgatgcgcaggcgcctgagaagcgggatgggcgggatggttttgggagggaggcgagtagcgtggaggaggagaaggaggtgcagggcgagccggcttcgtggggtgtgctcaaccagatcggcgtcgagttggactctgacaaatcatattctgctctcatatatggcacatctgctcttgttgcaatttggatatcatcaattgtggtttctgcacttgattcagtccctttggttcctcaagtgatggaagttgttggtcttggcttcacaatttggttcacatcgagatacctgatatttaaggagaaccgtgatgaacttttcacgagagtcagctccatcaagaagcaaattttggggtctcatgagaactgagcgtctctcttacgttctgttctgttaactggtgagtgtagggctgcgatgacctaaagtgcgactttctttgcatgctttgcggggcccgctgaggcggctatcaattgtgtgcgttcctctctgacccggacacccggcttctagttggtgctgaaaatgttggtttctgccgccactcaccaatcaagtatgctgtcagcagccctttctctgaatatactaaacaaaacgttccctttagtttgggtcgatacagagtattggtgttctgttgatatgttctgttgttcttggtggtgttctgttctgttcggtcaatgggatttgggatatgctccctggtacagaaaatccacaatcaggctg

SEQ ID NO: 21965 - DNA, 2379 bp, Zea Mays
accttcacgaagacatccccggcccactagcgatccgtgcaggcgctgccatccaccacctctccctcggcgtcgcactagcgtccccaacttcccctacgccgtcggtcgcacgtgctgagcgcctgacatggtgacacccacggaaactggtagttgctcccccgtggtgataccgagcctgcctctggcaagtggggtgccccgtaccccaggcggctgacgggtggggcacccaggtgacccgactgacatggaccatctcttcctcctcctccgtcttcctcccctaaccccagataaagccaagcccagcgaggccaccaactccacctcgtggactccttccccacaaaactaaaccctcgcttcggaggcgcgtgaacccaagaccgacaggcgaacgaagcgagggtcctcacaaccaccatcccctgctgcaacgacgccgccggcgatggcgtccatctccggcgcggcggcgccgccatcttccgccgtgtgccggcttcggctgcgccggcaccttctgctccggccctcccacctccgcctccgcgcgccccactccatcgccgacctctcccgctcctccaattccgccccgagcccggcccgcccagcgctgggctccggcccggagaacggcagcggcggcgtccgcgcggtggagaaggacccgatcaagctgtgggagcgctacgtcgagtggctctaccagcacaaggagctcggcatcttcgtcgacgtcagccggatggggttcacggaggagttcctgcggcagatggagccgcggatgcagcaggccttcgtcgacatgcgggagctcgagaagggcgccatcgccaaccccgacgagggtcgcatggtgggccactactggctccgcgacccggccctcgctcccaactccttcctccggaacaagatcgagaccgcactcgacagaatcctcgccttctctcaagatgtcgtctctggaaagattctttccccatctggtcgtttcacttcaattctctctataggaatcggagggtcagctttgggccctcaatttgttgctgaggcacttgcgcctgataaccctccactgaagataagatttattgacaacaccgatcctgctgggattgatcatcaaattgctcaactaggacctgaactggcaactactcttgtaattgtcatttctaagagcggaggcacacctgaaacccgcaatgggctactggaagtacagaaagccttcagagatgcaggtctgcaattctcgaaacagggtgttgcaatcactcaagaaaattctctgttggataacactgccagaatagagggatggttagctcggtttcctatgtttgactgggttggtggtaggacttcagaaatgtcagctgttggtttacttccagctgcattgcagggtattgatatcaaggaaatgctagttggtgcagctttaatggatgaggaaacccggaacactgtggttaaagcaaatccagcagcattgcttgcattatgttggtattgggcatcggaagggataggcaaaaaggatatggttgtgcttccttacaaggatagtttattacttttgagtagatatttgcaacaacttgtcatggaatctcttggaaaagaattcgacctggatggcaaccgtgttaatcaagggctaactgtatatggtaacaaaggaagcactgaccagcatgcctgagagaaggtgtacaaaacttctttgttacgtttattgaggtcttgcgtgacaggcctgctggacatgattgggagcttgaacctggagtcacgtgtggtgactatttgtttgggatgttgcagggaacccgttctgctctttatgcaaatgaccgggagtctatctctgttactgtgcaagaggtaactcctagagctgttggagcactgattgcactttatgaacgtgctgtggggatttatgcttctttggtaaatatcaatgcctatcatcagcctggtgttgaggctgggaaaaaggcagcaggagaagtattggcccttcagaaaagggttctgactgtattaaaggaggccatgtatggaacttctgacctgtgttctttctgtttctctgtgaagtgattggttatgcatagtatttttggggcatatttctagttgtgatgctttgaaaatgcatttcgttgtatcactaggtgggactttgttttgaggaatggtgtggttcatcatattctcaccctcacttttttgtttggtttatggagttgaataggttcatctgccaccaccctatcccttgcaaagtaataattagtacaaacatgagggatgtactcatgggttggttcctcaaaatacattcga

SEQ ID NO: 21966 - DNA, 2323 bp, Zea Mays
accttcacgaagacatccccggcccactagcgatccgtgcaggcgctgccatccaccacctctccctcggcgtcgcactagcgtccccaacttcccctacgccgtcggtcgcacgtgctgagcgcctgacatggtgacacccacggaaactggtagttgctcccccgtggtgataccgagcctgcctctggcaagtggggtgccccgtaccccaggcggctgacgggtggggcacccaggtgacccgactgacatggaccatctcttcctcctcctccgtcttcctcccctaaccccagataaagccaagcccagcgaggccaccaactccacctcgtggactccttccccacaaaactaaaccctcgcttcggaggcgcgtgaacccaagaccgacaggcgaacgaagcgagggtcctcacaaccaccatcccctgctgcaacgacgccgccggcgatggcgtccatctccggcgcggcggcgccgccatcttccgccgtgtgccggcttcggctgcgccggcaccttctgctccggccctcccacctccgcctccgcgcgccccactccatcgccgacctctcccgctcctccaattccgccccgagcccggcccgcccagcgctgggctccggcccggagaacggcagcggcggcgtccgcgcggtggagaaggacccgatcaagctgtgggagcgctacgtcgagtggctctaccagcacaaggagctcggcatcttcgtcgacgtcagccggatggggttcacggaggagttcctgcggcagatggagccgcggatgcagcaggccttcgtcgacatgcgggagctcgagaagggcgccatcgccaaccccgacgagggtcgcatggtgggccactactggctccgcgacccggccctcgctcccaactccttcctccggaacaagatcgagaccgcactcgacagaatcctcgccttctctcaagatgtcgtctctggaaagattctttccccatctggtcgtttcacttcaattctctctataggaatcggagggtcagctttgggccctcaatttgttgctgaggcacttgcgcctgataaccctccactgaagataagatttattgacaacaccgatcctgctgggattgatcatcaaattgctcaactaggacctgaactggcaactactcttgtaattgtcatttctaagagcggaggcacacctgaaacccgcaatgggctactggaagtacagaaagccttcagagatgcaggtctgcaattctcgaaacagggtgttgcaatcactcaagaaaattctctgttggataacactgccagaatagagggatggttagctcggtttcctatgtttgactgggttggtggtaggacttcagaaatgtcagctgttggtttacttccagctgcattgcagggtattgatatcaaggaaatgctagttggtgcagctttaatggatgaggaaacccggaacactgtggttaaagcaaatccagcagcattgcttgcattatgttggtattgggcatcggaagggataggcaaaaaggatatggttgtgcttccttacaaggatagtttattacttttgagtagatatttgcaacaacttgtcatggaatctcttggaaaagaattcgacctggatggcaaccgtgttaatcaagggctaactgtatatggtaacaaaggaagcactgaccagcatgcgcctgctggacatgattgggagcttgaacctggagtcacgtgtggtgactatttgtttgggatgttgcagggaacccgttctgctctttatgcaaatgaccgggagtctatctctgttactgtgcaagaggtaactcctagagctgttggagcactgattgcactttatgaacgtgctgtggggatttatgcttctttggtaaatatcaatgcctatcatcagcctggtgttgaggctgggaaaaaggcagcaggagaagtattggcccttcagaaaagggttctgactgtattaaaggaggccatgtatggaacttctgacctgtgttctttctgtttctctgtgaagtgattggttatgcatagtatttttggggcatatttctagttgtgatgctttgaaaatgcatttcgttgtatcactaggtgggactttgttttgaggaatggtgtggttcatcatattctcaccctcacttttttgtttggtttatggagttgaataggttcatctgccaccaccctatcccttgcaaagtaataattagtacaaacatgagggatgtactcatgggttggttcctcaaaatacattcga

SEQ ID NO: 21967 - DNA, 2364 bp, Zea Mays
accttcacgaagacatccccggcccactagcgatccgtgcaggcgctgccatccaccacctctccctcggcgtcgcactagcgtccccaacttcccctacgccgtcggtcgcacgtgctgagcgcctgacatggtgacacccacggaaactggtagttgctcccccgtggtgataccgagcctgcctctggcaagtggggtgccccgtaccccaggcggctgacgggtggggcacccaggtgacccgactgacatggaccatctcttcctcctcctccgtcttcctcccctaaccccagataaagccaagcccagcgaggccaccaactccacctcgtggactccttccccacaaaactaaaccctcgcttcggaggcgcgtgaacccaagaccgacaggcgaacgaagcgagggtcctcacaaccaccatcccctgctgcaacgacgccgccggcgatggcgtccatctccggcgcggcggcgccgccatcttccgccgtgtgccggcttcggctgcgccggcaccttctgctccggccctcccacctccgcctccgcgcgccccactccatcgccgacctctcccgctcctccaattccgccccgagcccggcccgcccagcgctgggctccggcccggagaacggcagcggcggcgtccgcgcggtggagaaggacccgatcaagctgtgggagcgctacgtcgagtggctctaccagcacaaggagctcggcatcttcgtcgacgtcagccggatggggttcacggaggagttcctgcggcagatggagccgcggatgcagcaggccttcgtcgacatgcgggagctcgagaagggcgccatcgccaaccccgacgagggtcgcatggtgggccactactggctccgcgacccggccctcgctcccaactccttcctccggaacaagatcgagaccgcactcgacagaatcctcgccttctctcaagatgtcgtctctggaaagattctttccccatctggtcgtttcacttcaattctctctataggaatcggagggtcagctttgggccctcaatttgttgctgaggcacttgcgcctgataaccctccactgaagataagatttattgacaacaccgatcctgctgggattgatcatcaaattgctcaactaggacctgaactggcaactactcttgtaattgtcatttctaagagcggaggcacacctgaaacccgcaatgggctactggaagtacagaaagccttcagagatgcaggtctgcaattctcgaaacagggtgttgcaatcactcaagaaaattctctgttggataacactgccagaatagagggatggttagctcggtttcctatgtttgactgggttggtggtaggacttcagaaatgtcagctgttggtttacttccagctgcattgcagggtattgatatcaaggaaatgctagttggtgcagctttaatggatgaggaaacccggaacactgtggttaaagcaaatccagcagcattgcttgcattatgttggtattgggcatcggaagggataggcaaaaaggatatggttgtgcttccttacaaggatagtttattacttttgagtagatatttgcaacaacttgtcatggaatctcttggaaaagaattcgacctggatggcaaccgtgttaatcaagggctaactgtatatggtaacaaaggaagcactgaccagcatgcttacattcagcagctgagagaaggtgtacaaaacttctttgttacgtttattgaggtcttgcgtgacaggcctgctggacatgattgggagcttgaacctggagtcacgtgtggtgactatttgtttgggatgttgcagggaacccgttctgctctttatgcaaatgaccgggagtctatctctgttactgtgcaagaggtaactcctagagctgttggagcactgattgcactttatgaacgtgctgtggggatttatgcttctttggtgttgaggctgggaaaaaggcagcaggagaagtattggcccttcagaaaagggttctgactgtattaaaggaggccatgtatggaacttctgacctgtgttctttctgtttctctgtgaagtgattggttatgcatagtatttttggggcatatttctagttgtgatgctttgaaaatgcatttcgttgtatcactaggtgggactttgttttgaggaatggtgtggttcatcatattctcaccctcacttttttgtttggtttatggagttgaataggttcatctgccaccaccctatcccttgcaaagtaataattagtacaaacatgagggatgtactcatgggttggttcctcaaaatacattcga

SEQ ID NO: 21968 - DNA, 1727 bp, Zea Mays
ccgaaaatgcccccgcctactctgcacgccggttcatacaaaaggggcctcacgtcacggcacacagcacgcagcacatcgctcactccgtcactcgctcctcctccactcctcgccttcctcggtcgcatcaagaacacgagcaggaaggagaagaggaggagtcctatcagagccagacagccaatcagtatctgtaccattaccgttcgggcaccagattaccaaaatcctgcagaggggaatggcgccgagcagctacgagatggcggcttccaccctgctgtgcggcgaggacagcagcagcatcctggacctcgaagcggggggccaggaggaggaggaggaggtgctgctggcgcggagcaggacgcgcggggagcccagcgtggtcttccccgtgccgtccgaggaatgcgtcgccggtttcgtggaggcggaggcggcgcacatgccgcgggaggactacgccgagaggctgcgcggcgggggcacggatctccgcgtccggacggacgccatcgactggatttggaaggttcacgcgtactacggtttcggccctctcaccgcctgcttggccgtcaactacctggaccgcttcctctcgctctaccagcttccggaaggcaagtcttggacgacgcagctgctgtccgtggcgtgcttgtccctggctgccaagatggaggagacctacgttcctccgtctctggacctgcaggtcggggacgcgcggtacgtgttcgaggcgaagacggtgcagaggatggagctgctggtcctcagcacgctcagatggaggatgcgagcggtcacccccttctcgtacatcgactacttcctccaccggctcaaagacggcggtgcgccgagcagacgcgccctccgcctggcgcgacgaggacggcgactgctccccggctgtttgcagcaagaggaggaagactagcagatgatgattagtacacaccagtgatggagatggaaggatcgatcgaaaagcccattccgcgcgctgatcagtgatcgtcgatctccttgacagaaagtcaagtggttttgatcgcactgaccgaagagtctggtctgctctgggagcttttgactccggtttgaatcgaagtgcctgtaagccaggcaaaggaggcgcaagcgcaaccaaaagcaggacattttggacatggcggtccagcaaagatcacgctcctctgaatgcagggtgctagtagaaatgtaccaaaggaaggggaaaaaaaggagcaaaggttttgaaggttgacaaagctgagacgggacgggacgaccaaactaaaggcagctcgacgatgacggggacgaggcgatgctggtgacatcaggcatgcgaagtagctatagccgcgtagtttgctttgttctgtaatttcccgaccattttccatttgtaaaagagagagagagagagagagagagagagaatgcaaaaaagagaggaaaagaacaattcaattcttgcgtgacaaattgaaaatagcggttaaccaactggaatcccaagaagcaggagaacagcaacatgacgacaggacccagaagacctggaaatgggtttctttgaggggttacgaactatcagcatcagcagttgctatgaaacatgaacccgctgggtcgctgccaccaaacatttgtttgactgcttgtctgcaaagaccatgcaaatatgctctgtctttttttctcta

SEQ ID NO: 21969 - DNA, 2356 bp, Zea Mays
ccgaaaatgcccccgcctactctgcacgccggttcatacaaaaggggcctcacgtcacggcacacagcacgcagcacatcgctcactccgtcactcgctcctcctccactcctcgccttcctcggtcgcatcaagaacacgagcaggaaggagaagaggaggagtcctatcagagccagacagccaatcagtatctgtaccattaccgttcgggcaccagattaccaaaatcctgcagaggggaatggcgccgagcagctacgagatggcggcttccaccctgctgtgcggcgaggacagcagcagcatcctggacctcgaagcggggggccaggaggaggaggaggaggtgctgctggcgcggagcaggacgcgcggggagcccagcgtggtcttccccgtgccgtccgaggaatgcgtcgccggtttcgtggaggcggaggcggcgcacatgccgcgggaggactacgccgagaggctgcgcggcgggggcacggatctccgcgtccggacggacgccatcgactggatttggaaggttcacgcgtactacggtttcggccctctcaccgcctgcttggccgtcaactacctggaccgcttcctctcgctctaccagcttccggaaggcaagtcttggacgacgcagctgctgtccgtggcgtgcttgtccctggctgccaagatggaggagacctacgttcctccgtctctggacctgcaggtcggggacgcgcggtacgtgttcgaggcgaagacggtgcagaggatggagctgctggtcctcagcacgctcagatggaggatgcgagcggtcacccccttctcgtacatcgactacttcctccaccggctcaaagacggcggtgcgccgagcagacgcgccgtcctccgatccgcggagctcatcctgcgcgtcgcgagaggaacgtgctgcctgggtttcaggccctcggaggtcgccgcggctgtcgccgccgccgtggccggcgaggagcacgccgtggatatcgacaaggcttgcacccaccgcgtgcacgaggtacggcgtgtgcctgtccccggccacttctcgcgagtcttgtcgtcagattcaatgcgatgcgatgcaatacgttaagcgtgtaccgcatggatccaaatccaagtcgtaggtttgcagctgtacttgacttgtgcagctactgagctactactactaggcacacgcacctgcccaggtcaggtgcgtgagccgcatttacagccatggcgactgatgctttatttgttgctttgcgctgcatgcgggcggttgcaggagagggtgtcgcgatgcctcgaagcgatccaggccaccgtggccctgctggcgcctgcacagccgctgaaagctgaaggcccgagcagcggccgcagcagagcctcttcctcctctgccaccgtgccgcggagcccgaccggggtgctggacgctggctgcctcagctacaggagcgacgacgcggctgcggctgcggctgcctcgcacgcgagctccgcctggcgcgacgaggacggcgactgctccccggctgtttgcagcaagaggaggaagactagcagatgatgattagtacacaccagtgatggagatggaaggatcgatcgaaaagcccattccgcgcgctgatcagtgatcgtcgatctccttgacagaaagtcaagtggttttgatcgcactgaccgaagagtctggtctgctctgggagcttttgactccggtttgaatcgaagtgcctgtaagccaggcaaaggaggcgcaagcgcaaccaaaagcaggacattttggacatggcggtccagcaaagatcacgctcctctgaatgcagggtgctagtagaaatgtaccaaaggaaggggaaaaaaaggagcaaaggttttgaaggttgacaaagctgagacgggacgggacgaccaaactaaaggcagctcgacgatgacggggacgaggcgatgctggtgacatcaggcatgcgaagtagctatagccgcgtagtttgctttgttctgtaatttcccgaccattttccatttgtaaaagagagagagagagagagagagagagagaatgcaaaaaagagaggaaaagaacaattcaattcttgcgtgacaaattgaaaatagcggttaaccaactggaatcccaagaagcaggagaacagcaacatgacgacaggacccagaagacctggaaatgggtttctttgaggggttacgaactatcagcatcagcagttgctatgaaacatgaacccgctgggtcgctgccaccaaacatttgtttgactgcttgtctgcaaagaccatgcaaatatgctctgtctttttttctcta

SEQ ID NO: 21970 - DNA, 759 bp, Zea Mays
gttctctcgttgcaaccagtgttgcataggcaggttctattctatttccttcattgacatctatatagccaatttattcccttcaataccatcaagaaagcaatacaacgtacaagatactccctcagttccaatttataattcgttgcaattcaaaaaaacgcgaaaataaaaatattcaagtatattatatgctaaatgataccaccgtaataataaaaagtatttatgattttttaataagacaagagtcaaatgaattataagttagaaaggagcgagtatttgttacacatgactaactctattaacactattgacactaaaaatttattttactggattaattcggttttatttctatgcatatattttcttatttttatctttaagatctatttaaagaaaaagttataatccagagtcctctattattcaaagttagagtccgatggcctaggcgcaaaccattcaacgagcatcggggctacaattcctcattcctcatgtagtcactaaacatcaatgaataaggatggcaatggagcaggacgagcagagaatgtcccgttctcgaaaaccaattctttgtcctgcctcggaagccttaacagggacaaatccatccccatctctgtcccgtggagaacactgcaccccaaaaattgttctctaatacagggacaataagggcatcactgcatcataacaattatagttatatcaattattaagaggcaacaacaagacaaaaataaa

SEQ ID NO: 21971 - DNA, 600 bp, Zea Mays
gaactcggaactcttcagtggtacaagtgtaacagaaccagactctacccgccaggttcattcaagatccccactggcacttagtctgcacgtatgtagtgtacacagcaaaatcaccaacatcagaaagtatttcagcagcacaaagaacattggtatgcagaactgtactgtgtcagtggtgagtgggcaccgtcagatgcaccgtggagcctgaaagttgataggccatagctgtgaagtgcgtggtagtggacattgtatccaatttggaattatggtattctaaaatgggttgatgtgcatttcaaagacactttgagcaatgtttttttctctcctgcgtctttgacgcacatgattattggctgatttgatcagtgttaatgaaaatacagctttgacgcatgggatactcaaggacatgtcttgatatggatgattaggatccaaaccaccaggatttataaaaatactcccttatctaaacaggtcattttgttttaataactgaatgagccaataactgatagtatattcccaaccaaatgcacaaactgaataatatagacaagtgcatggtcacaaaaatgaaaaaga

SEQ ID NO: 21972 - DNA, 1022 bp, Zea Mays
ggaagaaccgtgcgccgctggaaaattgtgaacacctacaataggcaatgaagcacggaacctatagctgacctagcgagctgatcggctctactcccttctcttgttcctttcttctctccgggctcacctaccggatcatcctccatggccaccctcgccttgccgccgaccaccaaggctgccggccaggacgccacccaggaaagcctagcagagaatcctgccaaggacgccgcagatccgggcagcatggagtccgagtgggttcttctcggaaaatcggacatcgtcccggccgatgtggccgccgccgccgccgcggggcaccaccacctcaacttctcgccgctgccgatgatccctatctgggtgcagatggttctcgggggcgtggtttacacggctgtgccgttctacaagagggtgctgaaggtcgaaggtgaaacgttggccaatgtagaaactgcagtggaggtcgtggagcatgtcgccgaggtgacggagaagttggctgcagatgcggccagttccctgccagagaacggatccctgcacaaggttgccgtggaggtggagtgcgttgctgaagcggtggataaggatgcacatgaggttgaagcagtcatcgataaggttgaggaggtgagcgagaagatcgatgctacagtggaaccggtcatcgaagagcttgagaaggacctgataccgaaccccagatcctctagtggatcagatgcccagaaatgacagttcatgtaaattgggagggaaagctggcgtgtgcgtgtccctggctgtctgtaaatttgtaaatctctcttcgttgtttcctaatgccctatgcgtgtaaactgtaaatacaactaagatacctcatgaactgcaacgacgccacggaatagtaagacgtggtacatgattgtgtcattgtgtgtgtgtggctgtgcgtgctcgaatctggacatctgattgtcaaaagtactggcaacatttacttgcaaaccaaacgccatgttagc

SEQ ID NO: 21973 - DNA, 1026 bp, Zea Mays
ctgcaactcgagttatttttctgacactatcatcactaatttaatgctagcgtaggcaatgaagcacggaacctatagctgacctagcgagctgatcggctctactcccttctcttgttcctttcttctctccgggctcacctaccggatcatcctccatggccaccctcgccttgccgccgaccaccaaggctgccggccaggacgccacccaggaaagcctagcagagaatcctgccaaggacgccgcagatccgggcagcatggagtccgagtgggttcttctcggaaaatcggacatcgtcccggccgatgtggccgccgccgccgccgcggggcaccaccacctcaacttctcgccgctgccgatgatccctatctgatggttctcgggggcgtggtttacacggctgtgccgttctacaagagggtgctgaaggtcgaaggtgaaacgttggccaatgtagaaactgcagtggaggtcgtggagcatgtcgccgaggtgacggagaagttggctgcagatgcggccagttccctgccagagaacggatccctgcacaaggttgccgtggaggtggagtgcgttgctgaagcggtggataaggatgcacatgaggttgaagcagtcatcgataaggttgaggaggtgagcgagaagatcgatgctacagtggaaccggtcatcgaagagcttgagaaggacctgataccgaaccccagatcctctagtggatcagatgcccagaaatgacagttcatgtaaattgggagggaaagctggcgtgtgcgtgtccctggctgtctgtaaatttgtaaatctctcttcgttgtttcctaatgccctatgcgtgtaaactgtaaatacaactaagatacctcatgaactgcaacgacgccacggaatagtaagacgtggtacatgattgtgtcattgtgtgtgtgtggctgtgcgtgctcgaatctggacatctgattgtcaaaagtactggcaacatttacttgcaaaccaaacgccatgttagc

SEQ ID NO: 21974 - DNA, 499 bp, Zea Mays
gtgaacatttagtatgcttcagcagctccaacttgagacccaagtttacagaggcatctgcattgcggctagcgaagtagacaaactacttttcttcaataacgctaaagacggttgaggaggtgagcgagaagatcgatgctacagtggaaccggtcatcgaagagcttgagaaggacctgataccgaaccccagatcctctagtggatcagatgcccagaaatgacagttcatgtaaattgggagggaaagctggcgtgtgcgtgtccctggctgtctgtaaatttgtaaatctctcttcgttgtttcctaatgccctatgcgtgtaaactgtaaatacaactaagatacctcatgaactgcaacgacgccacggaatagtaagacgtggtacatgattgtgtcattgtgtgtgtgtggctgtgcgtgctcgaatctggacatctgattgtcaaaagtactggcaacatttacttgcaaaccaaacgccatgttagc

SEQ ID NO: 21975 - DNA, 560 bp, Zea Mays
ccaagctcaagatcgcgcaacaacggtgagctctacaccacagtaacactgcactactctcagtctactactcagtagtacgagcactctccaagatctgatccgatctgatacgatcaccgagctaaaatgtagtaagcagtagctgcgaaagagaatcaacagggtattatacaaatggatgaacggagcacaacaccaccgagccagcccaaccaatctgtccgagccacggtcctacactgtagcaacacgaacgaacagatgccgccagtcctactgaatcgaatgccgaatggaatatggatattcggatggaagaaaaaaaatggtgaaaagaaaaaaaaagaaggaatcaacggctcaacacggataacaaataaattacagcacggggcagtgcagatctcccttctctcagtagaaggcggcggcggcggcgagcattgccatggccagggccgcgagctggaagcgcgccattgcagccgagtaggcgagagagaagcttgatgagcgtgtgcgtgtgtgtgtgtgtactgtgatggtgtgtgcccggt

SEQ ID NO: 21976 - DNA, 562 bp, Zea Mays
ccaatgaaaaaagctctataggcagatttggaggtatacagtccattgctgctaaaattccacacatgttgatcattttgcaagaaatatgataggtgttgattactgctgcaccaatttgagcctacaggatcttctggtcgatcttggatttggagtggctgattttgccctctggtgggtcatgttttctttctcaaagggagagctgtgggctgtagttttctttgtgtattagtgtgggggcggactcttctccccttgtactcttgtacacccttttcttggaggtctcaaaatgaagttagactgtgtccaacagttcacttatatggtcacccaaaacattgttttgcattgttttatactgtagacagcattgttcacatagtgaagtttgaatataggtataggaatgagtaagttgctggagatagccttatagcactaaaaagggtaaccaagaaagtaatattgtcagtaatggctaaaccaacatgccaataaagaaatagcacaaaagcacctggtagagatctgcagaaccagaaacacgagttgc

SEQ ID NO: 21977 - DNA, 2322 bp, Zea Mays
ttaccgaatgtgattgtgactacaccgccactgctctgctcaacacggttcaccggtaatgatccccggttcctccgactgcaaccgggcgccacgtccgcacctccatctcgctttcagccgttcgtacctaggctacactacatgaaaggtcgctcttcagctgaaactgaagtctgaaaccaccgcccagcgctcgcctgtttctgcggccgtcgatggagctccacctcgccaccatcgcccaccgcccgcctttgccggtaccggcgcggggccaccacctccgccgccgcctccaccacctcccggctcctctctccttccaaaacacctactccccctccctttcctccccgcatcatcatcgcctttctcccacccttcgccgccacctccgcctgcctcttctcgcctcccaagcgcccaattctaacccggagcctgaacctgagcccgagcccactggtgcgaagctactgccgctcgtcatctccatcgccatcggcctcgccgtgcggttcctcgcgccgcggcccgtcgaggttagcccgcaggcgtggcagctcctctccatcttcctctccacaatcgcggggctggtgcttggccctctccctgtcggcgcatgggccttcctcgggctcacagccgccgtcgccactcgcacgctccccttcaccgccgccttctccgccttcaccaacgaggtcatctggctcatcgtcatttccttcttcttcgcgcgcgggttcgtcaagacaggcctcggcgaccgaatcgccacctacttcgtcaagtggctcgggagcagcacgctgggcctttcctacgggcttaccctcagcgaggcctgcatcgcgccagccatgcccagcaccacggcgagggccggaggcgtgttcctacctatcatcaagtcgctctcgctgtcggctgagagcaagcccaaccatccatcgtcgcggaagcttgggtcctatcttgtgatgacgcaattccagggatgctattggtgtgtctagtgttgtggctgcaatgcttgggctctccattcttctcgttctcggtgtgctagactgggacgattgcttgaatgagaaatcagcatgggatacattggcttggtttgcagttctggttggaatggcaggacaactcactaacctgggaattgtttcttggatgtcaaactgtgttgccaagctgcttcagtcgttctcattgagttggccagtggcattttgtgttctggaggcctcctactttctgatccactacctatttgcaagccagactggacatgttggagccttatactctgcatttctggctatgcatatagcggccggtgttcctagtgtgctgtcagcacttgctttggcattcaacacaaatctgttcggtgcaatcactcattatagtagtgggcaggctgcagtatacttcggagccgggtatatggagcttccagatgttttcaggctgggttttataacagccttggctaacacgttaatctggggagttgttggaaccatctggtggaaatttttgggtctgtactgacagtggcagacatgtggttgaccaaaattttcatttggcactggtcgaattgctcttgctcattgttaggaagggcagaatatctagttaactaccgttgctccctccggtcagctatcgctgaggtgatcagcagttagcaattacgcctgtgtcgtgcagttccttgttttctctttggttccgtagaagtccttgggcaatttttctgcggtatgttcctctctgatgcttatatacagtccgctctgtaaaagttgcgcggctgcactgaaagcagtgtacagcgttgcggccctcaaaaatgtgttcgctccattctacagctcccagctaactatgattctcaacttacagcttggaaccaacgaattctcacaaaacatcagcgagctcgtcggcttgatggtcgtagaggctttgcgtcgcaatctggataatcacatttatttattttggcacgaatcctggatggccgcagcatctgtgtcagttgtcacctctgtttctttcactcctacagctacagatgaaggaacaacgatcctgctactgcactcagaagtcaaaaaaattgattcatgaatggatgtagccaaacaatacagaccacagtaggaacttgggctacgaacagtaagacaaggcagtttgtggtaggaatgaacttgtcacaaacacacgcgtgacacacccgatcgacatggatgacccaggcccagcgcagcattaatgcattgcgccggacccggt

SEQ ID NO: 21978 - DNA, 2420 bp, Zea Mays
ttaccgaatgtgattgtgactacaccgccactgctctgctcaacacggttcaccggtaatgatccccggttcctccgactgcaaccgggcgccacgtccgcacctccatctcgctttcagccgttcgtacctaggctacactacatgaaaggtcgctcttcagctgaaactgaagtctgaaaccaccgcccagcgctcgcctgtttctgcggccgtcgatggagctccaccacctcccggctcctctctccttccaaaacacctactccccctccctttcctccccgcatcatcatcgcctttctcccacccttcgccgccacctccgcctgcctcttctcgcctcccaagcgcccaattctaacccggagcctgaacctgagcccgagcccactggtgcgaagctactgccgctcgtcatctccatcgccatcggcctcgccgtgcggttcctcgcgccgcggcccgtcgaggttagcccgcaggcgtggcagctcctctccatcttcctctccacaatcgcggggctggtgcttggccctctccctgtcggcgcatgggccttcctcgggctcacagccgccgtcgccactcgcacgctccccttcaccgccgccttctccgccttcaccaacgaggtcatctggctcatcgtcatttccttcttcttcgcgcgcgggttcgtcaagacaggcctcggcgaccgaatcgccacctacttcgtcaagtggctcgggagcagcacgctgggcctttcctacgggcttaccctcagcgaggcctgcatcgcgccagccatgcccagcaccacggcgagggccggaggcgtgttcctacctatcatcaagtcgctctcgctgtcggctgagagcaagcccaaccatccatcgtcgcggaagcttgggtcctatcttgtgatgacgcaattccaggcatctggtaactcgagtgctttattcctcactgctgcagcacaaaacctgttgtgcttgaagctagcagaggagcttggtgtaatcattgcaaatccatgggtatcatggttcaaagctgctagtttgccagctcttgtttctctgctagcaacaccatatttgctgtacaaaatcttcccacctgaaacaaaggacacccctgatgccccagcactggctgaaaagaaactgaagctcatgggccctgtgactaaaaacgaatcggttatgattggcacaatgattcttgcagtctccttatgggtttttggggatgctattggtgtgtctagtgttgtggctgcaatgcttgggctctccattcttctcgttctcggtgtgctagactgggacgattgcttgaatgagaaatcagcatgggatacattggcttggtttgcagttctggttggaatggcaggacaactcactaacctgggaattgtttcttggatgtcaaactgtgttgccaagctgcttcagtcgttctcattgagttggccagtggcattttgtgttctggaggcctcctactttctgatccactacctatttgcaagccagactggacatgttggagccttatactctgcatttctggctatgcatatagcggccggtgttcctagtgtgctgtcagcacttgctttggcattcaacacaaatctgttcggtgcaatcactcattatagtagtgggcaggctgcagtatacttcggagccgggtatatggagcttccagatgttttcaggctgggttttataacagccttggctaacacgttaatctggggagttgttggaaccatctggtggaaatttttgggtctgtactgacagtggcagacatgtggttgaccaaaattttcatttggcactggtcgaattgctcttgctcattgttaggaagggcagaatatctagttaactaccgttgctccctccggtcagctatcgctgaggtgatcagcagttagcaattacgcctgtgtcgtgcagttccttgttttctctttggttccgtagaagtccttgggcaatttttctgcgcttggaaccaacgaattctcacaaaacatcagcgagctcgtcggcttgatggtcgtagaggctttgcgtcgcaatctggataatcacatttatttattttggcacgaatcctggatggccgcagcatctgtgtcagttgtcacctctgtttctttcactcctacagctacagatgaaggaacaacgatcctgctactgcactcagaagtcaaaaaaattgattcatgaatggatgtagccaaacaatacagaccacagtaggaacttgggctacgaacagtaagacaaggcagtttgtggtaggaatgaacttgtcacaaacacacgcgtgacacacccgatcgacatggatgacccaggcccagcgcagcattaatgcattgcgccggacccggt

SEQ ID NO: 21979 - DNA, 2439 bp, Zea Mays
ttaccgaatgtgattgtgactacaccgccactgctctgctcaacacggttcaccggtaatgatccccggttcctccgactgcaaccgggcgccacgtccgcacctccatctcgctttcagccgttcgtacctaggctacactacatgaaaggtcgctcttcagctgaaactgaagtctgaaaccaccgcccagcgctcgcctgtttctgcggccgtcgatggagctccacctcgccaccatcgcccaccgcccgcctttgccggtaccggcgcggggccaccacctccgccgccgcctccaccacctcccggctcctctctccttccaaaacacctactccccctccctttcctccccgcatcatcatcgcctttctcccacccttcgccgccacctccgcctgcctcttctcgcctcccaagcgcccaattctaacccggagcctgaacctgagcccgagcccactggtgcgaagctactgccgctcgtcatctccatcgccatcggcctcgccgtgcggttcctcgcgccgcggcccgtcgaggttagcccgcaggcgtggcagctcctctccatcttcctctccacaatcgcggggctggtgcttggccctctccctgtcggcgcatgggccttcctcgggctcacagccgccgtcgccactcgcacgctccccttcaccgccgccttctccgccttcaccaacgaggtcatctggctcatcgtcatttccttcttcttcgcgcgcgggttcgtcaagacaggcctcggcgaccgaatcgccacctacttcgtcaagtggctcgggagcagcacgctgggcctttcctacgggcttaccctcagcgaggcctgcatcgcgccagccatgcccagcaccacggcgagggccggaggcgtgttcctacctatcatcaagtcgctctcgctgtcggctgagagcaagcccaaccatccatcgtcgcggaagcttgggtcctatcttgtgatgacgcaattccaggcatctggtaactcgagtgctttattcctcactgctgcagcacaaaacctgttgtgcttgaagctagcagaggagcttggtgtaatcattgcaaatccatgggtatcatggttcaaagctgctagtttgccagctcttgtttctctgctagcaacaccatatttgctgtacaaaatcttcccacctgaaacaaaggacacccctgatgccccagcactggctgaaaagaaactgaagctcatgggccctgtgactaaaaacgaatcggttatgattggcacaatgattcttgcagtctccttatgggtttttgggtaagctgcttcagtcgttctcattgagttggccagtggcattttgtgttctggaggcctcctactttctgatccactacctatttgcaagccagactggacatgttggagccttatactctgcatttctggctatgcatatagcggccggtgttcctagtgtgctgtcagcacttgctttggcattcaacacaaatctgttcggtgcaatcactcattatagtagtgggcaggctgcagtatacttcggagccgggtatatggagcttccagatgttttcaggctgggttttataacagccttggctaacacgttaatctggggagttgttggaaccatctggtggaaatttttgggtctgtactgacagtggcagacatgtggttgaccaaaattttcatttggcactggtcgaattgctcttgctcattgttaggaagggcagaatatctagttaactaccgttgctccctccggtcagctatcgctgaggtgatcagcagttagcaattacgcctgtgtcgtgcagttccttgttttctctttggttccgtagaagtccttgggcaatttttctgcggtatgttcctctctgatgcttatatacagtccgctctgtaaaagttgcgcggctgcactgaaagcagtgtacagcgttgcggccctcaaaaatgtgttcgctccattctacagctcccagctaactatgattctcaacttacagcttggaaccaacgaattctcacaaaacatcagcgagctcgtcggcttgatggtcgtagaggctttgcgtcgcaatctggataatcacatttatttattttggcacgaatcctggatggccgcagcatctgtgtcagttgtcacctctgtttctttcactcctacagctacagatgaaggaacaacgatcctgctactgcactcagaagtcaaaaaaattgattcatgaatggatgtagccaaacaatacagaccacagtaggaacttgggctacgaacagtaagacaaggcagtttgtggtaggaatgaacttgtcacaaacacacgcgtgacacacccgatcgacatggatgacccaggcccagcgcagcattaatgcattgcgccggacccggt

SEQ ID NO: 21980 - DNA, 1347 bp, Zea Mays
aacgccttggatttggattgaggattcttggtaataacctcttggtaggaaaaggtgtccacggtgaaaatgtaaactctgcatttgatatctgccaggaaaagaagggtaaagtcagataagcatgaaaaaatgaacatgtatttgacaggccacatatcaaatggaaaatatttaaataaaaacaggttcactttataattatatgtttactaatatagtttcattaaatcaacttgtggtaatagtaactagttattgattcagatcaaggttggattcacatctaacagaatgaaaatattgcttgaaagacaacattccttaccaactcatatcctattaaattctgctggattgatggttggatattattagctcctattactcctaaaatttaaaaaattgaattagtctttttgagtcgtatataccaagaacaggtatgtacttcatgtatgtatgaacaggtacagacatatatagagacaccagagaagtcaaatcatattattagctcccatccttgctgctacctctgtcacatatacctaaccatacagaacaagcgaagactccaaaataattaggtcacatcgcataaaacattttacagtgagcaaaatgattacgtctcatctccaatatagttaagtttcctacagtatttaagctcttattttagttatattgttgcacatctcaatagttattagcttatactaacagtaatttaaacatagtgcacctctaacaaaactgtaatagcaagaaaatttaagactagtacctaaactatcaagctacaacctaataagtgctagtatggtacagagataaataagcagaaacagggaagcaccttcgtgttggcgaatctaaggagcccagtgaggaaggggaatctgagcatccctgtagaggaagacacgagcacggcatccacaccaccttccttcccggtcgttggcaaccagtagtgtggcaccacatggatgagacccctgcatcacaggcgaggggcaccgacgcgaaggccacgagggcgaagatgtcgatgggcagtcaaggaggaagcagacccctccagctccaggagatggcttgctggcgagtggtagccgccgccggcggacaagcagatatggagctcagcgtcggggatggagccgtcgcgtcggggatggaggaggagtcgagggggagtggaggaggagccgccgtgtccgagagctccaaggctggcgacggctagggtttggaatgagggcggttggcaatttggtgtgacctgggggtgaattgggctagcactcgggctcgcccagctgggcctccagaggttcg

SEQ ID NO: 21981 - DNA, 577 bp, Zea Mays
accttcgtgttggcgaatctaaggagcccagtgaggaaggggaatctgagcatccctgtagaggaagacacgagcacggcatccacaccaccttccttcccggtcgttggcaaccagtagtgtggcaccacatggatgagacccctgcatcacaggcgaggggcaccgacgcgaaggccacgagggcgaagatgtcgatgggcagtcaaggaggaagcagacccctccagctccaggagatggcttgctggcgagtggtagccgccgccggcggacaagcagatctgcgaggagggcaggaggcacacgttatggggacagggtcagagtctgaagttttcacctgggagtctaggaccgaggtgagggaagacatggagctcagcgtcggggatggagccgtcgcgtcggggatggaggaggagtcgagggggagtggaggaggagccgccgtgtccgagagctccaaggctggcgacggctagggtttggaatgagggcggttggcaatttggtgtgacctgggggtgaattgggctagcactcgggctcgcccagctgggcctccagaggttcg

SEQ ID NO: 21982 - DNA, 1155 bp, Zea Mays
ggggtcttccccatgtaattactatctcaaccctttgtaatgggccaggcccaattacctaagtctattaatactacacccaaccctgattagggttagggtttccattccaactttttgttttggggggtgggggagcaatctatctgcagcagtactgcctaccgaaattgttttaccaaattatcatttggtcgtgtaatttgccaggcaatacataatgcagagaagggagaaccagctgctttattactttctcccaggacatcgtcagccatgcctggagtagaatccatgggtcacggaagccagtttacatacttcctcactgctccaatgcaagccttctgccaactagcaggaataacttctgacatagataccgatacatatgcaaatgcagagaacatacttttctctgctttggaagaatacgaaggaatactctgtacttctgttggattaaacaatgtctgggggcaaattttaccagatccatttctcagacggctgattctcaggttcattttctgccgagcagtgcttttctatttccactcagatgagcacgagcatctaccgacctgcctacctagtcttccagagtcggtctcccaaacgcagaggccataaaaaaacccatcctttcgtttgcagaagaccttgtcgtcagcgatcagtttaacttcggtgactccacacgcaacaagaaatgatgatcggcagcaataaccataacccatgccttgtgtagatacctcctcggtaaatatagtccagcagtttgttgattatttattttgcatttatacagccaacggggcaatggctcagcaccaattagctggctgctgcatggacggtgtgagttgaatggcgatatgaagaattttgacctgccgtgtcatccccgtcgagcgtctgtacaagttcgtttaggtgttctctaatttgctctaggcattgtaggcatgttaaccttgtcttcgattgttcttctttgttgtcttgagaggacggtttgtaagccggaagaggcgtttttcaagtactctggaaggcagatggtttgcagagtttggttagctcacccatatttgacggcaattctatggcgatggtagttgaattcagaatcccactttctgtgttttc

SEQ ID NO: 21983 - DNA, 2344 bp, Zea Mays
aagacaggagtgggccagtgtgggttgagatgtcgagtggcgcggcgggccccgtaatcgaacggttacggtgccttccaatttgcgtgttgatttgatcaaaccctggactgtgaatactgaacccaactagtctcacgtggtcatcactcaccgcgccgccgccgccgccaccgccagcaatggcgcgccgcctcttctgtgccacgagaacgctcctccttcctgccccagctcccgtgccggcgcccacctctgcgtcttctgcagcggccgcggaagcgtcggcctcgctcctgccactgctcccctgcaagcggagaaagaagctcctgaggaagctcaacagcccacgggtcgcgcctatcgagccggaggccgcgcgtcgcgttccggccctcgacgccgtgctcgaccgcgatacggccttccgcttcctccaccgggcgcgctcgttcctggcttccctcccgcctccgcaccggatcccccttgccgaggctggaaagctgtaccgcgagctcggcttcccccgcggccgcaaagtgtcgcgctccgctacgcgccacccgctgctgttccacctcccagtcgtggactccgttccgcacctcgcgctcacgccgttcatgtgctcgctcctcgaggaagagcgccgcatccacgacgacctcctcccttcgcgggtgctcgcagtcaggaagctcctcatgctcacagcccaccgtcgcgtgccgctcgcgaagctccaccactgccgcgctgtgctcggcctccccgacgacttccgcgaccgcgtccaggacttccccgacgacttccgcgtcgtagtcgatcccagggacggccgccacttcctcgagctcgcgcgctgggaccctgcgctcgccgtcagtgcgttggagcgcgacttcgtcgtggacgagcgccgcgtccggcgcacgttccgcttcgcggtcccacaccgccggttgatgccgcttgacgccgaggacgccgaccgcctcgacatggcgaccacgttcccgttggtctcgccgtacaccaacggcgcgctgctcaagccatggacgcccgaggcggaaaagtaccgcgtcggtgtggtgcacgagttcctgaacctgacgctggagaagcgagcgatgatccaccacatcgtcgagttcaaggaggagttcgggctcacgcggcacatggacgcgtatgacgaaaatggcgtgctcaaggagaaggatcccctcgtgctgttcaatgagaagcttcagcactatgcgtgtatgagcaagatagattccagagagaccatgattgatactgcaggcttgactgaataaggtcagctttcagttggttctgccgccagaattcaattgtgcttatttgcagccagcgaggagccgccctcattgagccatggctgcatctgttgctgcccgtgaatcatagactggatcagcgcatcagatcgtacaccgccacgtggcccattggaacgaactgtgactggactcggccaccggttgtcaggtacagtcacccaagacaatgctggctcaacctcgcgaccattcacatcttctttggtcggtgcaagcggcaattactgatcgtctcacacgcgaaggatgtccaacgtcgccgcctggctactaagtgggtgaaccaatggttgaactcattggcctttagatttgtgcaatggagttctgcaacatcaagattgatactggcaactctattgataagactgcaggcacaataaaggttggatcatgaagtgagatcaagctcttatggacaggtagcgaacttcttatccaatcttagcttattcccatctaatcacacgtgaagaaaaatattttgtttgactactgtaaatgtttaaggccatgaaaatttacaaatatgaaatagtcgtggtatatgtatgctattcaaaggagacttcgtctgctgttaactatttccttccgttgcacacatgtgagcttgcaagtgccacacttatggttttgaccacactgagatgcaatgcgaaaattaatattgtgtctatggtctgaaatgttcccccaacactactgaacaggctttgcagaaacatattctagcaatactacatgtttctcaagttcagttataatttcttcttaatggtaaagcatcaggtcattccgtgttctgtcattcccattcccgcactgtctttctcattcttccatccccgtaaagctcattcccattcccggctgtcattccgtgttctgcgtgcatccaacgcctagctaaaattaaattaaaaaaacacaaaatgtggctccaatgggattcaaacctgcga

SEQ ID NO: 21984 - DNA, 2282 bp, Zea Mays
aagacaggagtgggccagtgtgggttgagatgtcgagtggcgcggcgggccccgtaatcgaacggttacggtgccttccaatttgcgtgttgatttgatcaaaccctggactgtgaatactgaacccaactagtctcacgtggtcatcactcaccgcgccgccgccgccgccaccgccagcaatggcgcgccgcctcttctgtgccacgagaacgctcctccttcctgccccagctcccgtgccggcgcccacctctgcgtcttctgcagcggccgcggaagcgtcggcctcgctcctgccactgctcccctgcaagcggagaaagaagctcctgaggaagctcaacagcccacgggtcgcgcctatcgagccggaggccgcgcgtcgcgttccggccctcgacgccgtgctcgaccgcgatacggccttccgcttcctccaccgggcgcgctcgttcctggcttccctcccgcctccgcaccggatcccccttgccgaggctggaaagctgtaccgcgagctcggcttcccccgcggccgcaaagtgtcgcgctccgctacgcgccacccgctgctgttccacctcccagtcgtggactccgttccgcacctcgcgctcacgccgttcatgtgctcgctcctcgaggaagagcgccgcatccacgacgacctcctcccttcgcgggtgctcgcagtcaggaagctcctcatgctcacagcccaccgtcgcgtgccgctcgcgaagctccaccactgccgcgctgtgctcggcctccccgacgacttccgcgaccgcgtccaggacttccccgacgacttccgcgtcgtagtcgatcccagggacggccgccacttcctcgagctcgcgcgctgggaccctgcgctcgccgtcagtgcgttggagcgcgacttcgtcgtggacgagcgccgcgtccggcgcacgttccgcttcgcggtcccacaccgccggttgatgccgcttgacgccgaggacgccgaccgcctcgacatggcgaccacgttcccgttggtctcgccgtacaccaacggcgcgctgctcaagccatggacgcccgaggcggaaaagtaccgcgtcggtgtggtgcacgagttcctgaacctgacgctggagaagcgagcgatgatccaccacatcgtcgagttcaaggaggagttcgggctcacgcggcacatgtacgagtcgttacagaagcagaaccgcgctttctacctcgccggcacagagatgaactgggccttattcctcagggacgcgtatgacgaaaatggcgtgctcaaggagaaggatcccctcgtgctgttcaatgagaagcttcagcactatgcgtgtatgagcaagatagattccagagagaccatgattgatactgcaggcttgactgaataaggtcagctttcagttggttctgccgccagaattcaattgtgcttatttgcagccaggtacagtcacccaagacaatgctggctcaacctcgcgaccattcacatcttctttggtcggtgcaagcggcaattactgatcgtctcacacgcgaaggatgtccaacgtcgccgcctggctactaagtgggtgaaccaatggttgaactcattggcctttagatttgtgcaatggagttctgcaacatcaagattgatactggcaactctattgataagactgcaggcacaataaaggttggatcatgaagtgagatcaagctcttatggacaggtagcgaacttcttatccaatcttagcttattcccatctaatcacacgtgaagaaaaatattttgtttgactactgtaaatgtttaaggccatgaaaatttacaaatatgaaatagtcgtggtatatgtatgctattcaaaggagacttcgtctgctgttaactatttccttccgttgcacacatgtgagcttgcaagtgccacacttatggttttgaccacactgagatgcaatgcgaaaattaatattgtgtctatggtctgaaatgttcccccaacactactgaacaggctttgcagaaacatattctagcaatactacatgtttctcaagttcagttataatttcttcttaatggtaaagcatcaggtcattccgtgttctgtcattcccattcccgcactgtctttctcattcttccatccccgtaaagctcattcccattcccggctgtcattccgtgttctgcgtgcatccaacgcctagctaaaattaaattaaaaaaacacaaaatgtggctccaatgggattcaaacctgcga

SEQ ID NO: 21985 - DNA, 2393 bp, Zea Mays
aagacaggagtgggccagtgtgggttgagatgtcgagtggcgcggcgggccccgtaatcgaacggttacggtgccttccaatttgcgtgttgatttgatcaaaccctggactgtgaatactgaacccaactagtctcacgtggtcatcactcaccgcgccgccgccgccgccaccgccagcaatggcgcgccgcctcttctgtgccacgagaacgctcctccttcctgccccagctcccgtgccggcgcccacctctgcgtcttctgcagcggccgcggaagcgtcggcctcgctcctgccactgctcccctgcaagcggagaaagaagctcctgaggaagctcaacagcccacgggtcgcgcctatcgagccggaggccgcgcgtcgcgttccggccctcgacgccgtgctcgaccgcgatacggccttccgcttcctccaccgggcgcgctcgttcctggcttccctcccgcctccgcaccggatcccccttgccgaggctggaaagctgtaccgcgagctcggcttcccccgcggccgcaaagtgtcgcgctccgctacgcgccacccgctgctgttccacctcccagtcgtggactccgttccgcacctcgcgctcacgccgttcatgtgctcgctcctcgaggaagagcgccgcatccacgacgacctcctcccttcgcgggtgctcgcagtcaggaagctcctcatgctcacagcccaccgtcgcgtgccgctcgcgaagctccaccactgccgcgctgtgctcggcctccccgacgacttccgcgaccgcgtccaggacttccccgacgacttccgcgtcgtagtcgatcccagggacggccgccacttcctcgagctcgcgcgctgggaccctgcgctcgccgtcagtgcgttggagcgcgacttcgtcgtggacgagcgccgcgtccggcgcacgttccgcttcgcggtcccacaccgccggttgatgccgcttgacgccgaggacgccgaccgcctcgacatggcgaccacgttcccgttggtctcgccgtacaccaacggcgcgctgctcaagccatggacgcccgaggcggaaaagtaccgcgtcggtgtggtgcacgagttcctgaacctgacgctggagaagcgagcgatgatccaccacatcgtcgagttcaaggaggagttcgggctcacgcggcacatggacgcgtatgacgaaaatggcgtgctcaaggagaaggatcccctcgtgctgttcaatgagaagcttcagcactatgcgtgtatgagcaagatagattccagagagaccatgattgatactgcaggcttgactgaataaggtcagctttcagttggttctgccgccagaattcaattgtgcttatttgcagccagtatacagcactgaatggtctcaccaggctgatgagcaccttatcgccagcgaggagccgccctcattgagccatggctgcatctgttgctgcccgtgaatcatagactggatcagcgcatcagatcgtacaccgccacgtggcccattggaacgaactgtgactggactcggccaccggttgtcaggtacagtcacccaagacaatgctggctcaacctcgcgaccattcacatcttctttggtcggtgcaagcggcaattactgatcgtctcacacgcgaaggatgtccaacgtcgccgcctggctactaagtgggtgaaccaatggttgaactcattggcctttagatttgtgcaatggagttctgcaacatcaagattgatactggcaactctattgataagactgcaggcacaataaaggttggatcatgaagtgagatcaagctcttatggacaggtagcgaacttcttatccaatcttagcttattcccatctaatcacacgtgaagaaaaatattttgtttgactactgtaaatgtttaaggccatgaaaatttacaaatatgaaatagtcgtggtatatgtatgctattcaaaggagacttcgtctgctgttaactatttccttccgttgcacacatgtgagcttgcaagtgccacacttatggttttgaccacactgagatgcaatgcgaaaattaatattgtgtctatggtctgaaatgttcccccaacactactgaacaggctttgcagaaacatattctagcaatactacatgtttctcaagttcagttataatttcttcttaatggtaaagcatcaggtcattccgtgttctgtcattcccattcccgcactgtctttctcattcttccatccccgtaaagctcattcccattcccggctgtcattccgtgttctgcgtgcatccaacgcctagctaaaattaaattaaaaaaacacaaaatgtggctccaatgggattcaaacctgcga

SEQ ID NO: 21986 - DNA, 2133 bp, Zea Mays
aagacaggagtgggccagtgtgggttgagatgtcgagtggcgcggcgggccccgtaatcgaacggttacggtgccttccaatttgcgtgttgatttgatcaaaccctggactgtgaatactgaacccaactagtctcacgtggtcatcactcaccgcgccgccgccgccgccaccgccagcaatggcgcgccgcctcttctgtgccacgagaacgctcctccttcctgccccagctcccgtgccggcgcccacctctgcgtcttctgcagcggccgcggaagcgtcggcctcgctcctgccactgctcccctgcaagcggagaaagaagctcctgaggaagctcaacagcccacgggtcgcgcctatcgagccggaggccgcgcgtcgcgttccggccctcgacgccgtgctcgaccgcgatacggccttccgcttcctccaccgggcgcgctcgttcctggcttccctcccgcctccgcaccggatcccccttgccgaggctggaaagctgtaccgcgagctcggcttcccccgcggccgcaaagtgtcgcgctccgctacgcgccacccgctgctgttccacctcccagtcgtggactccgttccgcacctcgcgctcacgccgttcatgtgctcgctcctcgaggaagagcgccgcatccacgacgacctcctcccttcgcgggtgctcgcagtcaggaagctcctcatgctcacagcccaccgtcgcgtgccgctcgcgaagctccaccactgccgcgctgtgctcggcctccccgacgacttccgcgaccgcgtccaggacttccccgacgacttccgcgtcgtagtcgatcccagggacggccgccacttcctcgagctcgcgcgctgggaccctgcgctcgccgtcagtgcgttggagcgcgacttcgtcgtggacgagcgccgcgtccggcgcacgttccgcttcgcggtcccacaccgccggttgatgccgcttgacgccgaggacgccgaccgcctcgacatggcgaccacgttcccgttggtctcgccgtacaccaacggcgcgctgctcaagccatggacgcccgaggcggaaaagtaccgcgtcggtgtggtgcacgagttcctgaacctgacgctggagaagcgagcgatgatccaccacatcgtcgagttcaaggaggagttcgggctcacgcggcacatgtacgagtcgttacagaagcagaaccgcgctttctacctcgccggcacagagatgaactgggccttattcctcagggacgcgtatgacgaaaatggcgtgctcaaggagaaggatcccctcgtgctgttcaatgagaagcttcagcactatgcgtgtatgagcaagatagattccagagagaccatgattgatactgcaggcttgactgaataaggtcagctttcagttggttctgccgccagaattcaattgtgcttatttgcagccagcattggcctttagatttgtgcaatggagttctgcaacatcaagattgatactggcaactctattgataagactgcaggcacaataaaggttggatcatgaagtgagatcaagctcttatggacaggtagcgaacttcttatccaatcttagcttattcccatctaatcacacgtgaagaaaaatattttgtttgactactgtaaatgtttaaggccatgaaaatttacaaatatgaaatagtcgtggtatatgtatgctattcaaaggagacttcgtctgctgttaactatttccttccgttgcacacatgtgagcttgcaagtgccacacttatggttttgaccacactgagatgcaatgcgaaaattaatattgtgtctatggtctgaaatgttcccccaacactactgaacaggctttgcagaaacatattctagcaatactacatgtttctcaagttcagttataatttcttcttaatggtaaagcatcaggtcattccgtgttctgtcattcccattcccgcactgtctttctcattcttccatccccgtaaagctcattcccattcccggctgtcattccgtgttctgcgtgcatccaacgcctagctaaaattaaattaaaaaaacacaaaatgtggctccaatgggattcaaacctgcga

SEQ ID NO: 21987 - DNA, 1492 bp, Zea Mays
gtactttgcaagaatgggaagaagtcatttttgaagtataccgttctgaaagtgtgggtgattgctggtttaaaaccagccaaaaacccatagaagaataagaagtgctctgcatctcccctggtcttaaattccatcccaacttgagcatcaaagttttcacgagcacttgatgtttcaactgcccttccatctacatttggtgcacaatcagatcatttggagttttcgagatggatgatttcgtacctcggcgtatgcacttgaacatccatccacttcaaaattcttaccttgtttatggacatatagctagacgaaatgcagctgttgtgctctagtcatcaaataagaaggcataggttgagaagatcatggagaccaagcaagtttggaggcggaggcgtaggggcaagttcatgtaataggtttgttttttgtgtggcagatcatcattggatggctaatggatagtgtcaggtttctctccaattgcagaggttatttttacgtgggtagcactgattgaatgagagaaacaacagtaaaatgagggcgtggggctcagatctggtggcgaggattgttgtatcgaacctgcacaagaacacgaagaagtcattctcggagacgtttaaggacatgtacatgcaaacaagagatccaggctgatgcccctctagtcactgaagatgtttatgaaatcatcatgaagaatgctgctcgcttggacagtgagataatttatgatagggatttcgactacgactattttggcttcaaaactctagagaggtcttacctgttgaagcttgatggtaaggtcgttgaaaggctacaacagatgttaatgaaggtttcactggggatacacaaggaagacatcgagtctgccatcaggacgtaccatctgatgtcccagcgctggtttactcatgcttcaccgatgcttttttcaatgctggcacgtcgaggccccaactgttttcttatatgcatgaaagatgacatcattgagggaatctatgaaaccctcaaagagtgtgctgtaataagcaaatctgctggaggaattggtgtctcagttcataatatccgtgctactgagagttatattcgaggaacaaatggaacatcaaatggaattgttcttatgttacgtgtctttaatgatactgctcgctatgttgatcagggtggtggcaaaagaaaggtgcattttgctgtatacttggagccttggcatgctgatatttttgagttctttgatctgagaaagaaccccaggaagtttgtttttctaggttcttaaggaatcaagtgacgaggaaagggagcaagctgaagagatgatgaagtactagtttgtttttctaggttcttaagtgtcacacccgggtttcggggcaccaagacccggacgcgaacataatcaccaggtgtgctgggaccaagtctcacacatatgatgaatcatggcacaggatcgaat

SEQ ID NO: 21988 - DNA, 1126 bp, Zea Mays
caagaatgggaagaagtcatttttgaagtataccgaccttgtttatggacatatagctagacgaaatgcagctgttgtgctctagtcatcaaataagaaggcataggttgagaagatcatggagaccaagcaagtttggaggcggaggcgtaggggcaagttcatgtaataggtttgttttttgtgtggcagatcatcattggatggctaatggatagtgtcaggtttctctccaattgcagaggttatttttacgtgggtagcactgattgaatgagagaaacaacagtaaaatgagggcgtggggctcagatctggtggcgaggattgttgtatcgaacctgcacaagaacacgaagaagtcattctcggagacgtttaaggacatgtacatgcaaacaagagatccaggctgatgcccctctagtcactgaagatgtttatgaaatcatcatgaagaatgctgctcgcttggacagtgagataatttatgatagggatttcgactacgactattttggcttcaaaactctagagaggtcttacctgttgaagcttgatggtaaggtcgttgaaaggctacaacagatgttaatgaaggtttcactggggatacacaaggaagacatcgagtctgccatcaggacgtaccatctgatgtcccagcgctggtttactcatgcttcaccgatgcttttttcaatgctggcacgtcgaggccccaactgttttcttatatgcatgaaagatgacatcattgagggaatctatgaaaccctcaaagagtgtgctgtaataagcaaatctgctggaggaattggtgtctcagttcataatatccgtgctactgagagttatattcgaggaacaaatggaacatcaaatggaattgttcttatgttacgtgtctttaatgatactgctcgctatgttgatcagggtggtggcaaaagaaaggtgcattttgctgtatacttggagccttggcatgctgatatttttgagttctttgatctgagaaagaaccccaggaaggtattctatcttgtatgttgtcattacacattttttccattatgtttgttatatacatgtaaatgatcagccacatgatgctggaaaatat

SEQ ID NO: 21989 - DNA, 318 bp, Zea Mays
gcctagcaccatagcctgccagcgctaggccattgccgctaaattcggccaacaggtgaaggccgataggcctaatctttgccggccatgcctataaagcgaagtcgttcagctacgccagcggggaaaagaatctgtaagaatctgcaagagcacgccgccaacagagaggaggatctgcatgagcgttgtcaaccgggagatcgccatcatcgtcgccaacccagcattgtggtcacccaaatctacgcagtgaggatacgtgtcatcagaagagcaagttggtacctggaatctcaagtcccaggcaagttgtgc

SEQ ID NO: 21990 - DNA, 306 bp, Zea Mays
catagcctgccagcgctaggccattgccgctaaattcggccaacaggtgaaggccgataggcctaatctttgccggccatgcctataaagcgaagtcgttcagctacgccagcggggaaaagaatctgtaagaatctgcaagagcacgccgccaacagagaggaggatctgcatgagcgttgtcaaccgggagatcgccatcatcgtcgccaacccagcattgtggtcacccaaatctacgtgaggatacgtgtcatcagaagagcaagttggtacctggaatctcaagtcccaggcaagttgtgc

SEQ ID NO: 21991 - DNA, 931 bp, Zea Mays
gtttttctttacacattaaatacactttattttgaagaacctatgtagtccttttttaacataatggcaggagctctacctctcaattaagaagaagaacctatttagtccttgaattacataactttgatttgcaattggagggagcaggaatagaacatcttaatcctgttaagcctctgattggcatagcagatgtattcctttgctttggaccaagattctgcatgtcatcactttgagaagccatcaaggttgatagtaaattttgtgcgttgtgttttacatgtgtagagaagcagtaacccaagagcatggacaaaaaatcaatagatatcaagcaatccttgcagcccgtctgaaggctaagtttttctctaagaaggcttttgacagagggaacatttttgaatcagaaaccattgttggaggtgaaacaattcggtcaagcaggtggccatgtacaagatcatttgcaaacccagaatttttttcccgcgacaagaacagccatgagaagggaaattctccatcttcagcagcagatttctctgccaagaacaactctccacccttggctggtgaagcctcaccaaagaataatgctagtgctttggtcacagaaaacaatttaacaactggaaatagacagcaatccaagaagaattgacctgatggattaatgtaggataatcaggttatgttctgttcttctgtagcctgagggtagcaacctgaagtatacacttagcaggaaaggcaaattgacgccaaaaatgtttgtaacctgctctaaattcagtttgttgtacctgttctagaaagcatctgtagcgaggaataccgttgtttacttggtatttaaattgatgtattatagactccctattgaaccattgattgctcaaatctgaaccccaaattttcttta

SEQ ID NO: 21992 - DNA, 526 bp, Zea Mays
ggtaatttcttttgattatccttttttctcatctcattactgtccatattcttatatctttcttttaaagatcctgggacaaaactcgaagtattcaaggttcagagtcgacagcatcatagcagtaatttatgggagggtaaaatgttcttatttacagaatcatatcactgaactgtagtttctatctgagtgttggatctctgtagtactttccggttcttgtcccgttgtatggaaagctgcatcaccaagcctacatagttttttttttatttttgtcagcagcctgcccgcctgtgcaagtatgtatcaactatcaatactcttgctttctaaatactctgcttggcccttgtgacgtgagcaactcaaagtggtctatgctttttgtattttatatttacatgctcacagcaagctttagacagcactgatttgatggctcaattgctagttgcaaatttcagatacgtccttgtgtcagaatctctttggtttgctattttatcaaaattaatttgac

SEQ ID NO: 21993 - DNA, 2430 bp, Zea Mays
ccatctctctctctctctctctctctctctctctctctctctctctctctctctctctctccttcccatgcttctcgccggaacatatagcataagaatctcccgtgtccgggcatctttccttttcctgccataggccgtgacgggagcttcttgcttgcgtgcttgttccgggccggctatcatattgcctgcctatgaagctctctgtctctggccaatggaggagctacttctcctctagcctttctcgtctctgattcgtccattgaccttgggtgacgtcggcgccacttctgcgccccgcgactcctcgcgtcttgtgtgagtgtgagtgctacaagcaagcgatggacatgaacgagagcggcgagacagggatggagcagggcaacgcgtcctccggcgccccggtggattggcagactcaattcaacgccgccgcgttctcgtgcgcgccgcagcaggttcccatgatggactccgccttcgcgtccgccggcctgtgggcgtccacctcccaagccatggcgctctccgacgtcgtcggcgccatgtcggccgcgcggggaggcgggttcttggcgccggtgcccggtttcctcccgcagggcctcggccatttcgccgtcgactccggcttcatcgagcgcgccgcgcggacgtcctgcttcagcggcggcggcggcggggtgatgggcgctagcgcagctgccttcggtgcggctggtcagaccgtgaacaacgcgttcagtggttcgtcagaggcgctgctgctggatcaccagaagaaggacgtcgtcggcgagaagggcgagccggagctcggccgcgacgacggggtgctgagcccggaggctgctggtggtggggactgctcgtccaaggggacgtcggactccaagaagaggagaaggcccaacgaggtggtgggaagcgatcaggtccagtcggccaacctgcccagcgccgactcggcgaacgagagcgtgcacagcatggacaaaggcgaggagagcagcccggcaacaaccaccgccggcgccgggcctggcaagtcgagagggaagggagagaaagaggtccccgagtctcagaaggaggactacatccatatccgagcccgccgcggacaggcaacgaacagccacagcctagcagaacggttgaggagggagaagattagcgagaggatgaagcttctgcaggaccttgttcctggttgcagcaaagtcactggcaaggcggtgatgcttgacgagatcatcaactacgttcagtccctgcaaagacaagttgagttcttgtcaatgaagctcgccacggtgaacccaaggcttgacctcaacatagaagggcttctatcgaaagaccttctccgcttccctggtgctccttcgtcctccctcgggtttcccccagaaatgatgcacccgcagctactacagctgtcgcagccaggccgcctggtccagggagccgccgccgccgccgccggcatggccaatccggacgtgttcaggagaatcatgcaggcgcagctgagcgcgaaagacgacagcggcggcgcctctcagatgctgccccacgggtcgttcggtggcgttgcgcgggcggcgtacccgtcgtcgtcgtcggccctggcgctggggtcccacgactacttgaggagcatgagcagggcgtcgcaacaggacgtgtttcaaatctgagcatgccagcttgcacgtagcagcagaggcttccttctccatctggacgtctggtcgacgaacatgcaggcgcgcagggccggcaaggaactgaggaaaagctcgtggagtccccccacccccgcggaacggaagcgctcggacggacggacggagggacgagcgatgcctttgcctgcctggatggctggaaattctgtctgggtggtcgcgtggtgcattcatggctggctggcgcccagtgcagtggccagtggcagtggcagtgggctgtgtgttggtagcgagcaaatgcgctgctgctgctgctgctccagctgcagcaggatgtaacgcgaggagccttggtttctgttagtagtttcagtgcctttttggctgcgtataatatagtttaagggtgcaagaaacactcgtaaatttcgggggcggcctggcgagttctccttgtgccacaaatcaaagaaaagaagggtgctacgtacgatcgatcatgcatgctcatggactctgtctcggtgtcggcttcctccctcgtagggctggaaacgagcctcggctcggctcgtccattccacgagctggtgaaagaggctcgactcgaccttggctcgcgagtctgctcggctcgcgagccatattcttatacttatcgttgcattatttgataaattaacattatataaatttgaaatatagaatcatcaaagactaaaaa

SEQ ID NO: 21994 - DNA, 914 bp, Zea Mays
aaacctctcctttcgcctgcctttgatcctggtcctcctgcctgaatccgcagccgcagcacaggcacagcagctcccttgttgttgcaacatgaggtgcgcaggtgttctcctgccgctccttctgctctccctgtcggccgcctccactgccgaagcacacaaggaacgactgggcgacgctgctgctgcactgtcgactggtcggagatggttgacaggacgcaagacactggcagcacccgggcgtgatgaggtggtggaaggagccaagaagagcacaggtgcaaacactgcccatgtccatggagcggaaacaactgtagaggttgccgttgtcgggcgcaggagcagaaccgccggcctcgtgccgttctgtgccgactaccgcactccgagaactcacccgccaaggaataactgagacttaaagcaggagcgaaccaggaagcggatgcacctgacctgcggaagctgtacatggcccgtgtaaaaggagcgagggcccggtaacccatgccacgttccaagcaccaaggcatgccggcggcggcggcggcggcacggatacatcggcgcctgagatcctcgccggcatggactacaactacaggctggatgctcgtcgccaccgcccgatcaacaacggcgctccgctggttgagctcgccgccgggacaccctaggacccccctgaggctgactagatagtagtacgtctgagtctgaccacgcagtagccatcagcagatggtggctagcatagctgcataggtagctaggaacaccctctccacgctacacggagcccgtgcctggcactcatggaacaatctgagatcagtgtactgggcgattttggttgtacaatgtgctagcatagtagcatggtgagaatacaggagctgctgttg

SEQ ID NO: 21995 - DNA, 2258 bp, Zea Mays
atggcctcccacggaattcatgggggagcaggatacaccttttttaaaacgacttactgggagaagcacataaaagccagattcatttttgtattacggagaaaaaaggaattaatagagttccaaacctcggttctgcagtttctactaaaaaagcagtcatttatgttatctgtccccgaagcagttgcagtggtgaggttgctaagaatcgagaaggggaaagcatttgtagaccttttgaacgagaaagcaaatgattctggagataaagagataggatatgtgcagaggacactaggtttcagcacacgctatttggaggacagggatataagactggttaccgtcatagttgctggaacagtgcgctggaaacgctaccttgattatctaatcatgtcactatgcagtgaggagaaggttttcagggagatggagccactgcttctacagatattgagaattggctttttcgaaattctcaagcttgatgtacctgcttatgctgccgttgatgagaatgtaaggcttgctaaagtagctttaaggcctggtgctgggaatatggtgaatgcaattctgcgtaaacttgtattgctaaaggagacagactctcttcctcttccaaagatagaaggtgatgatcgtgcccaagctcgtgctctttctataatttattctcatcctgtttggatggtgagacgatggatacggtttcatggaaaagatgaagctctaagattgatgaattggaacaacagtgatcctcatttcagtctaagggtgaacacatcaaaaggctatactagggctgaccttgtaaaacgattggaaagtttacaggttcattatgaagaatcaattatggatgaatttgttcgcattcgggaagggatgcagcaagtcttaaaagctggattactgaaagatggcatttgtgctgtgcaagatgagagtgcagggaagactgcgaactatagacccaaatgggtctgacccttccccagaccccgcacaagcgggagcacatgcaactggcgccccctttttttagatcactgcattataaaacaatactcttagcaaataatagctcatggctgtaaaaaggcacttctcatatcactttggtttagttgggagtgacacattttcagttgaggaagttattgataatctgcgctgagttatgaaagacctatttgtaggtcttgtagtgtctgtggttgatccacaacccggggaaacgattgttgattgctgtgctgcacctggtggaaagactcttttcatggcatcacggttgtcaggagaagaaggaaaccacagttaaatatgacaaagtattgttggacgctccatgctctggtctgggagtgctttccaagagggcggacttacgctggaatagacaatttgaaaatttggaagagttgatgtgtttacaagacgagcttcttgattcggcatcaatgttggtaaagccaggtggtatactaatttacagtacgtgttcgattgaccctgaagaaaatgaagagaggattactgcttttgttcagaggcatccggaatttgctcttcagagtgtatgtggatatgttcctagagaatttatcacagatgaaggtttctattcctcaaatccaactaagcactctatggatggggcatttgctgcacgtcttgtccggtcaacgcactaagattataggagttgccacaaggccacaactaggtgtgaagttgaacaaggaatcacatgtattgccctaagtgcacccagtcattgcttcaatatctttatcttatatattcttgaactttgctgcgttttcctcttacgcttcacaaaaaaaaagcatatccaaacccataccatattgcttcttgtacggcacgcagattttttgaagcgttttcgctttgtattaaagtcatctgtttagactgctcagttgtaatatatatagaaaaaacactgtaaaaacagtagaagctatgtcggattaaagccaaatcagctgcctatttcaacgagagaaaccgtgatgagagagaaatcgctgtttcctgaagccttcaaccgttagcagccggtggccggggcgtaaaagacgaactactcgtcttcacggaaaacgacggtgaagaagatggcgtctactatgaggttcatgcgcagatcaactccactcgactgcccaatgcttatcttgtttggcatattgttgcagtatatgacagtatcccat

SEQ ID NO: 21996 - DNA, 2130 bp, Zea Mays
atggcctcccacggaattcatgggggagcaggatacaccttttttaaaacgacttactgggagaagcacataaaagccagattcatttttgtattacggagaaaaaaggaattaatagagttccaaacctcggttctgcagtttctactaaaaaagcagtcatttatgttatctgtccccgaagcagttgcagtggtgaggttgctaagaatcgagaaggggaaagcatttgtagaccttttgaacgagaaagcaaatgattctggagataaagagataggatatgtgcagaggacactaggtttcagcacacgctatttggaggacagggatataagactggttaccgtcatagttgctggaacagtgcgctggaaacgctaccttgattatctaatcatgtcactatgcagtgaggagaaggttttcagggagatggagccactgcttctacagatattgagaattggctttttcgaaattctcaagcttgatgtacctgcttatgctgccgttgatgagaatgtaaggcttgctaaagtagctttaaggcctggtgctgggaatatggtgaatgcaattctgcgtaaacttgtattgctaaaggagacagactctcttcctcttccaaagatagaaggtgatgatcgtgcccaagctcgtgctctttctataatttattctcatcctgtttggatggtgagacgatggatacggtttcatggaaaagatgaagctctaagattgatgaattggaacaacagtgatcctcatttcagtctaagggtgaacacatcaaaaggctatactagggctgaccttgtaaaacgattggaaagtttacaggttcattatgaagaatcaattatggatgaatttgttcgcattcgggaagggatgcagcaagtcttaaaagctggattactgaaagatggcatttgtgctgtgcaagatgagagtgcaggtcttgtagtgtctgtggttgatccacaacccggggaaacgattgttgattgctgtgctgcacctggtggaaagactcttttcatggcatcacggttgtcaggagaagggaagatatgggctctggacataaacaaaggtcgtttgagaatactcatggacgcagcaaagttacacggtctagatgatatgatcactgacatccatgctgatcttcgactatatgctaaggaaaccacagttaaatatgacaaagtattgttggacgctccatgctctggtctgggagtgctttccaagagggcggacttacgctggaatagacaatttgaaaatttggaagagttgatgtgtttacaagacgagcttcttgattcggcatcaatgttggtaaagccaggtggtatactaatttacagtacgtgttcgattgaccctgaagaaaatgaagagaggattactgcttttgttcagaggcatccggaatttgctcttcagagtgtatgtggatatgttcctagagaatttatcacagatgaaggtttctattcctcaaatccaactaagcactctatggatggggcatttgctgcacgtcttgtccggtcaacgcactaagattataggagttgccacaaggccacaactaggtgtgaagttgaacaaggaatcacatgtattgccctaagtgcacccagtcattgcttcaatatctttatcttatatattcttgaactttgctgcgttttcctcttacgcttcacaaaaaaaaagcatatccaaacccataccatattgcttcttgtacggcacgcagattttttgaagcgttttcgctttgtattaaagtcatctgtttagactgctcagttgtaatatatatagaaaaaacactgtaaaaacagtagaagctatgtcggattaaagccaaatcagctgcctatttcaacgagagaaaccgtgatgagagagaaatcgctgtttcctgaagccttcaaccgttagcagccggtggccggggcgtaaaagacgaactactcgtcttcacggaaaacgacggtgaagaagatggcgtctactatgaggttcatgcgcagatcaactccactcgactgcccaatgcttatcttgtttggcatattgttgcagtatatgacagtatcccat

SEQ ID NO: 21997 - DNA, 2082 bp, Zea Mays
atggcctcccacggaattcatgggggagcaggatacaccttttttaaaacgacttactgggagaagcacataaaagccagattcatttttgtattacggagaaaaaaggaattaatagagttccaaacctcggttctgcagtttctactaaaaaagcagggatgagtaaggatacatttattaatttggacgtctctcatcacagagcggttgcagtggtgaggttgctaagaatcgagaaggggaaagcatttgtagaccttttgaacgagaaagcaaatgattctggagataaagagataggatatgtgcagaggacactaggtttcagcacacgctatttggaggacagggatataagactgtgaggagaaggttttcagggagatggagccactgcttctacagatattgagaattggctttttcgaaattctcaagcttgatgtacctgcttatgctgccgttgatgagaatgtaaggcttgctaaagtagctttaaggcctggtgctgggaatatggtgaatgcaattctgcgtaaacttgtattgctaaaggagacagactctcttcctcttccaaagatagaaggtgatgatcgtgcccaagctcgtgctctttctataatttattctcatcctgtttggatggtgagacgatggatacggtttcatggaaaagatgaagctctaagattgatgaattggaacaacagtgatcctcatttcagtctaagggtgaacacatcaaaaggctatactagggctgaccttgtaaaacgattggaaagtttacaggttcattatgaagaatcaattatggatgaatttgttcgcattcgggaagggatgcagcaagtcttaaaagctggattactgaaagatggcatttgtgctgtgcaagatgagagtgcaggtcttgtagtgtctgtggttgatccacaacccggggaaacgattgttgattgctgtgctgcacctggtggaaagactcttttcatggcatcacggttgtcaggagaagggaagatatgggctctggacataaacaaaggtcgtttgagaatactcatggacgcagcaaagttacacggtctagatgatatgatcactgacatccatgctgatcttcgactatatgctaaggaaaccacagttaaatatgacaaagtattgttggacgctccatgctctggtctgggagtgctttccaagagggcggacttacgctggaatagacaatttgaaaatttggaagagttgatgtgtttacaagacgagcttcttgattcggcatcaatgttggtaaagccaggtggtatactaatttacagtacgtgttcgattgaccctgaagaaaatgaagagaggattactgcttttgttcagaggcatccggaatttgctcttcagagtgtatgtggatatgttcctagagaatttatcacagatgaaggtttctattcctcaaatccaactaagcactctatggatggggcatttgctgcacgtcttgtccggtcaacgcactaagattataggagttgccacaaggccacaactaggtgtgaagttgaacaaggaatcacatgtattgccctaagtgcacccagtcattgcttcaatatctttatcttatatattcttgaactttgctgcgttttcctcttacgcttcacaaaaaaaaagcatatccaaacccataccatattgcttcttgtacggcacgcagattttttgaagcgttttcgctttgtattaaagtcatctgtttagactgctcagttgtaatatatatagaaaaaacactgtaaaaacagtagaagctatgtcggattaaagccaaatcagctgcctatttcaacgagagaaaccgtgatgagagagaaatcgctgtttcctgaagccttcaaccgttagcagccggtggccggggcgtaaaagacgaactactcgtcttcacggaaaacgacggtgaagaagatggcgtctactatgaggttcatgcgcagatcaactccactcgactgcccaatgcttatcttgtttggcatattgttgcagtatatgacagtatcccat

SEQ ID NO: 21998 - DNA, 2153 bp, Zea Mays
atggcctcccacggaattcatgggggagcaggatacaccttttttaaaacgacttactgggagaagcacataaaagccagattcatttttgtattacggagaaaaaaggaattaatagagttccaaacctcggttctgcagtttctactaaaaaagcagggatgagtaaggatacatttattaatttggacgtctctcatcacagagcggttgcagtggtgaggttgctaagaatcgagaaggggaaagcatttgtagaccttttgaacgagaaagcaaatgattctggagataaagagataggatatgtgcagaggacactaggtttcagcacacgctatttggaggacagggatataagactggttaccgtcatagttgctggaacagtgcgctggaaacgctaccttgattatctaatcatgtcactatgcagtgaggagaaggttttcagggagatggagccactgcttctacagatattgagaattggctttttcgaaattctcaagcttgatgtacctgcttatgctgccgttgatgagaatgtaaggcttgctaaagtagctttaaggcctggtgctgggaatatggtgaatgcaattctgcgtaaacttgtattgctaaaggagacagactctcttcctcttccaaagatagaaggtgatgatcgtgcccaagctcgtgctctttctataatttattctcatcctgtttggatggtgagacgatggatacggtttcatggaaaagatgaagctctaagattgatgaattggaacaacagtgatcctcatttcagtctaagggtgaacacatcaaaaggctatactagggctgaccttgtaaaacgattggaaagtttacaggttcattatgaagaatcaattatggatgaatttgttcgcattcgggaagggatgcagcaagtcttaaaagctggattactgaaagatggcatttgtgctgtgcaagatgagagtgcaggtcttgtagtgtctgtggttgatccacaacccggggaaacgattgttgattgctgtgctgcacctggtggaaagactcttttcatggcatcacggttgtcaggagaagggaagatatgggctctggacataaacaaaggtcgtttgagaatactcatggacgcagcaaagttacacggtctagatgatatgatcactgacatccatgctgatcttcgactatatgctaaggaaaccacagttaaatatgacaaagtattgttggacgctccatgctctggtctgggagtgctttccaagagggcggacttacgctggaatagacaatttgaaaatttggaagagttgatgtgtttacaagacgagcttcttgattcggcatcaatgttggtaaagccaggtggtatactaatttacagtacgtgttcgattgaccctgaagaaaatgaagagaggattactgcttttgttcagaggcatccggaatttgctcttcagagtgtatgtggatatgttcctagagaatttatcacagatgaaggtttctattcctcaaatccaactaagcactctatggatggggcatttgctgcacgtcttgtccggtcaacgcactaagattataggagttgccacaaggccacaactaggtgtgaagttgaacaaggaatcacatgtattgccctaagtgcacccagtcattgcttcaatatctttatcttatatattcttgaactttgctgcgttttcctcttacgcttcacaaaaaaaaagcatatccaaacccataccatattgcttcttgtacggcacgcagattttttgaagcgttttcgctttgtattaaagtcatctgtttagactgctcagttgtaatatatatagaaaaaacactgtaaaaacagtagaagctatgtcggattaaagccaaatcagctgcctatttcaacgagagaaaccgtgatgagagagaaatcgctgtttcctgaagccttcaaccgttagcagccggtggccggggcgtaaaagacgaactactcgtcttcacggaaaacgacggtgaagaagatggcgtctactatgaggttcatgcgcagatcaactccactcgactgcccaatgcttatcttgtttggcatattgttgcagtatatgacagtatcccat

SEQ ID NO: 21999 - DNA, 2279 bp, Zea Mays
atggcctcccacggaattcatgggggagcaggatacaccttttttaaaacgacttactgggagaagcacataaaagccagattcatttttgtattacggagaaaaaaggaattaatagagttccaaacctcggttctgcagtttctactaaaaaagcagtcatttatgttatctgtccccgaagcagttgcagtggtgaggttgctaagaatcgagaaggggaaagcatttgtagaccttttgaacgagaaagcaaatgattctggagataaagagataggatatgtgcagaggacactaggtttcagcacacgctatttggaggacagggatataagactggttaccgtcatagttgctggaacagtgcgctggaaacgctaccttgattatctaatcatgtcactatgcagtgaggagaaggttttcagggagatggagccactgcttctacagatattgagaattggctttttcgaaattctcaagcttgatgtacctgcttatgctgccgttgatgagaatgtaaggcttgctaaagtagctttaaggcctggtgctgggaatatggtgaatgcaattctgcgtaaacttgtattgctaaaggagacagactctcttcctcttccaaagatagaaggtgatgatcgtgcccaagctcgtgctctttctataatttattctcatcctgtttggatggtgagacgatggatacggtttcatggaaaagatgaagctctaagattgatgaattggaacaacagtgatcctcatttcagtctaagggtgaacacatcaaaaggctatactagggctgaccttgtaaaacgattggaaagtttacaggttcattatgaagaatcaattatggatgaatttgttcgcattcgggaagggatgcagcaagtcttaaaagctggattactgaaagatggcatttgtgctgtgcaagatgagagtgcagggaagactgcgaactatagacccaaatgggtctgacccttccccagaccccgcacaagcgggagcacatgcaactggcgccccctttttttagatcactgcattataaaacaatactcttagcaaataatagctcatggctgtaaaaaggtcttgtagtgtctgtggttgatccacaacccggggaaacgattgttgattgctgtgctgcacctggtggaaagactcttttcatggcatcacggttgtcaggagaagggaagatatgggctctggacataaacaaaggtcgtttgagaatactcatggacgcagcaaagttacacggtctagatgatatgatcactgacatccatgctgatcttcgactatatgctaaggaaaccacagttaaatatgacaaagtattgttggacgctccatgctctggtctgggagtgctttccaagagggcggacttacgctggaatagacaatttgaaaatttggaagagttgatgtgtttacaagacgagcttcttgattcggcatcaatgttggtaaagccaggtggtatactaatttacagtacgtgttcgattgaccctgaagaaaatgaagagaggattactgcttttgttcagaggcatccggaatttgctcttcagagtgtatgtggatatgttcctagagaatttatcacagatgaaggtttctattcctcaaatccaactaagcactctatggatggggcatttgctgcacgtcttgtccggtcaacgcactaagattataggagttgccacaaggccacaactaggtgtgaagttgaacaaggaatcacatgtattgccctaagtgcacccagtcattgcttcaatatctttatcttatatattcttgaactttgctgcgttttcctcttacgcttcacaaaaaaaaagcatatccaaacccataccatattgcttcttgtacggcacgcagattttttgaagcgttttcgctttgtattaaagtcatctgtttagactgctcagttgtaatatatatagaaaaaacactgtaaaaacagtagaagctatgtcggattaaagccaaatcagctgcctatttcaacgagagaaaccgtgatgagagagaaatcgctgtttcctgaagccttcaaccgttagcagccggtggccggggcgtaaaagacgaactactcgtcttcacggaaaacgacggtgaagaagatggcgtctactatgaggttcatgcgcagatcaactccactcgactgcccaatgcttatcttgtttggcatattgttgcagtatatgacagtatcccat

SEQ ID NO: 22000 - DNA, 2059 bp, Zea Mays
atggcctcccacggaattcatgggggagcaggatacaccttttttaaaacgacttactgggagaagcacataaaagccagattcatttttgtattacggagaaaaaaggaattaatagagttccaaacctcggttctgcagtttctactaaaaaagcagtcatttatgttatctgtccccgaagcagttgcagtggtgaggttgctaagaatcgagaaggggaaagcatttgtagaccttttgaacgagaaagcaaatgattctggagataaagagataggatatgtgcagaggacactaggtttcagcacacgctatttggaggacagggatataagactgtgaggagaaggttttcagggagatggagccactgcttctacagatattgagaattggctttttcgaaattctcaagcttgatgtacctgcttatgctgccgttgatgagaatgtaaggcttgctaaagtagctttaaggcctggtgctgggaatatggtgaatgcaattctgcgtaaacttgtattgctaaaggagacagactctcttcctcttccaaagatagaaggtgatgatcgtgcccaagctcgtgctctttctataatttattctcatcctgtttggatggtgagacgatggatacggtttcatggaaaagatgaagctctaagattgatgaattggaacaacagtgatcctcatttcagtctaagggtgaacacatcaaaaggctatactagggctgaccttgtaaaacgattggaaagtttacaggttcattatgaagaatcaattatggatgaatttgttcgcattcgggaagggatgcagcaagtcttaaaagctggattactgaaagatggcatttgtgctgtgcaagatgagagtgcaggtcttgtagtgtctgtggttgatccacaacccggggaaacgattgttgattgctgtgctgcacctggtggaaagactcttttcatggcatcacggttgtcaggagaagggaagatatgggctctggacataaacaaaggtcgtttgagaatactcatggacgcagcaaagttacacggtctagatgatatgatcactgacatccatgctgatcttcgactatatgctaaggaaaccacagttaaatatgacaaagtattgttggacgctccatgctctggtctgggagtgctttccaagagggcggacttacgctggaatagacaatttgaaaatttggaagagttgatgtgtttacaagacgagcttcttgattcggcatcaatgttggtaaagccaggtggtatactaatttacagtacgtgttcgattgaccctgaagaaaatgaagagaggattactgcttttgttcagaggcatccggaatttgctcttcagagtgtatgtggatatgttcctagagaatttatcacagatgaaggtttctattcctcaaatccaactaagcactctatggatggggcatttgctgcacgtcttgtccggtcaacgcactaagattataggagttgccacaaggccacaactaggtgtgaagttgaacaaggaatcacatgtattgccctaagtgcacccagtcattgcttcaatatctttatcttatatattcttgaactttgctgcgttttcctcttacgcttcacaaaaaaaaagcatatccaaacccataccatattgcttcttgtacggcacgcagattttttgaagcgttttcgctttgtattaaagtcatctgtttagactgctcagttgtaatatatatagaaaaaacactgtaaaaacagtagaagctatgtcggattaaagccaaatcagctgcctatttcaacgagagaaaccgtgatgagagagaaatcgctgtttcctgaagccttcaaccgttagcagccggtggccggggcgtaaaagacgaactactcgtcttcacggaaaacgacggtgaagaagatggcgtctactatgaggttcatgcgcagatcaactccactcgactgcccaatgcttatcttgtttggcatattgttgcagtatatgacagtatcccat

SEQ ID NO: 22001 - DNA, 2302 bp, Zea Mays
atggcctcccacggaattcatgggggagcaggatacaccttttttaaaacgacttactgggagaagcacataaaagccagattcatttttgtattacggagaaaaaaggaattaatagagttccaaacctcggttctgcagtttctactaaaaaagcagggatgagtaaggatacatttattaatttggacgtctctcatcacagagcggttgcagtggtgaggttgctaagaatcgagaaggggaaagcatttgtagaccttttgaacgagaaagcaaatgattctggagataaagagataggatatgtgcagaggacactaggtttcagcacacgctatttggaggacagggatataagactggttaccgtcatagttgctggaacagtgcgctggaaacgctaccttgattatctaatcatgtcactatgcagtgaggagaaggttttcagggagatggagccactgcttctacagatattgagaattggctttttcgaaattctcaagcttgatgtacctgcttatgctgccgttgatgagaatgtaaggcttgctaaagtagctttaaggcctggtgctgggaatatggtgaatgcaattctgcgtaaacttgtattgctaaaggagacagactctcttcctcttccaaagatagaaggtgatgatcgtgcccaagctcgtgctctttctataatttattctcatcctgtttggatggtgagacgatggatacggtttcatggaaaagatgaagctctaagattgatgaattggaacaacagtgatcctcatttcagtctaagggtgaacacatcaaaaggctatactagggctgaccttgtaaaacgattggaaagtttacaggttcattatgaagaatcaattatggatgaatttgttcgcattcgggaagggatgcagcaagtcttaaaagctggattactgaaagatggcatttgtgctgtgcaagatgagagtgcagggaagactgcgaactatagacccaaatgggtctgacccttccccagaccccgcacaagcgggagcacatgcaactggcgccccctttttttagatcactgcattataaaacaatactcttagcaaataatagctcatggctgtaaaaaggtcttgtagtgtctgtggttgatccacaacccggggaaacgattgttgattgctgtgctgcacctggtggaaagactcttttcatggcatcacggttgtcaggagaagggaagatatgggctctggacataaacaaaggtcgtttgagaatactcatggacgcagcaaagttacacggtctagatgatatgatcactgacatccatgctgatcttcgactatatgctaaggaaaccacagttaaatatgacaaagtattgttggacgctccatgctctggtctgggagtgctttccaagagggcggacttacgctggaatagacaatttgaaaatttggaagagttgatgtgtttacaagacgagcttcttgattcggcatcaatgttggtaaagccaggtggtatactaatttacagtacgtgttcgattgaccctgaagaaaatgaagagaggattactgcttttgttcagaggcatccggaatttgctcttcagagtgtatgtggatatgttcctagagaatttatcacagatgaaggtttctattcctcaaatccaactaagcactctatggatggggcatttgctgcacgtcttgtccggtcaacgcactaagattataggagttgccacaaggccacaactaggtgtgaagttgaacaaggaatcacatgtattgccctaagtgcacccagtcattgcttcaatatctttatcttatatattcttgaactttgctgcgttttcctcttacgcttcacaaaaaaaaagcatatccaaacccataccatattgcttcttgtacggcacgcagattttttgaagcgttttcgctttgtattaaagtcatctgtttagactgctcagttgtaatatatatagaaaaaacactgtaaaaacagtagaagctatgtcggattaaagccaaatcagctgcctatttcaacgagagaaaccgtgatgagagagaaatcgctgtttcctgaagccttcaaccgttagcagccggtggccggggcgtaaaagacgaactactcgtcttcacggaaaacgacggtgaagaagatggcgtctactatgaggttcatgcgcagatcaactccactcgactgcccaatgcttatcttgtttggcatattgttgcagtatatgacagtatcccat

SEQ ID NO: 22002 - DNA, 2156 bp, Zea Mays
atggcctcccacggaattcatgggggagcaggatacaccttttttaaaacgacttactgggagaagcacataaaagccagattcatttttgtattacggagaaaaaaggaattaatagagttccaaacctcggttctgcagtttctactaaaaaagcagggatgagtaaggatacatttattaatttggacgtctctcatcacagagcggcagttgcagtggtgaggttgctaagaatcgagaaggggaaagcatttgtagaccttttgaacgagaaagcaaatgattctggagataaagagataggatatgtgcagaggacactaggtttcagcacacgctatttggaggacagggatataagactggttaccgtcatagttgctggaacagtgcgctggaaacgctaccttgattatctaatcatgtcactatgcagtgaggagaaggttttcagggagatggagccactgcttctacagatattgagaattggctttttcgaaattctcaagcttgatgtacctgcttatgctgccgttgatgagaatgtaaggcttgctaaagtagctttaaggcctggtgctgggaatatggtgaatgcaattctgcgtaaacttgtattgctaaaggagacagactctcttcctcttccaaagatagaaggtgatgatcgtgcccaagctcgtgctctttctataatttattctcatcctgtttggatggtgagacgatggatacggtttcatggaaaagatgaagctctaagattgatgaattggaacaacagtgatcctcatttcagtctaagggtgaacacatcaaaaggctatactagggctgaccttgtaaaacgattggaaagtttacaggttcattatgaagaatcaattatggatgaatttgttcgcattcgggaagggatgcagcaagtcttaaaagctggattactgaaagatggcatttgtgctgtgcaagatgagagtgcaggtcttgtagtgtctgtggttgatccacaacccggggaaacgattgttgattgctgtgctgcacctggtggaaagactcttttcatggcatcacggttgtcaggagaagggaagatatgggctctggacataaacaaaggtcgtttgagaatactcatggacgcagcaaagttacacggtctagatgatatgatcactgacatccatgctgatcttcgactatatgctaaggaaaccacagttaaatatgacaaagtattgttggacgctccatgctctggtctgggagtgctttccaagagggcggacttacgctggaatagacaatttgaaaatttggaagagttgatgtgtttacaagacgagcttcttgattcggcatcaatgttggtaaagccaggtggtatactaatttacagtacgtgttcgattgaccctgaagaaaatgaagagaggattactgcttttgttcagaggcatccggaatttgctcttcagagtgtatgtggatatgttcctagagaatttatcacagatgaaggtttctattcctcaaatccaactaagcactctatggatggggcatttgctgcacgtcttgtccggtcaacgcactaagattataggagttgccacaaggccacaactaggtgtgaagttgaacaaggaatcacatgtattgccctaagtgcacccagtcattgcttcaatatctttatcttatatattcttgaactttgctgcgttttcctcttacgcttcacaaaaaaaaagcatatccaaacccataccatattgcttcttgtacggcacgcagattttttgaagcgttttcgctttgtattaaagtcatctgtttagactgctcagttgtaatatatatagaaaaaacactgtaaaaacagtagaagctatgtcggattaaagccaaatcagctgcctatttcaacgagagaaaccgtgatgagagagaaatcgctgtttcctgaagccttcaaccgttagcagccggtggccggggcgtaaaagacgaactactcgtcttcacggaaaacgacggtgaagaagatggcgtctactatgaggttcatgcgcagatcaactccactcgactgcccaatgcttatcttgtttggcatattgttgcagtatatgacagtatcccat

SEQ ID NO: 22003 - DNA, 4022 bp, Zea Mays
atggcctcccacggaattcatgggggagcaggatacaccttttttaaaacgacttactgggagaagcacataaaagccagattcatttttgtattacggagaaaaaaggaattaatagagttccaaacctcggttctgcagtttctactaaaaaagcagtcatttatgttatctgtccccgaagcagttgcagtggtgaggttgctaagaatcgagaaggggaaagcatttgtagaccttttgaacgagaaagcaaatgattctggagataaagagataggatatgtgcagaggacactaggtttcagcacacgctatttggaggacagggatataagactggttaccgtcatagttgctggaacagtgcgctggaaacgctaccttgattatctaatcatgtcactatgcagtgaggagaaggttttcagggagatggagccactgcttctacagatattgagaattggctttttcgaaattctcaagcttgatgtacctgcttatgctgccgttgatgagaatgtaaggcttgctaaagtagctttaaggcctggtgctgggaatatggtgaatgcaattctgcgtaaacttgtattgctaaaggagacagactctcttcctcttccaaagatagaaggtgatgatcgtgcccaagctcgtgctctttctataatttattctcatcctgtttggatggtgagacgatggatacggtttcatggaaaagatgaagctctaagattgatgaattggaacaacagtgatcctcatttcagtctaagggtgaacacatcaaaaggctatactagggctgaccttgtaaaacgattggaaagtttacaggttcattatgaagaatcaattatggatgaatttgttcgcattcgggaagggatgcagcaagtcttaaaagctggattactgaaagatggcatttgtgctgtgcaagatgagagtgcagggaagactgcgaactatagacccaaatgggtctgacccttccccagaccccgcacaagcgggagcacatgcaactggcgccccctttttttagatcactgcattataaaacaatactcttagcaaataatagctcatggctgtaaaaaggcacttctcatatcactttggtttagttgggagtgacacattttcagttgaggaagttattgataatctgcgctgagttatgaaagacctatttgtaggtcttgtagtgtctgtggttgatccacaacccggggaaacgattgttgattgctgtgctgcacctggtggaaagactcttttcatggcatcacggttgtcaggagaagggaagatatgggctctggacataaacaaaggtcgtttgagaatactcatggacgcagcaaagttacacggtctagatgatatgatcactgacatccatgctgatcttcgactatatgctaaggaaaccacagttaaatatgacaaagtattgttggacgctccatgctctggtctgggagtgctttccaagagggcggacttacgctggaatagacaatttgaaaatttggaagagttgatgtgtttacaagacgagcttcttgattcggcatcaatgtggtatactaatttacagtacgtgttcgattgaccctgaagaaaatgaagagaggattactgcttttgttcagaggcatccggtacttttttttcgtaacagtcagcactattttctggttcaagtcataaactcagtattcaatttgaatgataaaaatatatgtttgtccttcatatccggggactgttggtactatactattattatgtgttgagttctttttttcacttagcactatcaataatcttcttaattctttttattccttcaagatccttgcccagtaaatggaagttcttcataaccaaccattcccactatattctatccctactattacaggtttaaaaaatgttatagcccttggtgtagtacacacaaaaatgtgtacaattgaactttttgtaccattttttgttcacaattggaattcctgcatcatgattcatgtctacaaccttgacacttcatcatgttcctttttttgcatacagaatgttttgtatttttaacaacaataaagtcttttagtcccaagcaagttggataggctaaagttgaaacctaataggagccgagagtcaagcttttggcacttggattgctatttttcatgcactcctattcattgctaaatctttcggtatatttcatcatttcaagtctcttttaatccttttactgtctcattttatatcaattttggccttcctctgcctcttttctcattactatcgcactttaggatcttacactggtgcttatataggtctccgttagacatctgcaaactatctaaactagtgttggacaagtttttctttaattactgccacccctaggctatcacatatatcatcgtttcagactcaatctcttattatatggccacaaattcagcataacatatacatctctgtagtacttatttgctgaatatattgttttgtaggccaatatttttgcatcatacagcatacaacatagcaagtctaatcacctcccataaaacttatcttttagcttatacggtaccctcttgtaaaacgctaaatgcttgacgtcactttatataccatgctttgattctatggttaacatcttcattaatattaacatctctttgtagcattgatcctaaatatctaaatgtatcctttatgggcactactagatctttcaaactagcatcttcttcctcatatgtagtagtgtcaaaagcacatctcatatatttggctttaattctattgagtataaaagctttggactctagatttttccgtcacaactctagtttcatatttactcttgcctggcttttaacaactagcactatatcatctgcaaaaagcatacatcaagagatatctcctttatgcccattgtgacctcacctcatccatcaccaaataaaaaatgtaatatataatcctattctaataggagaaatctttgtcacatcacttatttgaacattactcatgtacatgtgtccttaacgagtactgcgtactttgttagaactttatgtttatccgaaacccaccacataacattttttttatattttgtcataaactttctctaagtcaataaaaatcatgtgtagtttctttttctggtgcctatattgcttgtcacttgtattttgtattttttaataacccaatgaaaatcttattttgattatatgtttttgacatctgtatattaattaatttatgatatgctgtaggaatttgctcttcagagtgtatgtggatatgttcctagagaatttatcacagatgaaggtttctattcctcaaatccaactaagcactctatggatggggcatttgctgcacgtcttgtccggtcaacgcactaagattataggagttgccacaaggccacaactaggtgtgaagttgaacaaggaatcacatgtattgccctaagtgcacccagtcattgcttcaatatctttatcttatatattcttgaactttgctgcgttttcctcttacgcttcacaaaaaaaaagcatatccaaacccataccatattgcttcttgtacggcacgcagattttttgaagcgttttcgctttgtattaaagtcatctgtttagactgctcagttgtaatatatatagaaaaaacactgtaaaaacagtagaagctatgtcggattaaagccaaatcagctgcctatttcaacgagagaaaccgtgatgagagagaaatcgctgtttcctgaagccttcaaccgttagcagccggtggccggggcgtaaaagacgaactactcgtcttcacggaaaacgacggtgaagaagatggcgtctactatgaggttcatgcgcagatcaactccactcgactgcccaatgcttatcttgtttggcatattgttgcagtatatgacagtatcccat

SEQ ID NO: 22004 - DNA, 1954 bp, Zea Mays
atggcctcccacggaattcatgggggagcaggatacaccttttttaaaacgacttactgggagaagcacataaaagccagattcatttttgtattacggagaaaaaaggaattaatagagttccaaacctcggttctgcagtttctactaaaaaagcaggttaccgtcatagttgctggaacagtgcgctggaaacgctaccttgattatctaatcatgtcactatgcagtgaggagaaggttttcagggagatggagccactgcttctacagatattgagaattggctttttcgaaattctcaagcttgatgtacctgcttatgctgccgttgatgagaatgtaaggcttgctaaagtagctttaaggcctggtgctgggaatatggtgaatgcaattctgcgtaaacttgtattgctaaaggagacagactctcttcctcttccaaagatagaaggtgatgatcgtgcccaagctcgtgctctttctataatttattctcatcctgtttggatggtgagacgatggatacggtttcatggaaaagatgaagctctaagattgatgaattggaacaacagtgatcctcatttcagtctaagggtgaacacatcaaaaggctatactagggctgaccttgtaaaacgattggaaagtttacaggttcattatgaagaatcaattatggatgaatttgttcgcattcgggaagggatgcagatctctagcaataaaattgtaaaaatggatggttctatgcttctgattgctttagatgttattttgactgttataactgttggtcttgtagtgtctgtggttgatccacaacccggggaaacgattgttgattgctgtgctgcacctggtggaaagactcttttcatggcatcacggttgtcaggagaagggaagatatgggctctggacataaacaaaggtcgtttgagaatactcatggacgcagcaaagttacacggtctagatgatatgatcactgacatccatgctgatcttcgactatatgctaaggaaaccacagttaaatatgacaaagtattgttggacgctccatgctctggtctgggagtgctttccaagagggcggacttacgctggaatagacaatttgaaaatttggaagagttgatgtgtttacaagacgagcttcttgattcggcatcaatgtggtatactaatttacagtacgtgttcgattgaccctgaagaaaatgaagagaggattactgcttttgttcagaggcatccggaatttgctcttcagagtgtatgtggatatgttcctagagaatttatcacagatgaaggtttctattcctcaaatccaactaagcactctatggatggggcatttgctgcacgtcttgtccggtcaacgcactaagattataggagttgccacaaggccacaactaggtgtgaagttgaacaaggaatcacatgtattgccctaagtgcacccagtcattgcttcaatatctttatcttatatattcttgaactttgctgcgttttcctcttacgcttcacaaaaaaaaagcatatccaaacccataccatattgcttcttgtacggcacgcagattttttgaagcgttttcgctttgtattaaagtcatctgtttagactgctcagttgtaatatatatagaaaaaacactgtaaaaacagtagaagctatgtcggattaaagccaaatcagctgcctatttcaacgagagaaaccgtgatgagagagaaatcgctgtttcctgaagccttcaaccgttagcagccggtggccggggcgtaaaagacgaactactcgtcttcacggaaaacgacggtgaagaagatggcgtctactatgaggttcatgcgcagatcaactccactcgactgcccaatgcttatcttgtttggcatattgttgcagtatatgacagtatcccat

SEQ ID NO: 22005 - DNA, 2612 bp, Zea Mays
ttttctttcttctctcacccggttcttcctcctcccgagtcccgaactctcgatccactcatccgctgagggcgtcggccttctggcccttctccccccggccgacctcgcccctccggcgctccgtccgcttcctgaactcgtctccctcacggacgttctcctccctccgctcgccgcgccgcaacccggagaggagaccgccgctcggtcgagcaccacctggggcccagcgtcctcgcgaccagctctagcgcggcgtccgccctctgcagccctggtgtccccgcgactggcttcggccggcacacaactccacagttaggtctccgtctgcacagcgcggcgatcttctctctccttcccgccctctgcagtccctctcagtccctctccgtctgcttgattctgctccaacctcagactaccctcgctctgaaaatgtcattacgcacccaatgcgcttgtagctgtatgctgcaaccctactctgcctcgtcttcttccatcaccctaagcatgcgcgcaacccccactcaccaacgacgggcccggccgccgccgccgtcctgcctcgccacccgccaccttcgccggcgacgagcaccagcaggaattaatagagttccaaacctcggttctgcagtttctactaaaaaagcagggatgagtaaggatacatttattaatttggacgtctctcatcacagagcggttgcagtggtgaggttgctaagaatcgagaaggggaaagcatttgtagaccttttgaacgagaaagcaaatgattctggagataaagagataggatatgtgcagaggacactaggtttcagcacacgctatttggaggacagggatataagactggttaccgtcatagttgctggaacagtgcgctggaaacgctaccttgattatctaatcatgtcactatgcagtgaggagaaggttttcagggagatggagccactgcttctacagatattgagaattggctttttcgaaattctcaagcttgatgtacctgcttatgctgccgttgatgagaatgtaaggcttgctaaagtagctttaaggcctggtgctgggaatatggtgaatgcaattctgcgtaaacttgtattgctaaaggagacagactctcttcctcttccaaagatagaagtggatggtgagacgatggatacggtttcatggaaaagatgaagctctaagattgatgaattggaacaacagtgatcctcatttcagtctaagggtgaacacatcaaaaggctatactagggctgaccttgtaaaacgattggaaagtttacaggttcattatgaagaatcaattatggatgaatttgttcgcattcgggaagggatgcagatctctagcaataaaattgtaaaaatggatggttctatgcttctgattgctttagatgttattttgactgttataactgttggtcttgtagtgtctgtggttgatccacaacccggggaaacgattgttgattgctgtgctgcacctggtggaaagactcttttcatggcatcacggttgtcaggagaagggaagatatgggctctggacataaacaaaggtcgtttgagaatactcatggacgcagcaaagttacacggtctagatgatatgatcactgacatccatgctgatcttcgactatatgctaaggaaaccacagttaaatatgacaaagtattgttggacgctccatgctctggtctgggagtgctttccaagagggcggacttacgctggaatagacaatttgaaaatttggaagagttgatgtgtttacaagacgagcttcttgattcggcatcaatgtggtatactaatttacagtacgtgttcgattgaccctgaagaaaatgaagagaggattactgcttttgttcagaggcatccggaatttgctcttcagagtgtatgtggatatgttcctagagaatttatcacagatgaaggtttctattcctcaaatccaactaagcactctatggatggggcatttgctgcacgtcttgtccggtcaacgcactaagattataggagttgccacaaggccacaactaggtgtgaagttgaacaaggaatcacatgtattgccctaagtgcacccagtcattgcttcaatatctttatcttatatattcttgaactttgctgcgttttcctcttacgcttcacaaaaaaaaagcatatccaaacccataccatattgcttcttgtacggcacgcagattttttgaagcgttttcgctttgtattaaagtcatctgtttagactgctcagttgtaatatatatagaaaaaacactgtaaaaacagtagaagctatgtcggattaaagccaaatcagctgcctatttcaacgagagaaaccgtgatgagagagaaatcgctgtttcctgaagccttcaaccgttagcagccggtggccggggcgtaaaagacgaactactcgtcttcacggaaaacgacggtgaagaagatggcgtctactatgaggttcatgcgcagatcaactccactcgactgcccaatgcttatcttgtttggcatattgttgcagtatatgacagtatcccat

SEQ ID NO: 22006 - DNA, 2626 bp, Zea Mays
tcccgagtcccgaactctcgatccactcatccgctgagggcgtcggccttctggcccttctccccccggccgacctcgcccctccggcgctccgtccgcttcctgaactcgtctccctcacggacgttctcctccctccgctcgccgcgccgcaacccggagaggagaccgccgctcggtcgagcaccacctggggcccagcgtcctcgcgaccagctctagcgcggcgtccgccctctgcagccctggtgtccccgcgactggcttcggccggcacacaactccacagttaggtctccgtctgcacagcgcggcgatcttctctctccttcccgccctctgcagtccctctcagtccctctccgtctgcttgattctgctccaacctcagactaccctcgctctgaaaatgtcattacgcacccaatgcgcttgtagctgtatgctgcaaccctactctgcctcgtcttcttccatcaccctaagcatgcgcgcaacccccactcaccaacgacgggcccggccgccgccgccgtcctgcctcgccacccgccaccttcgccggcgacgagcaccagcaggaattaatagagttccaaacctcggttctgcagtttctactaaaaaagcagggatgagtaaggatacatttattaatttggacgtctctcatcacagagcggttgcagtggtgaggttgctaagaatcgagaaggggaaagcatttgtagaccttttgaacgagaaagcaaatgattctggagataaagagataggatatgtgcagaggacactaggtttcagcacacgctatttggaggacagggatataagactggttaccgtcatagttgctggaacagtgcgctggaaacgctaccttgattatctaatcatgtcactatgcagtgaggagaaggttttcagggagatggagccactgcttctacagatattgagaattggctttttcgaaattctcaagcttgatgtacctgcttatgctgccgttgatgagaatgtaaggcttgctaaagtagctttaaggcctggtgctgggaatatggtgaatgcaattctgcgtaaacttgtattgctaaaggagacagactctcttcctcttccaaagatagaaggtgatgatcgtgcccaagctcgtgctctttctataatttattctcatcctgtttggatggtgagacgatggatacggtttcatggaaaagatgaagctctaagattgatgaattggaacaacagtgatcctcatttcagtctaagggtgaacacatcaaaaggctatactagggctgaccttgtaaaacgattggaaagtttacaggttcattatgaagaatcaattatggatgaatttgttcgcattcgggaagggatgcagcaagtcttaaaagctggattactgaaagatggcatttgtgctgtgcaagatgagagtgcaggtcttgtagtgtctgtggttgatccacaacccggggaaacgattgttgattgctgtgctgcacctggtggaaagactcttttcatggcatcacggttgtcaggagaagggaagatatgggctctggacataaacaaaggtcgtttgagaatactcatggacgcagcaaagttacacggtctagatgatatgatcactgacatccatgctgatcttcgactatatgctaaggaaaccacagttaaatatgacaaagtattgttggacgctccatgctctggtctgggagtgctttccaagagggcggacttacgctggaatagacaatttgaaaatttggaagagttgatgtgtttacaagacgagcttcttgattcggcatcaatgttggtaaagccaggtggtatactaatttacagtacgtgttcgattgaccctgaagaaaatgaagagaggattactgcttttgttcagaggcatccggaatttgctcttcagagtgtatgtggatatgttcctagagaatttatcacagatgaaggtttctattcctcaaatccaactaagcactctatggatggggcatttgctgcacgtcttgtccggtcaacgcactaagattataggagttgccacaaggccacaactaggtgtgaagttgaacaaggaatcacatgtattgccctaagtgcacccagtcattgcttcaatatctttatcttatatattcttgaactttgctgcgttttcctcttacgcttcacaaaaaaaaagcatatccaaacccataccatattgcttcttgtacggcacgcagattttttgaagcgttttcgctttgtattaaagtcatctgtttagactgctcagttgtaatatatatagaaaaaacactgtaaaaacagtagaagctatgtcggattaaagccaaatcagctgcctatttcaacgagagaaaccgtgatgagagagaaatcgctgtttcctgaagccttcaaccgttagcagccggtggccggggcgtaaaagacgaactactcgtcttcacggaaaacgacggtgaagaagatggcgtctactatgaggttcatgcgcagatcaactccactcgactgcccaatgcttatcttgtttggcatattgttgcagtatatgacagtatcccat

SEQ ID NO: 22007 - DNA, 2573 bp, Zea Mays
tcccgagtcccgaactctcgatccactcatccgctgagggcgtcggccttctggcccttctccccccggccgacctcgcccctccggcgctccgtccgcttcctgaactcgtctccctcacggacgttctcctccctccgctcgccgcgccgcaacccggagaggagaccgccgctcggtcgagcaccacctggggcccagcgtcctcgcgaccagctctagcgcggcgtccgccctctgcagccctggtgtccccgcgactggcttcggccggcacacaactccacagttaggtctccgtctgcacagcgcggcgatcttctctctccttcccgccctctgcagtccctctcagtccctctccgtctgcttgattctgctccaacctcagactaccctcgctctgaaaatgtcattacgcacccaatgcgcttgtagctgtatgctgcaaccctactctgcctcgtcttcttccatcaccctaagcatgcgcgcaacccccactcaccaacgacgggcccggccgccgccgccgtcctgcctcgccacccgccaccttcgccggcgacgagcaccagcaggaattaatagagttccaaacctcggttctgcagtttctactaaaaaagcagggatgagtaaggatacatttattaatttggacgtctctcatcacagagcggttgcagtggtgaggttgctaagaatcgagaaggggaaagcatttgtagaccttttgaacgagaaagcaaatgattctggagataaagagataggatatgtgcagaggacactaggtttcagcacacgctatttggaggacagggatataagactggttaccgtcatagttgctggaacagtgcgctggaaacgctaccttgattatctaatcatgtcactatgcagtgaggagaaggttttcagggagatggagccactgcttctacagatattgagaattggctttttcgaaattctcaagcttgatgtacctgcttatgctgccgttgatgagaatgtaaggcttgctaaagtagctttaaggcctggtgctgggaatatggtgaatgcaattctgcgtaaacttgtattgctaaaggagacagactctcttcctcttccaaagatagaagtggatggtgagacgatggatacggtttcatggaaaagatgaagctctaagattgatgaattggaacaacagtgatcctcatttcagtctaagggtgaacacatcaaaaggctatactagggctgaccttgtaaaacgattggaaagtttacaggttcattatgaagaatcaattatggatgaatttgttcgcattcgggaagggatgcagcaagtcttaaaagctggattactgaaagatggcatttgtgctgtgcaagatgagagtgcaggtcttgtagtgtctgtggttgatccacaacccggggaaacgattgttgattgctgtgctgcacctggtggaaagactcttttcatggcatcacggttgtcaggagaagggaagatatgggctctggacataaacaaaggtcgtttgagaatactcatggacgcagcaaagttacacggtctagatgatatgatcactgacatccatgctgatcttcgactatatgctaaggaaaccacagttaaatatgacaaagtattgttggacgctccatgctctggtctgggagtgctttccaagagggcggacttacgctggaatagacaatttgaaaatttggaagagttgatgtgtttacaagacgagcttcttgattcggcatcaatgttggtaaagccaggtggtatactaatttacagtacgtgttcgattgaccctgaagaaaatgaagagaggattactgcttttgttcagaggcatccggaatttgctcttcagagtgtatgtggatatgttcctagagaatttatcacagatgaaggtttctattcctcaaatccaactaagcactctatggatggggcatttgctgcacgtcttgtccggtcaacgcactaagattataggagttgccacaaggccacaactaggtgtgaagttgaacaaggaatcacatgtattgccctaagtgcacccagtcattgcttcaatatctttatcttatatattcttgaactttgctgcgttttcctcttacgcttcacaaaaaaaaagcatatccaaacccataccatattgcttcttgtacggcacgcagattttttgaagcgttttcgctttgtattaaagtcatctgtttagactgctcagttgtaatatatatagaaaaaacactgtaaaaacagtagaagctatgtcggattaaagccaaatcagctgcctatttcaacgagagaaaccgtgatgagagagaaatcgctgtttcctgaagccttcaaccgttagcagccggtggccggggcgtaaaagacgaactactcgtcttcacggaaaacgacggtgaagaagatggcgtctactatgaggttcatgcgcagatcaactccactcgactgcccaatgcttatcttgtttggcatattgttgcagtatatgacagtatcccat

SEQ ID NO: 22008 - DNA, 2775 bp, Zea Mays
tcccgagtcccgaactctcgatccactcatccgctgagggcgtcggccttctggcccttctccccccggccgacctcgcccctccggcgctccgtccgcttcctgaactcgtctccctcacggacgttctcctccctccgctcgccgcgccgcaacccggagaggagaccgccgctcggtcgagcaccacctggggcccagcgtcctcgcgaccagctctagcgcggcgtccgccctctgcagccctggtgtccccgcgactggcttcggccggcacacaactccacagttaggtctccgtctgcacagcgcggcgatcttctctctccttcccgccctctgcagtccctctcagtccctctccgtctgcttgattctgctccaacctcagactaccctcgctctgaaaatgtcattacgcacccaatgcgcttgtagctgtatgctgcaaccctactctgcctcgtcttcttccatcaccctaagcatgcgcgcaacccccactcaccaacgacgggcccggccgccgccgccgtcctgcctcgccacccgccaccttcgccggcgacgagcaccagcaggaattaatagagttccaaacctcggttctgcagtttctactaaaaaagcagggatgagtaaggatacatttattaatttggacgtctctcatcacagagcggttgcagtggtgaggttgctaagaatcgagaaggggaaagcatttgtagaccttttgaacgagaaagcaaatgattctggagataaagagataggatatgtgcagaggacactaggtttcagcacacgctatttggaggacagggatataagactggttaccgtcatagttgctggaacagtgcgctggaaacgctaccttgattatctaatcatgtcactatgcagtgaggagaaggttttcagggagatggagccactgcttctacagatattgagaattggctttttcgaaattctcaagcttgatgtacctgcttatgctgccgttgatgagaatgtaaggcttgctaaagtagctttaaggcctggtgctgggaatatggtgaatgcaattctgcgtaaacttgtattgctaaaggagacagactctcttcctcttccaaagatagaaggtgatgatcgtgcccaagctcgtgctctttctataatttattctcatcctgtttggatggtgagacgatggatacggtttcatggaaaagatgaagctctaagattgatgaattggaacaacagtgatcctcatttcagtctaagggtgaacacatcaaaaggctatactagggctgaccttgtaaaacgattggaaagtttacaggttcattatgaagaatcaattatggatgaatttgttcgcattcgggaagggatgcagcaagtcttaaaagctggattactgaaagatggcatttgtgctgtgcaagatgagagtgcagggaagactgcgaactatagacccaaatgggtctgacccttccccagaccccgcacaagcgggagcacatgcaactggcgccccctttttttagatcactgcattataaaacaatactcttagcaaataatagctcatggctgtaaaaaggtcttgtagtgtctgtggttgatccacaacccggggaaacgattgttgattgctgtgctgcacctggtggaaagactcttttcatggcatcacggttgtcaggagaagggaagatatgggctctggacataaacaaaggtcgtttgagaatactcatggacgcagcaaagttacacggtctagatgatatgatcactgacatccatgctgatcttcgactatatgctaaggaaaccacagttaaatatgacaaagtattgttggacgctccatgctctggtctgggagtgctttccaagagggcggacttacgctggaatagacaatttgaaaatttggaagagttgatgtgtttacaagacgagcttcttgattcggcatcaatgttggtaaagccaggtggtatactaatttacagtacgtgttcgattgaccctgaagaaaatgaagagaggattactgcttttgttcagaggcatccggaatttgctcttcagagtgtatgtggatatgttcctagagaatttatcacagatgaaggtttctattcctcaaatccaactaagcactctatggatggggcatttgctgcacgtcttgtccggtcaacgcactaagattataggagttgccacaaggccacaactaggtgtgaagttgaacaaggaatcacatgtattgccctaagtgcacccagtcattgcttcaatatctttatcttatatattcttgaactttgctgcgttttcctcttacgcttcacaaaaaaaaagcatatccaaacccataccatattgcttcttgtacggcacgcagattttttgaagcgttttcgctttgtattaaagtcatctgtttagactgctcagttgtaatatatatagaaaaaacactgtaaaaacagtagaagctatgtcggattaaagccaaatcagctgcctatttcaacgagagaaaccgtgatgagagagaaatcgctgtttcctgaagccttcaaccgttagcagccggtggccggggcgtaaaagacgaactactcgtcttcacggaaaacgacggtgaagaagatggcgtctactatgaggttcatgcgcagatcaactccactcgactgcccaatgcttatcttgtttggcatattgttgcagtatatgacagtatcccat

SEQ ID NO: 22009 - DNA, 2624 bp, Zea Mays
tcccgagtcccgaactctcgatccactcatccgctgagggcgtcggccttctggcccttctccccccggccgacctcgcccctccggcgctccgtccgcttcctgaactcgtctccctcacggacgttctcctccctccgctcgccgcgccgcaacccggagaggagaccgccgctcggtcgagcaccacctggggcccagcgtcctcgcgaccagctctagcgcggcgtccgccctctgcagccctggtgtccccgcgactggcttcggccggcacacaactccacagttaggtctccgtctgcacagcgcggcgatcttctctctccttcccgccctctgcagtccctctcagtccctctccgtctgcttgattctgctccaacctcagactaccctcgctctgaaaatgtcattacgcacccaatgcgcttgtagctgtatgctgcaaccctactctgcctcgtcttcttccatcaccctaagcatgcgcgcaacccccactcaccaacgacgggcccggccgccgccgccgtcctgcctcgccacccgccaccttcgccggcgacgagcaccagcaggaattaatagagttccaaacctcggttctgcagtttctactaaaaaagcagtcatttatgttatctgtccccgaagcagttgcagtggtgaggttgctaagaatcgagaaggggaaagcatttgtagaccttttgaacgagaaagcaaatgattctggagataaagagataggatatgtgcagaggacactaggtttcagcacacgctatttggaggacagggatataagactggttaccgtcatagttgctggaacagtgcgctggaaacgctaccttgattatctaatcatgtcactatgcagtgaggagaaggttttcagggagatggagccactgcttctacagatattgagaattggctttttcgaaattctcaagcttgatgtacctgcttatgctgccgttgatgagaatgtaaggcttgctaaagtagctttaaggcctggtgctgggaatatggtgaatgcaattctgcgtaaacttgtattgctaaaggagacagactctcttcctcttccaaagatagaaggtgatgatcgtgcccaagctcgtgctctttctataatttattctcatcctgtttggatggtgagacgatggatacggtttcatggaaaagatgaagctctaagattgatgaattggaacaacagtgatcctcatttcagtctaagggtgaacacatcaaaaggctatactagggctgaccttgtaaaacgattggaaagtttacaggttcattatgaagaatcaattatggatgaatttgttcgcattcgggaagggatgcagatctctagcaataaaattgtaaaaatggatggttctatgcttctgattgctttagatgttattttgactgttataactgttggtcttgtagtgtctgtggttgatccacaacccggggaaacgattgttgattgctgtgctgcacctggtggaaagactcttttcatggcatcacggttgtcaggagaagggaagatatgggctctggacataaacaaaggtcgtttgagaatactcatggacgcagcaaagttacacggtctagatgatatgatcactgacatccatgctgatcttcgactatatgctaaggaaaccacagttaaatatgacaaagtattgttggacgctccatgctctggtctgggagtgctttccaagagggcggacttacgctggaatagacaatttgaaaatttggaagagttgatgtgtttacaagacgagcttcttgattcggcatcaatgttggtaaagccaggtggtatactaatttacagtacgtgttcgattgaccctgaagaaaatgaagagaggattactgcttttgttcagaggcatccggaatttgctcttcagagtgtatgtggatatgttcctagagaatttatcacagatgaaggtttctattcctcaaatccaactaagcactctatggatggggcatttgctgcacgtcttgtccggtcaacgcactaagattataggagttgccacaaggccacaactaggtgtgaagttgaacaaggaatcacatgtattgccctaagtgcacccagtcattgcttcaatatctttatcttatatattcttgaactttgctgcgttttcctcttacgcttcacaaaaaaaaagcatatccaaacccataccatattgcttcttgtacggcacgcagattttttgaagcgttttcgctttgtattaaagtcatctgtttagactgctcagttgtaatatatatagaaaaaacactgtaaaaacagtagaagctatgtcggattaaagccaaatcagctgcctatttcaacgagagaaaccgtgatgagagagaaatcgctgtttcctgaagccttcaaccgttagcagccggtggccggggcgtaaaagacgaactactcgtcttcacggaaaacgacggtgaagaagatggcgtctactatgaggttcatgcgcagatcaactccactcgactgcccaatgcttatcttgtttggcatattgttgcagtatatgacagtatcccat

SEQ ID NO: 22010 - DNA, 2453 bp, Zea Mays
tcccgagtcccgaactctcgatccactcatccgctgagggcgtcggccttctggcccttctccccccggccgacctcgcccctccggcgctccgtccgcttcctgaactcgtctccctcacggacgttctcctccctccgctcgccgcgccgcaacccggagaggagaccgccgctcggtcgagcaccacctggggcccagcgtcctcgcgaccagctctagcgcggcgtccgccctctgcagccctggtgtccccgcgactggcttcggccggcacacaactccacactgtatgctgcaaccctactctgcctcgtcttcttccatcaccctaagcatgcgcgcaacccccactcaccaacgacgggcccggccgccgccgccgtcctgcctcgccacccgccaccttcgccggcgacgagcaccagcaggaattaatagagttccaaacctcggttctgcagtttctactaaaaaagcagtcatttatgttatctgtccccgaagcagttgcagtggtgaggttgctaagaatcgagaaggggaaagcatttgtagaccttttgaacgagaaagcaaatgattctggagataaagagataggatatgtgcagaggacactaggtttcagcacacgctatttggaggacagggatataagactggttaccgtcatagttgctggaacagtgcgctggaaacgctaccttgattatctaatcatgtcactatgcagtgaggagaaggttttcagggagatggagccactgcttctacagatattgagaattggctttttcgaaattctcaagcttgatgtacctgcttatgctgccgttgatgagaatgtaaggcttgctaaagtagctttaaggcctggtgctgggaatatggtgaatgcaattctgcgtaaacttgtattgctaaaggagacagactctcttcctcttccaaagatagaaggtgatgatcgtgcccaagctcgtgctctttctataatttattctcatcctgtttggatggtgagacgatggatacggtttcatggaaaagatgaagctctaagattgatgaattggaacaacagtgatcctcatttcagtctaagggtgaacacatcaaaaggctatactagggctgaccttgtaaaacgattggaaagtttacaggttcattatgaagaatcaattatggatgaatttgttcgcattcgggaagggatgcagcaagtcttaaaagctggattactgaaagatggcatttgtgctgtgcaagatgagagtgcaggtcttgtagtgtctgtggttgatccacaacccggggaaacgattgttgattgctgtgctgcacctggtggaaagactcttttcatggcatcacggttgtcaggagaagggaagatatgggctctggacataaacaaaggtcgtttgagaatactcatggacgcagcaaagttacacggtctagatgatatgatcactgacatccatgctgatcttcgactatatgctaaggaaaccacagttaaatatgacaaagtattgttggacgctccatgctctggtctgggagtgctttccaagagggcggacttacgctggaatagacaatttgaaaatttggaagagttgatgtgtttacaagacgagcttcttgattcggcatcaatgttggtaaagccaggtggtatactaatttacagtacgtgttcgattgaccctgaagaaaatgaagagaggattactgcttttgttcagaggcatccggaatttgctcttcagagtgtatgtggatatgttcctagagaatttatcacagatgaaggtttctattcctcaaatccaactaagcactctatggatggggcatttgctgcacgtcttgtccggtcaacgcactaagattataggagttgccacaaggccacaactaggtgtgaagttgaacaaggaatcacatgtattgccctaagtgcacccagtcattgcttcaatatctttatcttatatattcttgaactttgctgcgttttcctcttacgcttcacaaaaaaaaagcatatccaaacccataccatattgcttcttgtacggcacgcagattttttgaagcgttttcgctttgtattaaagtcatctgtttagactgctcagttgtaatatatatagaaaaaacactgtaaaaacagtagaagctatgtcggattaaagccaaatcagctgcctatttcaacgagagaaaccgtgatgagagagaaatcgctgtttcctgaagccttcaaccgttagcagccggtggccggggcgtaaaagacgaactactcgtcttcacggaaaacgacggtgaagaagatggcgtctactatgaggttcatgcgcagatcaactccactcgactgcccaatgcttatcttgtttggcatattgttgcagtatatgacagtatcccat

SEQ ID NO: 22011 - DNA, 573 bp, Zea Mays
cgcgaacttgaactggacggacgcaccgatttccatggtgccaacagtcgcagggctgattgagaagaagctgcctgtttggatttttagtggcgattttgattccgtgtgcccacttcctgctacgaggttttccatccatgatcttaacctgcacgtcaccactccatggcgcccgtggacagtaaacatggaggtcggaggatatgttcaacaataccagggaggattcacgtttgcctctgtcagaggagctggtcatatggttccgtcttcccaggctgatagagcattagtattattggactcctttctgaaaggggtgctcccaccatacgtacaggagcagtaataattcctaaatatgtagagtgtcttgtcaatggcaaactcaataaaaactatccgtttttgtattacttgaattgatgttggttttgcattagctggtttgtggttataattaaaaggtccatctttccccttagggaccgtttgtatccgctcgttttagagaaattgaaatctatacttaacagaggaggctatttggcttgaaatttgaaattctac

SEQ ID NO: 22012 - DNA, 1661 bp, Zea Mays
gcgacatgtaaatcacgcagacacacacacttcatcgtggagatatggtggggaacaatactgttgcttccctcttctactattctttgctcatcatctgcgccgctgcttggcacgcggatgcgtcccaagcggatcgactgagagaattcatcaggtctaggaggaacagtcctagtgaggctgctgataagggcacgtttgaggttgccaacatagggcacagcgtagctagcagcctcctgagcacaagcagctactccgacagtgaacagagcgccctgaaggcagctgacaagatcactgcgctgccggggcaaccggacggcggcgtcgacttcgaccagtacgccggggcccggatgctcatcgcttggctacggagcaatgcaagagctcggtccgttccgcgtaaacagcgacaacaaaacgctgagcagaaacaaggcggcttggaataacgtggctaatgtgatcttcttggagtcgccggcgggtgttggattctcctactccaacacatcctccgactacggcctcagcggagaccgaaggacagctgctgatgcgtacttgtttttggctaactggctggagcgctttcctgaatacaaaagccgtccgttctacatctccggggagagctacgccggacactacgtacccgaacttgctgccaccatcttaacccagaattcctacaacagcaggacggccataaacctccggggcatcttggttggaaatccacttctggattcgtatatgaacttgaagggtgcagttgcctactactggagccatgggttgatgtcggacgaggtctttgacaacataaccaggcactgcaagtatgacagttcagatggtgtggcatgcagtggcgctttggaggcggtagatcctggacagattgatccttacaacgtatatgctccgatctgtgttgatgcggccaacggagcatactaccccactggctacctacctggatatgatccatgcagcgattactacacctattcctacctcaatgacccagcagtgcagaatgctttccacgctaggacgacaagttggtcagcgtgcgcgaacttgaactggacggacgcaccgatttccatggtgccaacagtcgcagggctgattgagaagaagctgcctgtttggatttttagtggcgattttgattccgtgtgcccacttcctgctacgaggttttccatccatgatcttaacctgcacgtcaccactccatggcgcccgtggacagtaaacatggaggtcggaggatatgttcaacaataccagggaggattcacgtttgcctctgtcagaggagctggtcatatggttccgtcttcccaggctgatagagcattagtattattggactcctttctgaaaggggtgctcccaccatacgtacaggagcagtaataattcctaaatatgtagagtgtcttgtcaatggcaaactcaataaaaactatccgtttttgtattacttgaattgatgttggttttgcattagctggtttgtggttataattaaaaggtccatctttccccttagggaccgtttgtatccgctcgttttagagaaattgaaatctatacttaacagaggaggctatttggcttgaaatttgaaattctac

SEQ ID NO: 22013 - DNA, 827 bp, Zea Mays
ttcgatctgcactgcaagtatgacagttcagatggtgtggcatgcagtggcgctttggaggcggtagatcctggacagattgatccttacaacgtatatgctccgatctgtgttgatgcggccaacggagcatactaccccactggctacctacctggatatgatccatgcagcgattactacacctattcctacctcaatgacccagcagtgcagaatgctttccacgctaggacgacaagttggtcagcgtgcgcgaacttgaactggacggacgcaccgatttccatggtgccaacagtcgcagggctgattgagaagaagctgcctgtttggatttttagtggcgattttgattccgtgtgcccacttcctgctacgaggttttccatccatgatcttaacctgcacgtcaccactccatggcgcccgtggacagtaaacatggaggtcggaggatatgttcaacaataccagggaggattcacgtttgcctctgtcagaggagctggtcatatggttccgtcttcccaggctgatagagcattagtattattggactcctttctgaaaggggtgctcccaccatacgtacaggagcagtaataattcctaaatatgtagagtgtcttgtcaatggcaaactcaataaaaactatccgtttttgtattacttgaattgatgttggttttgcattagctggtttgtggttataattaaaaggtccatctttccccttagggaccgtttgtatccgctcgttttagagaaattgaaatctatacttaacagaggaggctatttggcttgaaatttgaaattctac

SEQ ID NO: 22014 - DNA, 873 bp, Zea Mays
ccggcctggcccgacttcagtcgccacaacgacgctagggtttcactcgcagccgccgacgccaaaagcccgctcttctgccccaagccgcgacgccccacgacgccgctgcggtgccaccagagcggtggcttctccgacgctgggcgacgagagcggcctgtcgtcggcgtccccgcagccgccgctgttctacggctcaccgccacggcgagcgtcaaacccggtggtccacgacagtaggttcggcgcggactgcccgcccgtgcccgtgccggggctgtccgtgcaccggcccagcccgcggtcgtcggcggcggcgccgtccatgtcgccgcgcgggtgcacccgcgcgcggttcgcgttctagcccgcgaataaaatttcatggagaatctgtacaaaagagtggctagctactacacgagagtctggtctgagagaagcaacacgaggtcagtcagtggatgaacttagagagagacattcacacgctgagagggttgataatttgtgatattttcctcctttttttcttcttcctgattttgtatattgtatatcctgctggattaacaaatactagcaaccacttatagtcagtcaacataggccatctactgccagtacctcttttcttctcatgagttgtagcagtttctgtttaattcatatgattgtaattacaatcatattttaagttactactatagtttctgtttaattacaatcatagtttctgtttaattaaaattcatatgattgtaattacaatcatagtttctgtttttgttatccatattttaagttgctactatagttcatatgattgtaaaatgattgtaattagttcaattcaatgagaaaaaaata

SEQ ID NO: 22015 - DNA, 629 bp, Zea Mays
cccgacttcagtcgccacaacgacgctagggtttcactcgcagccgccgacgccaaaagcccgctcttctgccccaagccgcgacgccccacgacgccgctgcggtgccaccagagcggtggcttctccgacgctgaaatttcatggagaatctgtacaaaagagtggctagctactacacgagagtctggtctgagagaagcaacacgaggtcagtcagtggatgaacttagagagagacattcacacgctgagagggttgataatttgtgatattttcctcctttttttcttcttcctgattttgtatattgtatatcctgctggattaacaaatactagcaaccacttatagtcagtcaacataggccatctactgccagtacctcttttcttctcatgagttgtagcagtttctgtttaattcatatgattgtaattacaatcatattttaagttactactatagtttctgtttaattacaatcatagtttctgtttaattaaaattcatatgattgtaattacaatcatagtttctgtttttgttatccatattttaagttgctactatagttcatatgattgtaaaatgattgtaattagttcaattcaatgagaaaaaaata

SEQ ID NO: 22016 - DNA, 2451 bp, Zea Mays
gcgcatccttttaccaccaacttttgctttgacccgtcccaccctcgcacaccctttgtctcctttgcacttcgcctcgccgcctgaatctccataagcccccacaccaatcactggagggcggaggaatcgctctcagttccccccagtagccgcccacaggtactaagcagctccggtccgcgtcgcgccgtcgccatggctcagtcatactaggacttggggattgtgctgctactcagctgaaagtttatagaaggtggagaagttgtggtgtttccctacctgttagtctgcacttctttgttcctgatcaactgctccgacacgattgttgtcttctcaacctctcttgccaagcatggctgggcaaacggcaaaggcaaaggaagcagaaaaagatgacagacaagaacccggagctgagggggcgaaaaacaagctactgccgtctcaccagcagcaagactctccagcttctgtggcggacaatgattcttcaggtgtctcttcagttcctggcgatgagtcgcctgtcctggatggggattctggtgagttgaaagtggaggaaaacttggatggtaatgggagtaaggaaaagaaaacgtctcagaagagcagtactagtgacggctttgcttctgctaaagtgagtgatgggacaagtagtttgaggaagaccagtggtagtgcgacgatgagtacacgggccgatttcactgagagtgggaagagtagcatgtgccgtgtgagcacggccagtgacattagcgacgagagctcgtgcagcagcatgagcagtgccaccacaaagccacacaaggggaatgattcaaggtgggaggcgatccatgttgtgaagtccagggataatgttcttggactgaatcattttaggctgcttaagaagttgggttctggtgatataggaagtgtgtatctctctgaactgagtggtacacggagttactttgcaatgaaggtaatggataagacttctttggcgagtcggaagaagctgcttcgagctcagaccgagcgggagatcctacagtccctggaccatccatttctaccaaccctgtacactcattttgagacagacaagttttcatgcttagttatggaattctgccctggaggtgaccttcatactcttcgtcaaaggcaacctggaaaatatttctcagagcaagcagcaaagttctatgtggcagaggtactccttgcattggaatacctgcatatgcttgggattatataccgtgatcttaaaccagaaaatgtcctcgttcgggaagatggccacatcatgctatcagactttgatctctctcttcgctgttcagtaagcccaacggtgatcaagtctgcaaatcctggcctagatgcaatgcagaggaacaatgcagcatactgtgcccagcctgcttgcattgaaccatcctgcattcagccctcttgtgtagctccaactacttgctttggcccccggttcttctccaaatctaaatcaaagtccaagtccaagtccaagaaggacaagtcaaagcctgatgctccaaaccaagagaacctcttcccagagctcattgctgagccaactgacgctcgctcgatgtcctttgttggcactcatgagtacctggccccagaaataataaaaggggagggccatggaagtgctgtggattggtggacctttggcatattcttgtacgagctgttgttcgggaagaccccattcaaaggttcaggcaaccgggctacactcttcaacgttgttggccagcccttgaggttcccagagtccccaatagtgagcttctctgcgagggacatgataaggggattgctagtcaaggacccgcagcaccgacttgggtataagcgtggcgctaccgagataaagcagcatcctttcttcgagggcgtgaactgggctctgataaggtgtgcgagccctccagacataccaaagcctgttgagctcgagtgtcgcccaaagcaagtgccatcagcaaatggaaaggtcgcgccagcccctaaccaaaaggggccagataattatctagagtttgaattcttctagggaatttttttttgtgatttctgaactgaaagagtgcatctgggcagatgctgtgaaagaaagtgaaagatgatgagctactctaggcatgtgcttggctggatcttttttttttctgccattagactgtacgctcgtttcaggatatccgagttgttttttcctgctgaactgcttaactctagggtgtactcaatccatcatgtatgttgcaattttcagaacttgcctatggtacttgaaatggacttcagggctacttgctccagctctctgtgtaattgctaatatacattgtaattgatgcttcatcttaggagttaggacatgtcttgctcttcaaatgctgatatctg

SEQ ID NO: 22017 - DNA, 2402 bp, Zea Mays
gcgcatccttttaccaccaacttttgctttgacccgtcccaccctcgcacaccctttgtctcctttgcacttcgcctcgccgcctgaatctccataagcccccacaccaatcactggagggcggaggaatcgctctcagttccccccagtagccgcccacagactaggacttggggattgtgctgctactcagctgaaagtttatagaaggtggagaagttgtggtgtttccctacctgttagtctgcacttctttgttcctgatcaactgctccgacacgattgttgtcttctcaacctctcttgccaagcatggctgggcaaacggcaaaggcaaaggaagcagaaaaagatgacagacaagaacccggagctgagggggcgaaaaacaagctactgccgtctcaccagcagcaagactctccagcttctgtggcggacaatgattcttcaggtgtctcttcagttcctggcgatgagtcgcctgtcctggatggggattctggtgagttgaaagtggaggaaaacttggatggtaatgggagtaaggaaaagaaaacgtctcagaagagcagtactagtgacggctttgcttctgctaaagtgagtgatgggacaagtagtttgaggaagaccagtggtagtgcgacgatgagtacacgggccgatttcactgagagtgggaagagtagcatgtgccgtgtgagcacggccagtgacattagcgacgagagctcgtgcagcagcatgagcagtgccaccacaaagccacacaaggggaatgattcaaggtgggaggcgatccatgttgtgaagtccagggataatgttcttggactgaatcattttaggctgcttaagaagttgggttctggtgatataggaagtgtgtatctctctgaactgagtggtacacggagttactttgcaatgaaggtaatggataagacttctttggcgagtcggaagaagctgcttcgagctcagaccgagcgggagatcctacagtccctggaccatccatttctaccaaccctgtacactcattttgagacagacaagttttcatgcttagttatggaattctgccctggaggtgaccttcatactcttcgtcaaaggcaacctggaaaatatttctcagagcaagcagcaaagttctatgtggcagaggtactccttgcattggaatacctgcatatgcttgggattatataccgtgatcttaaaccagaaaatgtcctcgttcgggaagatggccacatcatgctatcagactttgatctctctcttcgctgttcagtaagcccaacggtgatcaagtctgcaaatcctggcctagatgcaatgcagaggaacaatgcagcatactgtgcccagcctgcttgcattgaaccatcctgcattcagccctcttgtgtagctccaactacttgctttggcccccggttcttctccaaatctaaatcaaagtccaagtccaagtccaagaaggacaagtcaaagcctgatgctccaaaccaagagaacctcttcccagagctcattgctgagccaactgacgctcgctcgatgtcctttgttggcactcatgagtacctggccccagaaataataaaaggggagggccatggaagtgctgtggattggtggacctttggcatattcttgtacgagctgttgttcgggaagaccccattcaaaggttcaggcaaccgggctacactcttcaacgttgttggccagcccttgaggttcccagagtccccaatagtgagcttctctgcgagggacatgataaggggattgctagtcaaggacccgcagcaccgacttgggtataagcgtggcgctaccgagataaagcagcatcctttcttcgagggcgtgaactgggctctgataaggtgtgcgagccctccagacataccaaagcctgttgagctcgagtgtcgcccaaagcaagtgccatcagcaaatggaaaggtcgcgccagcccctaaccaaaaggggccagataattatctagagtttgaattcttctagggaatttttttttgtgatttctgaactgaaagagtgcatctgggcagatgctgtgaaagaaagtgaaagatgatgagctactctaggcatgtgcttggctggatcttttttttttctgccattagactgtacgctcgtttcaggatatccgagttgttttttcctgctgaactgcttaactctagggtgtactcaatccatcatgtatgttgcaattttcagaacttgcctatggtacttgaaatggacttcagggctacttgctccagctctctgtgtaattgctaatatacattgtaattgatgcttcatcttaggagttaggacatgtcttgctcttcaaatgctgatatctg

SEQ ID NO: 22018 - DNA, 2336 bp, Zea Mays
gataattctcggagttagtgcctccatgtcctgacgcggatgcgggcggagcacaccacatgcggatgtgctgtgctgttgcctcatatgattccgactaggacttggggattgtgctgctactcagctgaaagtttatagaaggtggagaagttgtggtgtttccctacctgttagtctgcacttctttgttcctgatcaactgctccgacacgattgttgtcttctcaacctctcttgccaagcatggctgggcaaacggcaaaggcaaaggaagcagaaaaagatgacagacaagaacccggagctgagggggcgaaaaacaagctactgccgtctcaccagcagcaagactctccagcttctgtggcggacaatgattcttcaggtgtctcttcagttcctggcgatgagtcgcctgtcctggatggggattctggtgagttgaaagtggaggaaaacttggatggtaatgggagtaaggaaaagaaaacgtctcagaagagcagtactagtgacggctttgcttctgctaaagtgagtgatgggacaagtagtttgaggaagaccagtggtagtgcgacgatgagtacacgggccgatttcactgagagtgggaagagtagcatgtgccgtgtgagcacggccagtgacattagcgacgagagctcgtgcagcagcatgagcagtgccaccacaaagccacacaaggggaatgattcaaggtgggaggcgatccatgttgtgaagtccagggataatgttcttggactgaatcattttaggctgcttaagaagttgggttctggtgatataggaagtgtgtatctctctgaactgagtggtacacggagttactttgcaatgaaggtaatggataagacttctttggcgagtcggaagaagctgcttcgagctcagaccgagcgggagatcctacagtccctggaccatccatttctaccaaccctgtacactcattttgagacagacaagttttcatgcttagttatggaattctgccctggaggtgaccttcatactcttcgtcaaaggcaacctggaaaatatttctcagagcaagcagcaaagttctatgtggcagaggtactccttgcattggaatacctgcatatgcttgggattatataccgtgatcttaaaccagaaaatgtcctcgttcgggaagatggccacatcatgctatcagactttgatctctctcttcgctgttcagtaagcccaacggtgatcaagtctgcaaatcctggcctagatgcaatgcagaggaacaatgcagcatactgtgcccagcctgcttgcattgaaccatcctgcattcagccctcttgtgtagctccaactacttgctttggcccccggttcttctccaaatctaaatcaaagtccaagtccaagtccaagaaggacaagtcaaagcctgatgctccaaaccaagagaacctcttcccagagctcattgctgagccaactgacgctcgctcgatgtcctttgttggcactcatgagtacctggccccagaaataataaaaggggagggccatggaagtgctgtggattggtggacctttggcatattcttgtacgagctgttgttcgggaagaccccattcaaaggttcaggcaaccgggctacactcttcaacgttgttggccagcccttgaggttcccagagtccccaatagtgagcttctctgcgagggacatgataaggggattgctagtcaaggacccgcagcaccgacttgggtataagcgtggcgctaccgagataaagcagcatcctttcttcgagggcgtgaactgggctctgataaggtgtgcgagccctccagacataccaaagcctgttgagctcgagtgtcgcccaaagcaagtgccatcagcaaatggaaaggtcgcgccagcccctaaccaaaaggggccagataattatctagagtttgaattcttctagggaatttttttttgtgatttctgaactgaaagagtgcatctgggcagatgctgtgaaagaaagtgaaagatgatgagctactctaggcatgtgcttggctggatcttttttttttctgccattagactgtacgctcgtttcaggatatccgagttgttttttcctgctgaactgcttaactctagggtgtactcaatccatcatgtatgttgcaattttcagaacttgcctatggtacttgaaatggacttcagggctacttgctccagctctctgtgtaattgctaatatacattgtaattgatgcttcatcttaggagttaggacatgtcttgctcttcaaatgctgatatctg

SEQ ID NO: 22019 - DNA, 2331 bp, Zea Mays
ctcattcatacctgcctctcctttttttccccgtgggggagaaaagcgggggcagcgagttgtgcgccctgtgagcttgcagctgttccagactaggacttggggattgtgctgctactcagctgaaagtttatagaaggtggagaagttgtggtgtttccctacctgttagtctgcacttctttgttcctgatcaactgctccgacacgattgttgtcttctcaacctctcttgccaagcatggctgggcaaacggcaaaggcaaaggaagcagaaaaagatgacagacaagaacccggagctgagggggcgaaaaacaagctactgccgtctcaccagcagcaagactctccagcttctgtggcggacaatgattcttcaggtgtctcttcagttcctggcgatgagtcgcctgtcctggatggggattctggtgagttgaaagtggaggaaaacttggatggtaatgggagtaaggaaaagaaaacgtctcagaagagcagtactagtgacggctttgcttctgctaaagtgagtgatgggacaagtagtttgaggaagaccagtggtagtgcgacgatgagtacacgggccgatttcactgagagtgggaagagtagcatgtgccgtgtgagcacggccagtgacattagcgacgagagctcgtgcagcagcatgagcagtgccaccacaaagccacacaaggggaatgattcaaggtgggaggcgatccatgttgtgaagtccagggataatgttcttggactgaatcattttaggctgcttaagaagttgggttctggtgatataggaagtgtgtatctctctgaactgagtggtacacggagttactttgcaatgaaggtaatggataagacttctttggcgagtcggaagaagctgcttcgagctcagaccgagcgggagatcctacagtccctggaccatccatttctaccaaccctgtacactcattttgagacagacaagttttcatgcttagttatggaattctgccctggaggtgaccttcatactcttcgtcaaaggcaacctggaaaatatttctcagagcaagcagcaaagttctatgtggcagaggtactccttgcattggaatacctgcatatgcttgggattatataccgtgatcttaaaccagaaaatgtcctcgttcgggaagatggccacatcatgctatcagactttgatctctctcttcgctgttcagtaagcccaacggtgatcaagtctgcaaatcctggcctagatgcaatgcagaggaacaatgcagcatactgtgcccagcctgcttgcattgaaccatcctgcattcagccctcttgtgtagctccaactacttgctttggcccccggttcttctccaaatctaaatcaaagtccaagtccaagtccaagaaggacaagtcaaagcctgatgctccaaaccaagagaacctcttcccagagctcattgctgagccaactgacgctcgctcgatgtcctttgttggcactcatgagtacctggccccagaaataataaaaggggagggccatggaagtgctgtggattggtggacctttggcatattcttgtacgagctgttgttcgggaagaccccattcaaaggttcaggcaaccgggctacactcttcaacgttgttggccagcccttgaggttcccagagtccccaatagtgagcttctctgcgagggacatgataaggggattgctagtcaaggacccgcagcaccgacttgggtataagcgtggcgctaccgagataaagcagcatcctttcttcgagggcgtgaactgggctctgataaggtgtgcgagccctccagacataccaaagcctgttgagctcgagtgtcgcccaaagcaagtgccatcagcaaatggaaaggtcgcgccagcccctaaccaaaaggggccagataattatctagagtttgaattcttctagggaatttttttttgtgatttctgaactgaaagagtgcatctgggcagatgctgtgaaagaaagtgaaagatgatgagctactctaggcatgtgcttggctggatcttttttttttctgccattagactgtacgctcgtttcaggatatccgagttgttttttcctgctgaactgcttaactctagggtgtactcaatccatcatgtatgttgcaattttcagaacttgcctatggtacttgaaatggacttcagggctacttgctccagctctctgtgtaattgctaatatacattgtaattgatgcttcatcttaggagttaggacatgtcttgctcttcaaatgctgatatctg

SEQ ID NO: 22020 - DNA, 2279 bp, Zea Mays
gtcaaacctgagctcgtagcgctagcactagcttgtcagactaggacttggggattgtgctgctactcagctgaaagtttatagaaggtggagaagttgtggtgtttccctacctgttagtctgcacttctttgttcctgatcaactgctccgacacgattgttgtcttctcaacctctcttgccaagcatggctgggcaaacggcaaaggcaaaggaagcagaaaaagatgacagacaagaacccggagctgagggggcgaaaaacaagctactgccgtctcaccagcagcaagactctccagcttctgtggcggacaatgattcttcaggtgtctcttcagttcctggcgatgagtcgcctgtcctggatggggattctggtgagttgaaagtggaggaaaacttggatggtaatgggagtaaggaaaagaaaacgtctcagaagagcagtactagtgacggctttgcttctgctaaagtgagtgatgggacaagtagtttgaggaagaccagtggtagtgcgacgatgagtacacgggccgatttcactgagagtgggaagagtagcatgtgccgtgtgagcacggccagtgacattagcgacgagagctcgtgcagcagcatgagcagtgccaccacaaagccacacaaggggaatgattcaaggtgggaggcgatccatgttgtgaagtccagggataatgttcttggactgaatcattttaggctgcttaagaagttgggttctggtgatataggaagtgtgtatctctctgaactgagtggtacacggagttactttgcaatgaaggtaatggataagacttctttggcgagtcggaagaagctgcttcgagctcagaccgagcgggagatcctacagtccctggaccatccatttctaccaaccctgtacactcattttgagacagacaagttttcatgcttagttatggaattctgccctggaggtgaccttcatactcttcgtcaaaggcaacctggaaaatatttctcagagcaagcagcaaagttctatgtggcagaggtactccttgcattggaatacctgcatatgcttgggattatataccgtgatcttaaaccagaaaatgtcctcgttcgggaagatggccacatcatgctatcagactttgatctctctcttcgctgttcagtaagcccaacggtgatcaagtctgcaaatcctggcctagatgcaatgcagaggaacaatgcagcatactgtgcccagcctgcttgcattgaaccatcctgcattcagccctcttgtgtagctccaactacttgctttggcccccggttcttctccaaatctaaatcaaagtccaagtccaagtccaagaaggacaagtcaaagcctgatgctccaaaccaagagaacctcttcccagagctcattgctgagccaactgacgctcgctcgatgtcctttgttggcactcatgagtacctggccccagaaataataaaaggggagggccatggaagtgctgtggattggtggacctttggcatattcttgtacgagctgttgttcgggaagaccccattcaaaggttcaggcaaccgggctacactcttcaacgttgttggccagcccttgaggttcccagagtccccaatagtgagcttctctgcgagggacatgataaggggattgctagtcaaggacccgcagcaccgacttgggtataagcgtggcgctaccgagataaagcagcatcctttcttcgagggcgtgaactgggctctgataaggtgtgcgagccctccagacataccaaagcctgttgagctcgagtgtcgcccaaagcaagtgccatcagcaaatggaaaggtcgcgccagcccctaaccaaaaggggccagataattatctagagtttgaattcttctagggaatttttttttgtgatttctgaactgaaagagtgcatctgggcagatgctgtgaaagaaagtgaaagatgatgagctactctaggcatgtgcttggctggatcttttttttttctgccattagactgtacgctcgtttcaggatatccgagttgttttttcctgctgaactgcttaactctagggtgtactcaatccatcatgtatgttgcaattttcagaacttgcctatggtacttgaaatggacttcagggctacttgctccagctctctgtgtaattgctaatatacattgtaattgatgcttcatcttaggagttaggacatgtcttgctcttcaaatgctgatatctg

SEQ ID NO: 22021 - DNA, 2249 bp, Zea Mays
gcctgcgagactaggacttggggattgtgctgctactcagctgaaagtttatagaaggtggagaagttgtggtgtttccctacctgttagtctgcacttctttgttcctgatcaactgctccgacacgattgttgtcttctcaacctctcttgccaagcatggctgggcaaacggcaaaggcaaaggaagcagaaaaagatgacagacaagaacccggagctgagggggcgaaaaacaagctactgccgtctcaccagcagcaagactctccagcttctgtggcggacaatgattcttcaggtgtctcttcagttcctggcgatgagtcgcctgtcctggatggggattctggtgagttgaaagtggaggaaaacttggatggtaatgggagtaaggaaaagaaaacgtctcagaagagcagtactagtgacggctttgcttctgctaaagtgagtgatgggacaagtagtttgaggaagaccagtggtagtgcgacgatgagtacacgggccgatttcactgagagtgggaagagtagcatgtgccgtgtgagcacggccagtgacattagcgacgagagctcgtgcagcagcatgagcagtgccaccacaaagccacacaaggggaatgattcaaggtgggaggcgatccatgttgtgaagtccagggataatgttcttggactgaatcattttaggctgcttaagaagttgggttctggtgatataggaagtgtgtatctctctgaactgagtggtacacggagttactttgcaatgaaggtaatggataagacttctttggcgagtcggaagaagctgcttcgagctcagaccgagcgggagatcctacagtccctggaccatccatttctaccaaccctgtacactcattttgagacagacaagttttcatgcttagttatggaattctgccctggaggtgaccttcatactcttcgtcaaaggcaacctggaaaatatttctcagagcaagcagcaaagttctatgtggcagaggtactccttgcattggaatacctgcatatgcttgggattatataccgtgatcttaaaccagaaaatgtcctcgttcgggaagatggccacatcatgctatcagactttgatctctctcttcgctgttcagtaagcccaacggtgatcaagtctgcaaatcctggcctagatgcaatgcagaggaacaatgcagcatactgtgcccagcctgcttgcattgaaccatcctgcattcagccctcttgtgtagctccaactacttgctttggcccccggttcttctccaaatctaaatcaaagtccaagtccaagtccaagaaggacaagtcaaagcctgatgctccaaaccaagagaacctcttcccagagctcattgctgagccaactgacgctcgctcgatgtcctttgttggcactcatgagtacctggccccagaaataataaaaggggagggccatggaagtgctgtggattggtggacctttggcatattcttgtacgagctgttgttcgggaagaccccattcaaaggttcaggcaaccgggctacactcttcaacgttgttggccagcccttgaggttcccagagtccccaatagtgagcttctctgcgagggacatgataaggggattgctagtcaaggacccgcagcaccgacttgggtataagcgtggcgctaccgagataaagcagcatcctttcttcgagggcgtgaactgggctctgataaggtgtgcgagccctccagacataccaaagcctgttgagctcgagtgtcgcccaaagcaagtgccatcagcaaatggaaaggtcgcgccagcccctaaccaaaaggggccagataattatctagagtttgaattcttctagggaatttttttttgtgatttctgaactgaaagagtgcatctgggcagatgctgtgaaagaaagtgaaagatgatgagctactctaggcatgtgcttggctggatcttttttttttctgccattagactgtacgctcgtttcaggatatccgagttgttttttcctgctgaactgcttaactctagggtgtactcaatccatcatgtatgttgcaattttcagaacttgcctatggtacttgaaatggacttcagggctacttgctccagctctctgtgtaattgctaatatacattgtaattgatgcttcatcttaggagttaggacatgtcttgctcttcaaatgctgatatctg

SEQ ID NO: 22022 - DNA, 2475 bp, Zea Mays
ccaaaataagcgcctgcccccagcggaaagcgaccgccccctctgcctccccctcctctcctccgtatagcggcggcaggcccgctggagctggcggcgagggcaatgccgcgagtccgccggcggtgccggggcgcgatgctgctgctcctcgtcgcgtcggtgctcgcgcccctcgtgctgtacggcggctcccccgtctctgtcgcgcccctcccggactccaccgtggcgagcggcgcgttcgacccggagggcgcgtccaatctggtgtggtcgcacatggcagcgtccgcggtgtctctggccaaaggtttgataactgaaaggctcggggagcacaaaaaccgtgtgctatcagcaactgatcactggcaggtggttgaggcagggagcaggaaccgtgcatctggaaaatcagtgctaggtttgggcaggaggacgtcattaaggaggttgtgggaagccagagaagggcagatggatctggtgagcccggggatagcatggaggtggacgagcagaaggcaaaagaagttgggatagagttgcctcacgcaactgatgtgctgcacaaaaacgggtcagatggactagaaatgaacgatgtttctggattgcgcactgttggaatcctgaatacatcttctgcgaaggaaagtgacgttcatagtttatccaataagatgaaacatcctaatatttccagagagcagcaaacaaggacaagtaacagtaatgctgctcaccatgcaacaaatagtattactgatcaaaccacagctttgccagatgctacaattcgcatcatcaagaaccagcttacgacagcaaagatgtaccttggattgtttgcttctaggggtaatcatggcttcacaagggagctccgtgcacggatgagggatatacaacgagcactaggcgatgcaaggagtgatcggcaattacctcataatgtccacagcaaaactagagcaatggagcagacactggtgaaggtcaggaaaattcatgatggctgctcaagtgctgtgaataggctccatactgtccttcactcaacagagcagcaactcgaatcaaacaaaagacaagctaactatctagcacaagtggctgcaaaatctctacccaagggtctccattgccttacactgcggcttacaaatgagtactatttcactaactcaaagaataaagactttccctacgtggagaagctggaagaccccaaactctatcattatgccttgttttcagacaatgtattggctgctgcagtggttgttaactcaactcttgtccatgctaagaaaccagaaaaacatgtattccacattgtgacagatagtcttaactatgctgcaatgaaaatgtggttcctggctaatccctttggtaaagccgctattcaggttcagaacattgaagagtttacatggttaaactcaagctacagtccagtgctgaagcagttggaaacgcggtttatgattgattactacttcagaactgggcatgctaggcacgatgaaaatcccaagtttcggaaccccaagtacttgtcaattctcaaccatctgaggttctatctccctgagatcttcccaagacttaacaaggtgttatttctggatgatgatactgtagtgcagcgagacctaagtgcgctttggttggtagatctcaaaggcaaggttaatggtgctgtcgagacctgtagacaggacttccataggtttgataagtacctcaacttctcaaaccctcttattgccaagaattttgatccacatgcttgtggttgggcatatggcatgaacatgtttgatttgtccgactggagaaagcaaaacatcactgaggtctaccatacctggcagaagttgaatgaaaacaggctattgtggaagctaggtaccctccctgctggccttgtaaccttttggaaccgcacgttccctctcgatcgttcgtggcatcaattaggacttgggtacaacccaaatgtcaacgttaaggatatcaggcgagcggctgtcatccactacaacggaaacctgaagccctggcttgagattggattgccgaaataccgcaagtactggtcagcacacgtcaattacgatcaagtgtttctacgggagtgcaacataaacccctgaacagcaaatagtggtgcatggtttatatccttttcttttcaatgatttcttagaccaattctttgtgctctaggtaatttaaattgcctagagtgcttattctttgtaactgatgtctttcctgatgtaaaggtgccagcaggttggcggtaggcttggatcatacaaacagttagtagccaaaggcatatcccgttttgtgcttataaatgctaatatggtagataatttttgactgtatgtatgaattgaatgctatgttagatgccctcgcaaacagtacagtttgcgacgacccatttccact

SEQ ID NO: 22023 - DNA, 3370 bp, Zea Mays
atgctgccacggtcccgtgacgcggcaccgaggctcgcgtttctcgagccgctcgcctgcgcgttgcttctcctgctggtgtcgccgtgccactgcgtcaacgagcagggccaggcgctgctgcgatggaaagacagtctgcggccgccgagcggcgcgctggcgtcgtggcgctccgcggacgcgaacccgtgccggtggaccggcgtgtcgtgcaacgcgcgcggcgacgtcgtcggactgagcatcacctcggtcgacctgcagggtccgctcccgggcaacctgcagccgcttgcagcgtcgctcaagacgctggagctctctggcacgaacctcaccggcgcgataccgaaggagatcggcgggtacggcgagctgaccaccctcgacctcagcaagaaccagctcaccggcgcgatccccgccgagctgtgccggctcaccaagctcgagtcgctcgcgctcaactccaactccctgcgtggagccatcccggatgacatcggcaacctcaccagcctggtgtatctgacgctctacgacaacgagctcagtgggccgatcccggccagcatcggcaacctgaagaagctgcaggtgctccgcgccggagggaaccaggggctcaagggtccgttgccgccggagatcggcggatgcagtggcctcaccatgctcgggctcgcggagactggcgtctcagggagcctcccagagacgatcgggcagctcaagaagatccagaccattgccatctacaccactttgctctccggccggatcccggagtccatcggcaactgcaccgagctcaccagcctgtacctgtaccagaattctctctccgggccgataccggcgcagctcggccagctcaagaagctccaaacgctgctactctggcagaaccagctcgtcggcgcaattcccccggaactcggacagtgcaaggagctcacgctcattgacctgtcgctgaattcgcttaccgggagcattccggcgagtctgggcgggctacctaacctccagcagctgcagctgagcacgaaccaactcaccggcaccattccgccggagctctccaactgcacgtcgctgacggacatcgaggtcgacaacaacttgctgtccggggagatcagcatcgacttccccagactgcgcaacctcaccctgttctacgcgtggaagaaccggctcactggcggcgtgccggcgagcctcgcgcaggcccctagcctgcaggcggttgacctatcgtacaacaacctcaccggcaccatccccaaggtgctgttcgggctccagaacttgaccaagctgctgcttctcaacaacgagctgtccgggctcataccgccggagatcggtaattgcaccaacctgtaccggctccggctcaacggcaaccggctgtccggcacgattcccgccgagatcggcaacctcaagaacctaaacttcctcgacatgagtgagaaccacctcgtcggtcctgtgcccgcggccatttcggggtgcgccagcctcgagttcctcgacctgcactcgaatgctctgtcaggcgcattgccggacacgctgccacgcagtcttcagctcatcgacgtctccgacaaccagctcgccgggccattgagctccagcatcgggtcaatgctggagctgacgaagctgtatatgggaaacaaccggctgaccggcggcatcccgcccgagctcgggaagataccgtcgcagttcgccggccttgacaagctcggcagcctcgacctgtcccgcaacgagctctctgggagccttgatccactcgcggcgctgcagaacctcgtcacactcaacatctcctacaatgccttctctggcgagctcccgaacactccgttcttccaaaagctgcccctcagcgacctagccggcaaccgccatctcgtcgtcggcgacggctctgacgagtcctcccggcgcggcgccatctcgtcgctgaaggtagccatgtccgtcctcgcggcggcaagcgcgctgctcctggtgtccgcagcctatatgctcgcccgcgctcaccaccgcggcggcggtcgcatcatccacggcgagggctcgtgggaggtgacgctgtaccagaagctcgacatcgccatggacgacgtgctccggagcctaacggccgcgaacatgatcggcacgggcagctcgggggccgtgtacaaggtggacacccccaacggctacaccttcgccgtgaagaagatgtggccgtcggacgaggcgacgtcggcggcgttccgtagcgaaatcgcggctctgggctccatccgccaccgcaacatcgtacggctcctcgggtgggccgcgaacggcggcaccaggctgctattctacagctacctacccaacggcagcctgagcggcctcctgcacggcggccacgccgccaagggctcgcccgcggacgagtggggcgcgcggtacgggatcgcgctcggcgtggcccacgccgtggcgtacctgcaccacgactgcgtgccggctatcctgcacggcgacgtcaagtccatgaacgtgctgctcggcccggcctacgagccgtacctcgccgatttcggcctcgcccgcgtcctggccgccgcgagctcaaccaagctcgacaccggcaagcagccccgcgtcgccggctcgtacggctacatggcaccagagtacgcgtcgatgcagcggatcagcgagaagagcgacgtgtacagcttcggcgtcgtgctgctggagatcctgacggggcggcacccgctggacccgacgctaccgggcggcgcgcacctggtgcagtgggcgcgcgagcacgtgcaggcgaggcgcgacgcgtccgagctccttctggacgcgcggctccgggccagggcggccgaggcggacgtgcacgagatgcggcaggcgctgtccgtggccgcgctctgcgtgtcacgccgcgcggacgacaggcccgcgatgaaggacgtggcggcgctgctcagggagatcaggcgccccgcggcggtggacgacgcgaagcagccgtcaccgacgggcgccgccgcagcgcacgcggcggcagcgccggtgagcgcgcactcgaggggccaatcgtcgagccgctctttcgccgtctcggagaactctgcttgactggatgcaaatttttgcgagcgtagtgaacttagcaaattagcatcttttagcaaagtcgtaaaacagttgatgattggccgtaaacaggtgatgtcgtagttaggtgtaatctgctcttgtacattaacctcaagaatgtcggtttttagtaccagccaaatctcgagcatccgttgatatgaaatcagccaactttttt

SEQ ID NO: 22024 - DNA, 1041 bp, Zea Mays
gtcgggcgtggcgtgcgtgcaaagcgctcgatcgcccgtccgcgttctccgtctcttagcacccccgggtccccccgcccacgcaccttcttcctcctacctctcgtaccatcgacacggcctctcgccaagcagcgcgcaaaacctctcccacccgatcctgctctctctctctctgctgccttctcgatcgtacgagtgcgcgtgcatggacgaccagcggcagccggtgtgcaaggcgaagcgcggcgcgagggaggaggaggtccacgccgcgccgccggacttcccattcgaggaggccgcggcgacggcgggggagggcgacgacggcggggaggcgtcgcggcggccgccgggggttttccagttcccctggcaggagtgcagcggcgggctgggcgtgtccgccgcggggccgtgggagctgcgcgacgtcttcttccgctccctcgtcgacgggggcgccgcggccatcggcgtgccgggggaccggctggtgtctccgccgaccggcaggcgcgcgctcctcgagggggtcgacgcgtggctcgccgcggccgccgacggcgaggtggacccggtctggcggtccgcgctcatggccccgcggccgcgggccgaggacggagacggacggacgtcgtgggccctccccgcgcatgcttccggggtgagccccgcgtggcattgagtgcgctgcggcgccccccatcatcagccgcgtgacgctgacgtggcttcgagacagcagcgccgtggtggaccgtggtccgtggccgtgcccgtgggtgctagtatgattgtgatcaggatggagtaggcaaagggaccaaggaaaagtaaagaaccatggccaatggcaattggcaatcggtgatcaccttgtctttcgaatgtcctttccgttccatgttctattttatctgtacagctattatcgttagacgttctggcaacaacagcaacaacaacaaaatcaatgtattctttggaaagtcattccaacatcagtttctcgcatttcacctacatacggag

SEQ ID NO: 22025 - DNA, 1001 bp, Zea Mays
caaagcgctcgatcgcccgtccgcgttctccgtctcttagcacccccgggtccccccgcccacgcaccttcttcctcctacctctcgtaccatcgacacggcctctcgccaagcagcgcgcaaaacctctcccacccgatcctgctctctctctctctgctgccttctcgatcgtacgagcggcagccggtgtgcaaggcgaagcgcggcgcgagggaggaggaggtccacgccgcgccgccggacttcccattcgaggaggccgcggcgacggcgggggagggcgacgacggcggggaggcgtcgcggcggccgccgggggttttccagttcccctggcaggagtgcagcggcgggctgggcgtgtccgccgcggggccgtgggagctgcgcgacgtcttcttccgctccctcgtcgacgggggcgccgcggccatcggcgtgccgggggaccggctggtgtctccgccgaccggcaggcgcgcgctcctcgagggggtcgacgcgtggctcgccgcggccgccgacggcgaggtggacccggtctggcggtccgcgctcatggccccgcggccgcgggccgaggacggagacggacggacgtcgtgggccctccccgcgcatgcttccggggtgagccccgcgtggcattgagtgcgctgcggcgccccccatcatcagccgcgtgacgctgacgtggcttcgagacagcagcgccgtggtggaccgtggtccgtggccgtgcccgtgggtgctagtatgattgtgatcaggatggagtaggcaaagggaccaaggaaaagtaaagaaccatggccaatggcaattggcaatcggtgatcaccttgtctttcgaatgtcctttccgttccatgttctattttatctgtacagctattatcgttagacgttctggcaacaacagcaacaacaacaaaatcaatgtattctttggaaagtcattccaacatcagtttctcgcatttcacctacatacggag

SEQ ID NO: 22026 - DNA, 2670 bp, Zea Mays
cggaggagacgaggggcgccggacgcaaacaccagcacaggagcggcgagtcggaatcgccggacgtggagcaggcgactcgaggctccgagggtgtccgcgtggcgaacaacgagcggacgtagtagttgcggtagatgcccagccccgttccggcatgcactccggccgacgcgtctcttcccaatcccacgacgacgagacggcgtgcagcgaccagcgagcgagtgcaagaagctcctgttcgatcgatctcgggagctccgatactgcgcgcaatcccaaatttgacacagagtcacagcaatgtcagtgagccatgccgacgagcacgagatatctctgtgcgaccccagctccgaggacgaccggcggcgccggaagatcgggtccctgccgctcaaggctatccacgcgctacggaagaagcgcgcccggcgtcgcgtcactgacttccggttccccgcggccatctccatcgaggacgtccgcgacgccgaagaggagcgcgccgtcgccgccttccgcgaccgtctcgccgcgcaccgcctcctccccgacaagcacgacgactaccacatgatgctgaggtttcttaaagcaaggaagttcgattccgacaaggcaatgcaaatgtggtcagagatgctgaggtggaggaaagagtttggtaccgacacaatcttggaggactttgagttcgacgagctcaacgatgtactccactactatcctcagggctaccatggcgtcgaccgtgaaggccggcccgtgtacattgagaggctcggcaaagttgatccgaacaagctcatgcagatcacctcggtggatcgctacatcaagtaccatgtgcaggagttcgagagggccttcagggagaggttccctgcctgcacactgtcagccaagaggcacattgactccactaccactatactggacgtccatggtgtggggttcaagaatttctcaaagaccgcaagggagcttgtccaacgtatgcagagaatagacagtgactactaccctgagacgctacatcagatgtatgttgtgaatgcaggcagtgggtttaagttgatctggaacagtgttaagggattcctagacccaaaaacttcttccaagatccatgttcttggttccaactaccagagcagacttatcgaagttattgactcaagtgaattgccaaaatttcttggcggatcatgcacatgcagtgagaagggtggttgcctcaggtctaacaggggtccatggaatgaccctgtcatcatgaagctaatacacagtatggaaggtggtagtactagagaaataaagcaagtttctgacggggacgaaagaagtggctcttccctaagggcagaaaacctgaagggcatgcttagtgacatatcaaatgctgaatctgagtcggatgttgatgacgttggtttaacagttgtccaaaagagtacggaccacagtttactaaccccagttcatgaagaagtcaaggggtcagatacttcgatattttgtagttctagcagtaagcatctcctagatacaactcctggagctcctcaggccacccctcaaatggagatgcccattcagttgacttgccgtaaatattttcctacctttgggtggctaaataatttagggaatgcttacattagtttgcatggtacatccgctggaaggactctggaaaaccttgctaccggactgatcacactcttgatcaggatatcatctttcttccacctttccgtctaccggcaagaaagatttatagaaaccgtccaaccctgtgccgcggcacaggaaccagaacctcaaagggaagaggacatgagtgcttgtttacgacgcctcaagaagctcgagtcactgtgtgatcacctcatgagcaaacctccggatatgccgaaggagaaagaacttgtattgatgcagtccttcgatcggataaaatccctcgaggctgaactggaggcgacgaaaaacgcgctgcaggctgcggtggaaaagcagatggaactggtggagacggtagaagctctgcagcaccaatcgaccagcgttaggaggagattttgctgttcataggagtagggttgtcgtcgtcgcgccgaagctgtctgggttagcaaataatgaacctgacgctgcccttggcatcttgtttttgctcgacttctgaagcgtcatgacgccaaacctgtcgctggctcggcacactgtatgcgcggatgcgtgtgaaatcgatcattttttttgtagctacactctggcttctgtgatctccagagcttgcaaaatgtcaaagctttcgctgccctactgctgcgtattgttgagccgtgtcatttgcccttggcatttcgaaccatccatagcgctagctatttttgaccgctcccctcccatttgagttcttgatcgactcccgcccgcgtgcaccggcgccaacctctgcccacgcggccgcgcccctccgcctccgcgtgtcactcccgcacgtttctgctcgcctggtagtaacccgaacgcgcattgccgcgccgtcaagggtcgatccgatcggggaggaggcgtgacaagagatgggtccccacggaggcattgcgctccgcgcagccgtactcgccgccgtccgcttcgccgccgccg

SEQ ID NO: 22027 - DNA, 2966 bp, Zea Mays
gcactccggccgacgcgtctcttcccaatcccacgacgacgagacggcgtgcagcctcgactccgtaaagaattctgacatcggagtggcacggcgtggcctgccgttggttcagcagcggcccgtgaccgcaagcaaacgaaacgagacgccttttttagtccgagctccggcgtgtctctctgaggagtgaggacgaagaggccccaccgtcacgtacgcctgcatgtgtccacgagtcaccgcaccggcacatagttgtcttgttgttgtacacgacgcacgcatccccgccccgccctcggccctggtgcatataaacaagtgttgcgtgatcggcggccaggccactgccccttccagtctcgccgtcgccggagataggccgccgccgccagccggaacgcaacaccgcagcggttacctgcagcggacggcaggaacctagtcctccactgctctgcctaccctacaatcgggatctcgcgggcttcattaggggggaaaatcgaccagcgagcgagtgcaagaagctcctgttcgatcgatctcgggagctccgatactgcgcgcaatcccaaatttgacacagagtcacagcaatgtcagtgagccatgccgacgagcacgagatatctctgtgcgaccccagctccgaggacgaccggcggcgccggaagatcgggtccctgccgctcaaggctatccacgcgctacggaagaagcgcgcccggcgtcgcgtcactgacttccggttccccgcggccatctccatcgaggacgtccgcgacgccgaagaggagcgcgccgtcgccgccttccgcgaccgtctcgccgcgcaccgcctcctccccgacaagcacgacgactaccacatgatgctgaggtttcttaaagcaaggaagttcgattccgacaaggcaatgcaaatgtggtcagagatgctgaggtggaggaaagagtttggtaccgacacaatcttggaggactttgagttcgacgagctcaacgatgtactccactactatcctcagggctaccatggcgtcgaccgtgaaggccggcccgtgtacattgagaggctcggcaaagttgatccgaacaagctcatgcagatcacctcggtggatcgctacatcaagtaccatgtgcaggagttcgagagggccttcagggagaggttccctgcctgcacactgtcagccaagaggcacattgactccactaccactatactggacgtccatggtgtggggttcaagaatttctcaaagaccgcaagggagcttgtccaacgtatgcagagaatagacagtgactactaccctgagacgctacatcagatgtatgttgtgaatgcaggcagtgggtttaagttgatctggaacagtgttaagggattcctagacccaaaaacttcttccaagatccatgttcttggttccaactaccagagcagacttatcgaagttattgactcaagtgaattgccaaaatttcttggcggatcatgcacatgcagtgagaagggtggttgcctcaggtctaacaggggtccatggaatgaccctgtcatcatgaagctaatacacagtatggaaggtggtagtactagagaaataaagcaagtttctgacggggacgaaagaagtggctcttccctaagggcagaaaacctgaagggcatgcttagtgacatatcaaatgctgaatctgagtcggatgttgatgacgttggtttaacagttgtccaaaagagtacggaccacagtttactaaccccagttcatgaagaagtcaaggggtcagatacttcgatattttgtagttctagcagtaagcatctcctagatacaactcctggagctcctcaggccacccctcaaatggagatgcccattcagttgacttgccgtaaatattttcctacctttgggtggctaaataatttagggaatgcttacattagtttgcatggtacatccgctggaaggactctggaaaaccttgctaccggactgatcacactcttgatcaggatatcatctttcttccacctttccgtctaccggcaagaaagatttatagaaaccgtccaaccctgtgccgcggcacaggaaccagaacctcaaagggaagaggacatgagtgcttgtttacgacgcctcaagaagctcgagtcactgtgtgatcacctcatgagcaaacctccggatatgccgaaggagaaagaacttgtattgatgcagtccttcgatcggataaaatccctcgaggctgaactggaggcgacgaaaaacgcgctgcaggctgcggtggaaaagcagatggaactggtggagacggtagaagctctgcagcaccaatcgaccagcgttaggaggagattttgctgttcataggagtagggttgtcgtcgtcgcgccgaagctgtctgggttagcaaataatgaacctgacgctgcccttggcatcttgtttttgctcgacttctgaagcgtcatgacgccaaacctgtcgctggctcggcacactgtatgcgcggatgcgtgtgaaatcgatcattttttttgtagctacactctggcttctgtgatctccagagcttgcaaaatgtcaaagctttcgctgccctactgctgcgtattgttgagccgtgtcatttgcccttggcatttcgaaccatccatagcgctagctatttttgaccgctcccctcccatttgagttcttgatcgactcccgcccgcgtgcaccggcgccaacctctgcccacgcggccgcgcccctccgcctccgcgtgtcactcccgcacgtttctgctcgcctggtagtaacccgaacgcgcattgccgcgccgtcaagggtcgatccgatcggggaggaggcgtgacaagagatgggtccccacggaggcattgcgctccgcgcagccgtactcgccgccgtccgcttcgccgccgccg

SEQ ID NO: 22028 - DNA, 2770 bp, Zea Mays
agctccggcgtgtctctctgaggagtgaggacgaagaggccccaccgtcacgtacgcctgcatgtgtccacgagtcaccgcaccggcacatagttgtcttgttgttgtacacgacgcacgcatccccgccccgccctcggccctggtgcatataaacaagtgttgcgtgatcggcggccaggccactgccccttccagtctcgccgtcgccggagataggccgccgccgccagccggaacgcaacaccgcagcggttacctgcagcggacggcaggaacctagtcctccactgctctgcctaccctacaatcgggatctcgcgggcttcattaggggggaaaatcgaccagcgagcgagtgcaagaagctcctgttcgatcgatctcgggagctccgatactgcgcgcaatcccaaatttgacacagagtcacagcaatgtcagtgagccatgccgacgagcacgagatatctctgtgcgaccccagctccgaggacgaccggcggcgccggaagatcgggtccctgccgctcaaggctatccacgcgctacggaagaagcgcgcccggcgtcgcgtcactgacttccggttccccgcggccatctccatcgaggacgtccgcgacgccgaagaggagcgcgccgtcgccgccttccgcgaccgtctcgccgcgcaccgcctcctccccgacaagcacgacgactaccacatgatgctgaggtttcttaaagcaaggaagttcgattccgacaaggcaatgcaaatgtggtcagagatgctgaggtggaggaaagagtttggtaccgacacaatcttggaggactttgagttcgacgagctcaacgatgtactccactactatcctcagggctaccatggcgtcgaccgtgaaggccggcccgtgtacattgagaggctcggcaaagttgatccgaacaagctcatgcagatcacctcggtggatcgctacatcaagtaccatgtgcaggagttcgagagggccttcagggagaggttccctgcctgcacactgtcagccaagaggcacattgactccactaccactatactggacgtccatggtgtggggttcaagaatttctcaaagaccgcaagggagcttgtccaacgtatgcagagaatagacagtgactactaccctgaggcagtgggtttaagttgatctggaacagtgttaagggattcctagacccaaaaacttcttccaagatccatgttcttggttccaactaccagagcagacttatcgaagttattgactcaagtgaattgccaaaatttcttggcggatcatgcacatgcagtgagaagggtggttgcctcaggtctaacaggggtccatggaatgaccctgtcatcatgaagctaatacacagtatggaaggtggtagtactagagaaataaagcaagtttctgacggggacgaaagaagtggctcttccctaagggcagaaaacctgaagggcatgcttagtgacatatcaaatgctgaatctgagtcggatgttgatgacgttggtttaacagttgtccaaaagagtacggaccacagtttactaaccccagttcatgaagaagtcaaggggtcagatacttcgatattttgtagttctagcagtaagcatctcctagatacaactcctggagctcctcaggccacccctcaaatggagatgcccattcagttgacttgccgtaaatattttcctacctttgggtggctaaataatttagggaatgcttacattagtttgcatggtacatccgctggaaggactctggaaaaccttgctaccggactgatcacactcttgatcaggatatcatctttcttccacctttccgtctaccggcaagaaagatttatagaaaccgtccaaccctgtgccgcggcacaggaaccagaacctcaaagggaagaggacatgagtgcttgtttacgacgcctcaagaagctcgagtcactgtgtgatcacctcatgagcaaacctccggatatgccgaaggagaaagaacttgtattgatgcagtccttcgatcggataaaatccctcgaggctgaactggaggcgacgaaaaacgcgctgcaggctgcggtggaaaagcagatggaactggtggagacggtagaagctctgcagcaccaatcgaccagcgttaggaggagattttgctgttcataggagtagggttgtcgtcgtcgcgccgaagctgtctgggttagcaaataatgaacctgacgctgcccttggcatcttgtttttgctcgacttctgaagcgtcatgacgccaaacctgtcgctggctcggcacactgtatgcgcggatgcgtgtgaaatcgatcattttttttgtagctacactctggcttctgtgatctccagagcttgcaaaatgtcaaagctttcgctgccctactgctgcgtattgttgagccgtgtcatttgcccttggcatttcgaaccatccatagcgctagctatttttgaccgctcccctcccatttgagttcttgatcgactcccgcccgcgtgcaccggcgccaacctctgcccacgcggccgcgcccctccgcctccgcgtgtcactcccgcacgtttctgctcgcctggtagtaacccgaacgcgcattgccgcgccgtcaagggtcgatccgatcggggaggaggcgtgacaagagatgggtccccacggaggcattgcgctccgcgcagccgtactcgccgccgtccgcttcgccgccgccg

SEQ ID NO: 22029 - DNA, 2799 bp, Zea Mays
agctccggcgtgtctctctgaggagtgaggacgaagaggccccaccgtcacgtacgcctgcatgtgtccacgagtcaccgcaccggcacatagttgtcttgttgttgtacacgacgcacgcatccccgccccgccctcggccctggtgcatataaacaagtgttgcgtgatcggcggccaggccactgccccttccagtctcgccgtcgccggagataggccgccgccgccagccggaacgcaacaccgcagcggttacctgcagcggacggcaggaacctagtcctccactgctctgcctaccctacaatcgggatctcgcgggcttcattaggggggaaaatcgaccagcgagcgagtgcaagaagctcctgttcgatcgatctcgggagctccgatactgcgcgcaatcccaaatttgacacagagtcacagcaatgtcagtgagccatgccgacgagcacgagatatctctgtgcgaccccagctccgaggacgaccggcggcgccggaagatcgggtccctgccgctcaaggctatccacgcgctacggaagaagcgcgcccggcgtcgcgtcactgacttccggttccccgcggccatctccatcgaggacgtccgcgacgccgaagaggagcgcgccgtcgccgccttccgcgaccgtctcgccgcgcaccgcctcctccccgacaagcacgacgactaccacatgatgctgaggtttcttaaagcaaggaagttcgattccgacaaggcaatgcaaatgtggtcagagatgctgaggtggaggaaagagtttggtaccgacacaatcttggagggctaccatggcgtcgaccgtgaaggccggcccgtgtacattgagaggctcggcaaagttgatccgaacaagctcatgcagatcacctcggtggatcgctacatcaagtaccatgtgcaggagttcgagagggccttcagggagaggttccctgcctgcacactgtcagccaagaggcacattgactccactaccactatactggacgtccatggtgtggggttcaagaatttctcaaagaccgcaagggagcttgtccaacgtatgcagagaatagacagtgactactaccctgagacgctacatcagatgtatgttgtgaatgcaggcagtgggtttaagttgatctggaacagtgttaagggattcctagacccaaaaacttcttccaagatccatgttcttggttccaactaccagagcagacttatcgaagttattgactcaagtgaattgccaaaatttcttggcggatcatgcacatgcagtgagaagggtggttgcctcaggtctaacaggggtccatggaatgaccctgtcatcatgaaggagagatatttgctttcagttcctcttcaggcatgaaagggtatgaaaatccttctatggactaacagaaattttcatttgtagctaatacacagtatggaaggtggtagtactagagaaataaagcaagtttctgacggggacgaaagaagtggctcttccctaagggcagaaaacctgaagggcatgcttagtgacatatcaaatgctgaatctgagtcggatgttgatgacgttggtttaacagttgtccaaaagagtcaaggggtcagatacttcgatattttgtagttctagcagtaagcatctcctagatacaactcctggagctcctcaggccacccctcaaatggagatgcccattcagttgacttgccgtaaatattttcctacctttgggtggctaaataatttagggaatgcttacattagtttgcatggtacatccgctggaaggactctggaaaaccttgctaccggactgatcacactcttgatcaggatatcatctttcttccacctttccgtctaccggcaagaaagatttatagaaaccgtccaaccctgtgccgcggcacaggaaccagaacctcaaagggaagaggacatgagtgcttgtttacgacgcctcaagaagctcgagtcactgtgtgatcacctcatgagcaaacctccggatatgccgaaggagaaagaacttgtattgatgcagtccttcgatcggataaaatccctcgaggctgaactggaggcgacgaaaaacgcgctgcaggctgcggtggaaaagcagatggaactggtggagacggtagaagctctgcagcaccaatcgaccagcgttaggaggagattttgctgttcataggagtagggttgtcgtcgtcgcgccgaagctgtctgggttagcaaataatgaacctgacgctgcccttggcatcttgtttttgctcgacttctgaagcgtcatgacgccaaacctgtcgctggctcggcacactgtatgcgcggatgcgtgtgaaatcgatcattttttttgtagctacactctggcttctgtgatctccagagcttgcaaaatgtcaaagctttcgctgccctactgctgcgtattgttgagccgtgtcatttgcccttggcatttcgaaccatccatagcgctagctatttttgaccgctcccctcccatttgagttcttgatcgactcccgcccgcgtgcaccggcgccaacctctgcccacgcggccgcgcccctccgcctccgcgtgtcactcccgcacgtttctgctcgcctggtagtaacccgaacgcgcattgccgcgccgtcaagggtcgatccgatcggggaggaggcgtgacaagagatgggtccccacggaggcattgcgctccgcgcagccgtactcgccgccgtccgcttcgccgccgccg

SEQ ID NO: 22030 - DNA, 2539 bp, Zea Mays
ccgttttatgcttttgttttcatggatgtacctttgtcctaccaaggaccgtgctacaaagactgttttttttcttcttcgtcgaccagcgagcgagtgcaagaagctcctgttcgatcgatctcgggagctccgatactgcgcgcaatcccaaatttgacacagagtcacagcaatgtcagtgagccatgccgacgagcacgagatatctctgtgcgaccccagctccgaggacgaccggcggcgccggaagatcgggtccctgccgctcaaggctatccacgcgctacggaagaagcgcgcccggcgtcgcgtcactgacttccggttccccgcggccatctccatcgaggacgtccgcgacgccgaagaggagcgcgccgtcgccgccttccgcgaccgtctcgccgcgcaccgcctcctccccgacaagcacgacgactaccacatgatgctgaggtttcttaaagcaaggaagttcgattccgacaaggcaatgcaaatgtggtcagagatgctgaggtggaggaaagagtttggtaccgacacaatcttggaggactttgagttcgacgagctcaacgatgtactccactactatcctcagggctaccatggcgtcgaccgtgaaggccggcccgtgtacattgagaggctcggcaaagttgatccgaacaagctcatgcagatcacctcggtggatcgctacatcaagtaccatgtgcaggagttcgagagggccttcagggagaggttccctgcctgcacactgtcagccaagaggcacattgactccactaccactatactggacgtccatggtgtggggttcaagaatttctcaaagaccgcaagggagcttgtccaacgtatgcagagaatagacagtgactactaccctgagacgctacatcagatgtatgttgtgaatgcaggcagtgggtttaagttgatctggaacagtgttaagggattcctagacccaaaaacttcttccaagatccatgttcttggttccaactaccagagcagacttatcgaagttattgactcaagtgaattgccaaaatttcttggcggatcatgcacatgcagtgagaagggtggttgcctcaggtctaacaggggtccatggaatgaccctgtcatcatgaagctaatacacagtatggaaggtggtagtactagagaaataaagcaagtttctgacggggacgaaagaagtggctcttccctaagggcagaaaacctgaagggcatgcttagtgacatatcaaatgctgaatctgagtcggatgttgatgacgttggtttaacagttgtccaaaagagtacggaccacagtttactaaccccagttcatgaagaagtcaaggggtcagatacttcgatattttgtagttctagcagtaagcatctcctagatacaactcctggagctcctcaggccacccctcaaatggagatgcccattcagttgacttgccgtaaatattttcctacctttgggtggctaaataatttagggaatgcttacattagtttgcatggtacatccgctggaaggactctggaaaaccttgctaccggactgatcacactcttgatcaggatatcatctttcttccacctttccgtctaccggcaagaaagatttatagaaaccgtccaaccctgtgccgcggcacaggaaccagaacctcaaagggaagaggacatgagtgcttgtttacgacgcctcaagaagctcgagtcactgtgtgatcacctcatgagcaaacctccggatatgccgaaggagaaagaacttgtattgatgcagtccttcgatcggataaaatccctcgaggctgaactggaggcgacgaaaaacgcgctgcaggctgcggtggaaaagcagatggaactggtggagacggtagaagctctgcagcaccaatcgaccagcgttaggaggagattttgctgttcataggagtagggttgtcgtcgtcgcgccgaagctgtctgggttagcaaataatgaacctgacgctgcccttggcatcttgtttttgctcgacttctgaagcgtcatgacgccaaacctgtcgctggctcggcacactgtatgcgcggatgcgtgtgaaatcgatcattttttttgtagctacactctggcttctgtgatctccagagcttgcaaaatgtcaaagctttcgctgccctactgctgcgtattgttgagccgtgtcatttgcccttggcatttcgaaccatccatagcgctagctatttttgaccgctcccctcccatttgagttcttgatcgactcccgcccgcgtgcaccggcgccaacctctgcccacgcggccgcgcccctccgcctccgcgtgtcactcccgcacgtttctgctcgcctggtagtaacccgaacgcgcattgccgcgccgtcaagggtcgatccgatcggggaggaggcgtgacaagagatgggtccccacggaggcattgcgctccgcgcagccgtactcgccgccgtccgcttcgccgccgccg

SEQ ID NO: 22031 - DNA, 2486 bp, Zea Mays
gtacctttgtcctaccaaggaccgtgctacaaagactgttttttttcttcttcgtcgaccagcgagcgagtgcaagaagctcctgttcgatcgatctcgggagctccgatactgcgcgcaatcccaaatttgacacagagtcacagcaatgtcagtgagccatgccgacgagcacgagatatctctgtgcgaccccagctccgaggacgaccggcggcgccggaagatcgggtccctgccgctcaaggctatccacgcgctacggaagaagcgcgcccggcgtcgcgtcactgacttccggttccccgcggccatctccatcgaggacgtccgcgacgccgaagaggagcgcgccgtcgccgccttccgcgaccgtctcgccgcgcaccgcctcctccccgacaagcacgacgactaccacatgatgctgaggtttcttaaagcaaggaagttcgattccgacaaggcaatgcaaatgtggtcagagatgctgaggtggaggaaagagtttggtaccgacacaatcttggaggactttgagttcgacgagctcaacgatgtactccactactatcctcagggctaccatggcgtcgaccgtgaaggccggcccgtgtacattgagaggctcggcaaagttgatccgaacaagctcatgcagatcacctcggtggatcgctacatcaagtaccatgtgcaggagttcgagagggccttcagggagaggttccctgcctgcacactgtcagccaagaggcacattgactccactaccactatactggacgtccatggtgtggggttcaagaatttctcaaagaccgcaagggagcttgtccaacgtatgcagagaatagacagtgactactaccctgaggcagtgggtttaagttgatctggaacagtgttaagggattcctagacccaaaaacttcttccaagatccatgttcttggttccaactaccagagcagacttatcgaagttattgactcaagtgaattgccaaaatttcttggcggatcatgcacatgcagtgagaagggtggttgcctcaggtctaacaggggtccatggaatgaccctgtcatcatgaagctaatacacagtatggaaggtggtagtactagagaaataaagcaagtttctgacggggacgaaagaagtggctcttccctaagggcagaaaacctgaaggcaagggcatgcttagtgacatatcaaatgctgaatctgagtcggatgttgatgacgttggtttaacagttgtccaaaagagtacggaccacagtttactaaccccagttcatgaagaagtcaaggggtcagatacttcgatattttgtagttctagcagtaagcatctcctagatacaactcctggagctcctcaggccacccctcaaatggagatgcccattcagttgacttgccgtaaatattttcctacctttgggtggctaaataatttagggaatgcttacattagtttgcatggtacatccgctggaaggactctggaaaaccttgctaccggactgatcacactcttgatcaggatatcatctttcttccacctttccgtctaccggcaagaaagatttatagaaaccgtccaaccctgtgccgcggcacaggaaccagaacctcaaagggaagaggacatgagtgcttgtttacgacgcctcaagaagctcgagtcactgtgtgatcacctcatgagcaaacctccggatatgccgaaggagaaagaacttgtattgatgcagtccttcgatcggataaaatccctcgaggctgaactggaggcgacgaaaaacgcgctgcaggctgcggtggaaaagcagatggaactggtggagacggtagaagctctgcagcaccaatcgaccagcgttaggaggagattttgctgttcataggagtagggttgtcgtcgtcgcgccgaagctgtctgggttagcaaataatgaacctgacgctgcccttggcatcttgtttttgctcgacttctgaagcgtcatgacgccaaacctgtcgctggctcggcacactgtatgcgcggatgcgtgtgaaatcgatcattttttttgtagctacactctggcttctgtgatctccagagcttgcaaaatgtcaaagctttcgctgccctactgctgcgtattgttgagccgtgtcatttgcccttggcatttcgaaccatccatagcgctagctatttttgaccgctcccctcccatttgagttcttgatcgactcccgcccgcgtgcaccggcgccaacctctgcccacgcggccgcgcccctccgcctccgcgtgtcactcccgcacgtttctgctcgcctggtagtaacccgaacgcgcattgccgcgccgtcaagggtcgatccgatcggggaggaggcgtgacaagagatgggtccccacggaggcattgcgctccgcgcagccgtactcgccgccgtccgcttcgccgccgccg

SEQ ID NO: 22032 - DNA, 2494 bp, Zea Mays
gtgctacaaagactgttttttttcttcttcgtcgaccagcgagcgagtgcaagaagctcctgttcgatcgatctcgggagctccgatactgcgcgcaatcccaaatttgacacagagtcacagcaatgtcagtgagccatgccgacgagcacgagatatctctgtgcgaccccagctccgaggacgaccggcggcgccggaagatcgggtccctgccgctcaaggctatccacgcgctacggaagaagcgcgcccggcgtcgcgtcactgacttccggttccccgcggccatctccatcgaggacgtccgcgacgccgaagaggagcgcgccgtcgccgccttccgcgaccgtctcgccgcgcaccgcctcctccccgacaagcacgacgactaccacatgatgctgaggtttcttaaagcaaggaagttcgattccgacaaggcaatgcaaatgtggtcagagatgctgaggtggaggaaagagtttggtaccgacacaatcttggaggactttgagttcgacgagctcaacgatgtactccactactatcctcagggctaccatggcgtcgaccgtgaaggccggcccgtgtacattgagaggctcggcaaagttgatccgaacaagctcatgcagatcacctcggtggatcgctacatcaagtaccatgtgcaggagttcgagagggccttcagggagaggttccctgcctgcacactgtcagccaagaggcacattgactccactaccactatactggacgtccatggtgtggggttcaagaatttctcaaagaccgcaagggagcttgtccaacgtatgcagagaatagacagtgactactaccctgagacgctacatcagatgtatgttgtgaatgcaggcagtgggtttaagttgatctggaacagtgttaagggattcctagacccaaaaacttcttccaagatccatgttcttggttccaactaccagagcagacttatcgaagttattgactcaagtgaattgccaaaatttcttggcggatcatgcacatgcagtgagaagggtggttgcctcaggtctaacaggggtccatggaatgaccctgtcatcatgaagctaatacacagtatggaaggtggtagtactagagaaataaagcaagtttctgacggggacgaaagaagtggctcttccctaagggcagaaaacctgaaggcaagggcatgcttagtgacatatcaaatgctgaatctgagtcggatgttgatgacgttggtttaacagttgtccaaaagagtacggaccacagtttactaaccccagttcatgaagaagtcaaggggtcagatacttcgatattttgtagttctagcagtaagcatctcctagatacaactcctggagctcctcaggccacccctcaaatggagatgcccattcagttgacttgccgtaaatattttcctacctttgggtggctaaataatttagggaatgcttacattagtttgcatggtacatccgctggaaggactctggaaaaccttgctaccggactgatcacactcttgatcaggatatcatctttcttccacctttccgtctaccggcaagaaagatttatagaaaccgtccaaccctgtgccgcggcacaggaaccagaacctcaaagggaagaggacatgagtgcttgtttacgacgcctcaagaagctcgagtcactgtgtgatcacctcatgagcaaacctccggatatgccgaaggagaaagaacttgtattgatgcagtccttcgatcggataaaatccctcgaggctgaactggaggcgacgaaaaacgcgctgcaggctgcggtggaaaagcagatggaactggtggagacggtagaagctctgcagcaccaatcgaccagcgttaggaggagattttgctgttcataggagtagggttgtcgtcgtcgcgccgaagctgtctgggttagcaaataatgaacctgacgctgcccttggcatcttgtttttgctcgacttctgaagcgtcatgacgccaaacctgtcgctggctcggcacactgtatgcgcggatgcgtgtgaaatcgatcattttttttgtagctacactctggcttctgtgatctccagagcttgcaaaatgtcaaagctttcgctgccctactgctgcgtattgttgagccgtgtcatttgcccttggcatttcgaaccatccatagcgctagctatttttgaccgctcccctcccatttgagttcttgatcgactcccgcccgcgtgcaccggcgccaacctctgcccacgcggccgcgcccctccgcctccgcgtgtcactcccgcacgtttctgctcgcctggtagtaacccgaacgcgcattgccgcgccgtcaagggtcgatccgatcggggaggaggcgtgacaagagatgggtccccacggaggcattgcgctccgcgcagccgtactcgccgccgtccgcttcgccgccgccg

SEQ ID NO: 22033 - DNA, 2855 bp, Zea Mays
ggaaaaccctccatacttggtgggcctgaaagaacgcaaggccaatggccacatgcgagtagccaatggccccaaggccgaaatggcagccactgcaacgaacgagtcaatgctccagactcgccggcttctaggcccatttcgaaccttccggaagcgcggcacggaataaatactccgctacccctaacctcactccccctctcgatccggaaacctctcaaaccctagccgcctcctgcaagtttcagagctcaggaatctgcgccatggcgagtgagacggagaccttcgcatttcaggctgagatcaaccagctgctctcactcatcatcaacaccttctactccaacaaggagatcttcctccgcgagcttatctccaactcttccgatgcgctggacaagatcaggttcgagagtctcactgacaagagcaagctcgatgcgcagcctgagcttttcatccaccttgtcccagacaaggccacgaacacgctctccatcatcgacagcggcatcggcatgaccaagtccgaccttgtcaacaacctcggtaccatcgccagttcggcgtcggtttctactctgcctacctcgtcgccgatagagttgtcgtgaccaccaagcacaacgatgacgagcagtacgtgtgggagtcccaagcgggcgggtcgttcactgttactcgtgacacgtcaggggagcagcttggcaggggcactaagatcacactgttccttaaggacgatcagctggagtaccttgaggagcgtcgcctcaaggatctggtcaagaagcactctgagttcatcagctaccccatctccctgtggactgaaaagacaacagagaaggaaatttctgacgacgaagacgaggaagagaagaaagatgctgaggaaggaaaggttgaggatgttgatgagaaggaagagaaagaaaagaagaaaaagaagatcaaggaggtttctcatgagtggtcattggtcaacaagcagaagcccatatggatgaggaagccagaagaaatcacaaaagaagaatatgctgccttctataagagcttgacaaatgactgggaggagcatctggctgtgaagcacttctctgtggagggtcaactggagttcaaggctgttctctttgttcctaagagggccccctttgatctctttgacaccaagaagaagcaaaacaacatcaagctctatgtgcgcagggtgttcatcatggacaactgcgaagagctgatccctgagtggctgagcttcgttaagggtattgttgactctgaggaccttcccctcaatatctctcgtgagactcttcagcagaacaagatcctgaaggtgatcaggaagaaccttgtgaagaagtgtgttgagctcttctttgagattgctgagaacaaggaggactacaacaagttttacgaggctttctccaagaacctcaagcttggcatccacgaggactcgcagaacaggaccaagatcgccgagcttctgagataccactccaccaagagtggtgatgagctgaccagcctcaaggactacgtgaccaggatgaaggagggacagaatgacatatactatatcactggtgagagcaagaaggcagtggagaactcccccttccttgagaagctgaagaagaggggctatgaggttctgtacatggttgatgccattgacgagtatgctgttggtcagctcaaggagtttgagggcaagaagcttgtctctgccaccaaggagggtctgaagcttgatgagactgaggacgagaagaagaggaaggaggagctgaaggagaagtttgaggggctgtgcaaggtcatcaaggaggttctgggtgacaaagttgagaaggtggtggtgtctgatcgcgttgtggactcaccgtgctgccttgtgactggcgagtatggctggaccgccaacatggagaggatcatgaaggcacaggccctgagggactcgagcatggcgggctacatgtcgagcaaaaagacaatggagatcaacccagagaaccctatcatggatgagctccgcaagcgtgccgaggctgacaagaatgacaagtcagtcaaggatctcgtgatgctgctgttcgagactgctctcctgacctccggcttcagcctggatgaccccaacaccttcggcaaccggatccaccgcatgctcaaactcggtctgagcatcgatgaggacgagcctgttgaggcagaggctgagatgcctcagcttgaggacgacgctggtgaaagcaagatggaggaggtcgactaagtgtcgcatcgcatgcttgccgtttatcttatccctagctaagctacctgtgatagcttaattttcactattgttcgaggtttttggcacgttatcggttgtcctgctggccaggctataagtctggtttatctgttatgtttaccctttttaacagtttgtcgttattattcgtaatggtaaaaatgtagtacatgttttgcccattgggttgtgtgagattgggacagacagatcagggtactacccctttttctctttgggtagcccatagtttgagtagtggtgaaaaaagaatggttaggattttaggcatgttgtagcaaatcggctatgccaggaaatgaaactggtttcgtttcccaattaaaccgaaatattataattcaactagaagagataggataaactgaagtgttataattcggcttagaggagataagttcatatttactctctgaagaaaactttataaaaatttcacagtgaggtaccagttttttcggcggccagcggccttctccagtggtagaaaaaaacacataccttgtcc

SEQ ID NO: 22034 - DNA, 2862 bp, Zea Mays
ggaaaaccctccatacttggtgggcctgaaagaacgcaaggccaatggccacatgcgagtagccaatggccccaaggccgaaatggcagccactgcaacgaacgagtcaatgctccagactcgccggcttctaggcccatttcgaaccttccggaagcgcggcacggaataaatactccgctacccctaacctcactccccctctcgatccggaaacctctcaaaccctagccgcctcctgcaagtttcagagctcaggaatctgcgccatggcgagtgagacggagaccttcgcatttcaggctgagatcaaccagctgctctcactcatcatcaacaccttctactccaacaaggagatcttcctccgcgagcttatctccaactcttccgatcctgagcttttcatccaccttgtcccagacaaggccacgaacacgctctccatcatcgacagcggcatcggcatgaccaagtccgaccttgtcaacaacctcggtaccatcgccaggtccgggacgaaggagttcatggaagctcttgctgccggcgctgatgtgtccatgattggccagttcggcgtcggtttctactctgcctacctcgtcgccgatagagttgtcgtgaccaccaagcacaacgatgacgagcagtacgtgtgggagtcccaagcgggcgggtcgttcactgttactcgtgacacgtcaggggagcagcttggcaggggcactaagatcacactgttccttaaggacgatcagctggagtaccttgaggagcgtcgcctcaaggatctggtcaagaagcactctgagttcatcagctaccccatctccctgtggactgaaaagacaacagagaaggaaatttctgacgacgaagacgaggaagagaagaaagatgctgaggaaggaaaggttgaggatgttgatgagaaggaagagaaagaaaagaagaaaaagaagatcaaggaggtttctcatgagtggtcattggtcaacaagcagaagcccatatggatgaggaagccagaagaaatcacaaaagaagaatatgctgccttctataagagcttgacaaatgactgggaggagcatctggctgtgaagcacttctctgtggagggtcaactggagttcaaggctgttctctttgttcctaagagggccccctttgatctctttgacaccaagaagaagcaaaacaacatcaagctctatgtgcgcagggtgttcatcatggacaactgcgaagagctgatccctgagtggctgagcttcgttaagggtattgttgactctgaggaccttcccctcaatatctctcgtgagactcttcagcagaacaagatcctgaaggtgatcaggaagaaccttgtgaagaagtgtgttgagctcttctttgagattgctgagaacaaggaggactacaacaagttttacgaggctttctccaagaacctcaagcttggcatccacgaggactcgcagaacaggaccaagatcgccgagcttctgagataccactccaccaagagtggtgatgagctgaccagcctcaaggactacgtgaccaggatgaaggagggacagaatgacatatactatatcactggtgagagcaagaaggcagtggagaactcccccttccttgagaagctgaagaagaggggctatgaggttctgtacatggttgatgccattgacgagtatgctgttggtcagctcaaggagtttgagggcaagaagcttgtctctgccaccaaggagggtctgaagcttgatgagactgaggacgagaagaagaggaaggaggagctgaaggagaagtttgaggggctgtgcaaggtcatcaaggaggttctgggtgacaaagttgagaaggtggtggtgtctgatcgcgttgtggactcaccgtgctgccttgtgactggcgagtatggctggaccgccaacatggagaggatcatgaaggcacaggccctgagggactcgagcatggcgggctacatgtcgagcaaaaagacaatggagatcaacccagagaaccctatcatggatgagctccgcaagcgtgccgaggctgacaagaatgacaagtcagtcaaggatctcgtgatgctgctgttcgagactgctctcctgacctccggcttcagcctggatgaccccaacaccttcggcaaccggatccaccgcatgctcaaactcggtctgagcatcgatgaggacgagcctgttgaggcagaggctgagatgcctcagcttgaggacgacgctggtgaaagcaagatggaggaggtcgactaagtgtcgcatcgcatgcttgccgtttatcttatccctagctaagctacctgtgatagcttaattttcactattgttcgaggtttttggcacgttatcggttgtcctgctggccaggctataagtctggtttatctgttatgtttaccctttttaacagtttgtcgttattattcgtaatggtaaaaatgtagtacatgttttgcccattgggttgtgtgagattgggacagacagatcagggtactacccctttttctctttgggtagcccatagtttgagtagtggtgaaaaaagaatggttaggattttaggcatgttgtagcaaatcggctatgccaggaaatgaaactggtttcgtttcccaattaaaccgaaatattataattcaactagaagagataggataaactgaagtgttataattcggcttagaggagataagttcatatttactctctgaagaaaactttataaaaatttcacagtgaggtaccagttttttcggcggccagcggccttctccagtggtagaaaaaaacacataccttgtcc

SEQ ID NO: 22035 - DNA, 2694 bp, Zea Mays
ggaaaaccctccatacttggtgggcctgaaagaacgcaaggccaatggccacatgcgagtagccaatggccccaaggccgaaatggcagccactgcaacgaacgagtcaatgctccagactcgccggcttctaggcccatttcgaaccttccggaagcgcggcacggaataaatactccgctacccctaacctcactccccctctcgatccggaaacctctcaaaccctagccgcctcctgcaagtttcagagctcaggaatctgcgccatggcgagtgagacggagaccttcgcatttcaggctgagatcaaccagctgctctcactcatcatcaacaccttctactccaacaaggagatcttcctccgcgagcttatctccaactcttccgatgcgctggacaagatcaggttcgagagtctcactgacaagagcaagctcgatgcgcagcctgagcttttcatccaccttgtcccagacaaggccacgaacacgctctccatcatcgacagcggcatcggcatgaccaagtccgaccttgtcaacaacctcggtaccatcgccagagttgtcgtgaccaccaagcacaacgatgacgagcagtacgtgtgggagtcccaagcgggcgggtcgttcactgttactcgtgacacgtcaggggagcagcttggcaggggcactaagatcacactgttccttaaggacgatcagctggagtaccttgaggagcgtcgcctcaaggatctggtcaagaagcactctgagttcatcagctaccccatctccctgtggactgaaaagacaacagagaaggaaatttctgacgacgaagacgaggaagagaagaaagatgctgaggaaggaaaggttgaggatgttgatgagaaggaagagaaagaaaagaagaaaaagaagatcaaggaggtttctcatgagtggtcattggtcaacaagcagaagcccatatggatgaggaagccagaagaaatcacaaaagaagaatatgctgccttctataagagcttgacaaatgactgggaggagcatctggctgtgaagcacttctctgtggagggtcaactggagttcaaggctgttctctttgttcctaagagggccccctttgatctctttgacaccaagaagaagcaaaacaacatcaagctctatgtgcgcagggtgttcatcatggacaactgcgaagagctgatccctgagtggctgagcttcgttaagggtattgttgactctgaggaccttcccctcaatatctctcgtgagactcttcagcagaacaagatcctgaaggtgatcaggaagaaccttgtgaagaagtgtgttgagctcttctttgagattgctgagaacaaggaggactacaacaagttttacgaggctttctccaagaacctcaagcttggcatccacgaggactcgcagaacaggaccaagatcgccgagcttctgagataccactccaccaagagtggtgatgagctgaccagcctcaaggactacgtgaccaggatgaaggagggacagaatgacatatactatatcactggtgagagcaagaagcttgtctctgccaccaaggagggtctgaagcttgatgagactgaggacgagaagaagaggaaggaggagctgaaggagaagtttgaggggctgtgcaaggtcatcaaggaggttctgggtgacaaagttgagaaggtggtggtgtctgatcgcgttgtggactcaccgtgctgccttgtgactggcgagtatggctggaccgccaacatggagaggatcatgaaggcacaggccctgagggactcgagcatggcgggctacatgtcgagcaaaaagacaatggagatcaacccagagaaccctatcatggatgagctccgcaagcgtgccgaggctgacaagaatgacaagtcagtcaaggatctcgtgatgctgctgttcgagactgctctcctgacctccggcttcagcctggatgaccccaacaccttcggcaaccggatccaccgcatgctcaaactcggtctgagcatcgatgaggacgagcctgttgaggcagaggctgagatgcctcagcttgaggacgacgctggtgaaagcaagatggaggaggtcgactaagtgtcgcatcgcatgcttgccgtttatcttatccctagctaagctacctgtgatagcttaattttcactattgttcgaggtttttggcacgttatcggttgtcctgctggccaggctataagtctggtttatctgttatgtttaccctttttaacagtttgtcgttattattcgtaatggtaaaaatgtagtacatgttttgcccattgggttgtgtgagattgggacagacagatcagggtactacccctttttctctttgggtagcccatagtttgagtagtggtgaaaaaagaatggttaggattttaggcatgttgtagcaaatcggctatgccaggaaatgaaactggtttcgtttcccaattaaaccgaaatattataattcaactagaagagataggataaactgaagtgttataattcggcttagaggagataagttcatatttactctctgaagaaaactttataaaaatttcacagtgaggtaccagttttttcggcggccagcggccttctccagtggtagaaaaaaacacataccttgtcc

SEQ ID NO: 22036 - DNA, 1143 bp, Zea Mays
gttgcatttcatggcatgttcatgtgtggttttgtacagctcgatctcaagattcccgaacacgatacgagcgacagctctttactagatcaatcaatggaggatttaaaatttttcggcggatcggagtgctgctgagccctagtgtgttctccccgttttggccttgccggttgccgcggggcggcggggcctctctatatatagcgccccggtctcgccgcattgcttcgtcactcgagctcgagcgatcccactcccgatcagcagctgatcgctcactcttgcagctcgatcattctttagctgctctagctctagccctagctagtagctagccactcggtcgtgtagtcatcagccttctgatcgtcacccatggccactgccgaggtccagaccccgaccgtcgtggcgaccgaggaagcgccggcggtggagaccccggctccgcccgccgtcgtgcccgaggaggctgcccccgccgccgaggccaaggtggaggagccagctgccccggcggagaccgagccagctgccgccgctgagcccgaggcggcccccgtggaggcggaggaagagacgccaaaggaggcggagccggagccggcggcggctggagaggtgaaggaggaagcggcagcgcccgctgccgagacagaagcagaaccagcagccgctgagcccgaggctgctgctgcggaggaggagcccgcggcggccgagccggccgctgaggagcccgagaaggccgagccggccgctgaggtggccgagaaggccagcgagtgaggccgtgcgccgtgcgcgcactgcggcggcggacagcgggtcgggagatcgatggctcagcgcgcgcgcgcctacatggcacgggcttgctgttcagtacaacgcgaacgtgacggtttctctccatctctgtgtgtgtgacagtgtgtcgtagctatagcagtggctgtcgcgtggactgcccggtgcggactgcgagtgacatgggctaaataaagtgtgcgtcgtctggtctggtggtggtagtggggcgcggtgccccatgtgtgccgctgcagcttgtgtctctgttttgcttcatgttctctgtctatctactctcatgtatggcaataaaaaaataataatgaa

SEQ ID NO: 22037 - DNA, 1200 bp, Zea Mays
atgttcatgtgtggttttgtacagctcgatctcaagattcccgaacacgatacgagcgacagctctttactagatcaatcaatggaggatttaaaatttttcggcggatcggagtgctgctgagccctagtgtgttctccccgttttggccttgccggttgccgcggggcggcggggcctctctatatatagcgccccggtctcgccgcattgcttcgtcactcgagctcgagcgatcccactcccgatcagcagctgatcgctcactcttgcagctcgatcattctttagctgctctagctctagccctagctagtagctagccactcggtcgtgtagtcatcagccttctgatcgtcacccatggccactgccgagcctcctgcgttaataaccacggaggatgctaagattaatttgtactcgcgccgtgcgtgcacgtgtgcgcaggtccagaccccgaccgtcgtggcgaccgaggaagcgccggcggtggagaccccggctccgcccgccgtcgtgcccgaggaggctgcccccgccgccgaggccaaggtggaggagccagctgccccggcggagaccgagccagctgccgccgctgagcccgaggcggcccccgtggaggcggaggaagagacgccaaaggaggcggagccggagccggcggcggctggagaggtgaaggaggaagcggcagcgcccgctgccgagacagaagcagaaccagcagccgctgagcccgaggctgctgctgcggaggaggagcccgcggcggccgagccggccgctgaggagcccgagaaggccgagccggccgctgaggtggccgagaaggccagcgagtgaggccgtgcgccgtgcgcgcactgcggcggcggacagcgggtcgggagatcgatggctcagcgcgcgcgcgcctacatggcacgggcttgctgttcagtacaacgcgaacgtgacggtttctctccatctctgtgtgtgtgacagtgtgtcgtagctatagcagtggctgtcgcgtggactgcccggtgcggactgcgagtgacatgggctaaataaagtgtgcgtcgtctggtctggtggtggtagtggggcgcggtgccccatgtgtgccgctgcagcttgtgtctctgttttgcttcatgttctctgtctatctactctcatgtatggcaataaaaaaataataatgaa

SEQ ID NO: 22038 - DNA, 2094 bp, Zea Mays
gaaccacccgaccgcctgcgccttccatggccacgtcacagttaaagcctgaggaggttgctggtatcataaaggactttgatgaacctggtactcttgcaccaactggtcttttcgttggaggtacaaagtacatggtgatccaaggtgaacctggagttgtcatccgaggaaagaagctcaaaaatgaactaccgggcgacaaatattcgaaagcggagggagcgtcggtagtgacatctactaccagcgctggtattcagcttctgccagagaagcactgcgccgatgaagcttgtggagccatggcgggcagtaatggtcctgaaggagtgccagtagtgacttctgctgatgaccctccgacccgtgccgatattccatttctctgcaattcagttgatgaaacatgtgaagccacaggggacgacagtgctcccttggatgctcagatatgtacgggtttctctaagttgatcagcttggaggtgaagaaaggcctccagaagtgcgcgacgttcccaccctcgtctggtcagcctcagcaggaggattgttcatgctcccatgtaggtgatggcctcacgggtgctcctgctttctggcgatctgtgtccttacctgctataacccggactcctcgccctcgtacctcgttgctggcgaagagcgtcatcaatggcgagtggaggttcactacacagccgccggatcttggagcatcattcgcggtcttggcgcgtctacgcaactgtatcctaagggcgtcgaagaggagagacggtacgccggtggcgacaaggtacgatagatttgaactggagtgtggaggtatcgtcggccagtgccatcagcgatgggtggaggtttccgtcgagtcgaggaaggagcgcttcgtgtaaaggtagcactgcttgctcacgttaatcatccctatgcctacatctatgttttggttttgctgacctgcatgaatacaaccacttgttttggtccttggtatgttttctatgttttggtttttctaatctgcattggaaggcatgttgttggtaagcattgtcgatgctctggtagaatatatcttgagttacaaatgcgagcttcagttttcacgcaacttcatgaaagcttagctttatagcgcagttcagtgttaattatttaattttgtaggcaataaaaatgcatttcttatcctttatggtagacatttctgtcctttgctactatctaactgaatagctgaaatacaatgttttcattggtcgattaatattctatccacttgaatcacaatcactcccataaagaaaatttcttttccgtaattgaagttaatgaacaatacaaccagggaattgttttgcatccattgcatgtcatttttaggtaccaaagtaaacaagctctggacagattcagtttcagtttcagtgatcctgtttgcaacatccaagcatcctgtaatcacctgtatagcagttacacctgttcatgtacatgcttttaacaataaatcaacaacttacatgatagctttattgtagatgttgtttgtttattgttattatcttatcggaagtgccgtcaaggaagatgacgatggtggtagggatcgacgatagcgagcacaacttctacacgctgaagtgggcgcactgcagcacttcttcccgccgaccaagctgcaacactactgccttgttgtcgtcaccgccaagccctctgtcgcctccattgttcgccctgccaacctagggagggcacattgtggcggctacgagagaccgattttcctgtgtggtggtgacaacgacaccgtggagccaagtcaatgtcggcaagctgatttttcagattggaacctatggttctttttaaagatcgaatatgttctagcatctttaaaagatttgtcagaatgtaaacatttgttttgaggtcatttaagcctcaaacaaaatttcttggacttatttcgttggagggaacgagacatctcgagatctaaatgtgtatagaacatatattttttatgggtatcaaatataattgtgtgtaaagcacgtacatagtactataataatgaaa

SEQ ID NO: 22039 - DNA, 4429 bp, Zea Mays
atggcgtcctctcctctggcaccaaccaggacctgctcgcccctagtgcccaagctgccccgccgcccctcgctcccatccccgtgtaggtctccccgtcgcagtgcgcggtggccgcgcttggcgtcagtcagagcgactccgggcagcagctggaccgcggcagcgacggaggagcacaaggagcggaagaggtgcctgagatgcggcggctcttaccgagacgaggagaaccacccgagcgcctgcgccttccatggccacgtcacagttaaagcctgaggaggttgctggtatcataaaggactttgatgaacctggtactcttgcaccaactggtcttttcgttggaggtacaaagtacatggtgatccaaggtgaacctggagttgtcatccgaggaaagaagcggcgtggttgtacgtttgttgtgttgctgtatcactctgcgtctctgcaagtgctaaaccagtcactttatggacggtggttcctgtggtctcgagggagcgtcggtagtgacatctactaccagcgctggtattcagcttctgccagagaagcactgcgccgatgaagcttgtggagccatggcgggcagtaatggtcctgaaggagtgccagtagtgacttctgctgatgaccctccgacccgtgccgatattccatttctctgcaattcagttgatgaaacatgtgaagccacaggggacgacagtgctcccttggatgctcagatatgtacgggtttctctaagttgatcagcttggaggtgaagaaaggcctccagaagtgcgcgacgttcccaccctcgtctggtcagcctcagcaggaggattgttcatgctcccatgtaggtgatggcctcacgggtgctcctgctttctggcgatctgtgtccttacctgtgagtacctcatgttaaattattttaccatttgtcttaaatgattgctattgtacttaaagttctactgataagtcgtacgctctgtacttgaatgagatcttttggttgcgatcattatgtatgttcaaagtaatagatggactccatcttggttattttagtgttcgctagcagccttaatacctaatcaaatcaggttcatattcgctttccagtttatcatgctcatacaaaattagcaaccaccttttggaatgcaataatactttgaactaattgaaagacatcctggttttgttgtgttgactgagtgttttctggctaaagctgaacacaaactcaccatataagcatttctttctttattgattatcttcaaaaaaacagagctcagttccaattgtttaaagttgcacatgacctgacatccgctgtccaaatgtaattaattgtttgttcttactttggctatattggtaagcttgcatgtgaattgaaagcttgctccaatactgtaattggtaatgaagaaatgtttaacatttcaggtgataaatacatgtgtgagctaaatctattgatctgcttgtttatgtaacggtacttcaaaactgtatcaccggttatgtcttggcatgcttctttacggatctgttatccatgcatggcagataatagttggcattttagcagcacaacaatatttctaactattaagtgttaattatctaatgttatttctaactattaagtgttaattatctaatgtatttaatgaagtaacacagttagacttgcctaaagaggccagtgaagcttcactggctgcatagagaagtacttttttattatcatgtaaatgcatggttctttggaaccatttggcctatctgattaattattactataaccgggaatgggggcccgaggctataacccggactcctcgccctcgtacctcgttgctggcgaagagcgtcatcaatggcgagtggaggttcactacacagccgccggatcttggagcatcattcgcggtcttggcgcgtctacgcaactgtatcctaagggcgtcgaagaggagagacggtacgccggtggcgacaaggtacgatagatttgaactggagtgtggaggtatcgtcggccagtgccatcagcgatgggtggaggtttccgtcgagtcgaggaaggagcgcttcgtgtaaaggtagcactgcttgctcacgttaatcatccctatgcctacatctatgttttggttttgctgacctgcatgaatacaaccacttgttttggtccttggtatgttttctatgttttggtttttctaatctgcattggaaggcatgttgttggtaagcattgtcgatgctctggtagaatatatcttgagttacaaatgcgagcttcagttttcacgcaacttcatgaaagcttagctttatagcgcagttcagtgttaattatttaattttgtaggcaataaaaatgcatttcttatcctttatggtagacatttctgtcctttgctactatctaactgaatagctgaaatacaatgttttcattggtcgattaatattctatccacttgaatcacaatcactcccataaagaaaatttcttttccgtaattgaagttaatgaacaatacaaccagggaattgttttgcatccattgcatgtcatttttaggtaccaaagtaaacaagctctggacagattcagtttcagtttcagtgatcctgtttgcaacatccaagcatcctgtaatcacctgtatagcagttacacctgttcatgtacatgcttttaacaataaatcaacaacttacatgatagctttattgtagatgttgtttgtttattgttattatcttatcggaagtgccgtcaaggaagatgacgatggtggtagggatcgacgatagcgagcacaacttctacacgctgaagtgggcgcactgcagcacttcttcccgccgaccaagctgcaacactactgccttgttgtcgtcaccgccaagccctctgtcgcctccattgttcgccctgccaacctaggtatgcgaatctccaatccatgtgaggattcagagctagactagatgtagcttctgacctatatgattagttatatatgtattgtaattgatcagtgcaggcaccgcgaatgtgttgtcgtatgtggggagcagacagtcaacttgcatctaggtctaaataaaatagtagtgattaaatctttgaatctgtagatcaaaccatctcaagtaattttagttttgttatgaaaatttttagctcagatgaaataattgcattttgattattaagatttaacatacatctggttctatgaggaaggaaatcataagtggagattgaagttgatcaacttgacactcgaataaaagaatcaacaaatattgcaagtgctgaaagttgtgactgctcaagtccaattgctttatcacacaagttctggtggagatacttattctagaatcttcaaaagcatcaacgttagtgttcaagggactgattctggactttcaacttaatgcttctctacctgttgtcatactgaagctactgctcctggaagagcatcaccaacatatccctgatggccctctctgcttcatgctccaagcacttggatgttcaccttgaaatataattattaatagggactgtccaaatacttcagctaagcaaaatagcgacctccataaaaaagcaacctgtaactatctctgaaaattttgaaaaaaactgatggtaactgataagctgctgctagcaactaccgtcgcctatttgttttgtttcagaaagttaaggtgcatgaacctctgatatagcatttgacacactgtactttacacatcacccaggaggaactcttgtgtgggtgtgggtgtgggcagggctagaaggaagaaccatgcatgctactacattcatataatctttttcagaggtttaagatatcaacactaatctgactttgattgtctgaaagaatttatcatgctgctgcttactgttttcggtagggggtcaatgcttactttagctgtgcaataattcctcaatattaaaccgagtttgatcaagtaccttgaagctacaagtagcagtgatttgacaggtttactactgcctgaaacatgattggagggcacattgtggcggctacgagagaccgattttcctgtgtggtggtgacaacgacaccgtggagccaagtcaatgtcggcaagctgatttttcagattggaacctatggttctttttaaagatcgaatatgttctagcatctttaaaagatttgtcagaatgtaaacatttgttttgaggtcatttaagcctcaaacaaaatttcttggacttatttcgttggagggaacgagacatctcgagatctaaatgtgtatagaacatatattttttatgggtatcaaatataattgtgtgtaaagcacgtacatagtactataataatgaaa

SEQ ID NO: 22040 - DNA, 2726 bp, Zea Mays
cttgtgttacacattccacgcaatggcgtcctctcctctggcaccaaccaggacctgctcgcccctagtgcccaagctgccccgccgcccctcgctcccatccccgtgtaggtctccccgtcgcagtgcacggtggccgcgcttggcgtcagtcagagcgactccggacagcagctggaccgcggcagcgacggaggagcagaaggagcggaagaggtgcctgagatgcggcggctcttaccgagacgaggagaaccacccgaccgcctgcgccttccatggccacgtcacaggcgagaaggggctgttctccctgtcgccgccgcaccagggcatcgacggcgagtggagcgacaagagcggggtcatcgtgtaccgctggaacgacgaggggagccggcccaacacaggccgcgctaactggaagaggcgctggagctgctgccaggagcgcgaggaggacgcgccgccgtgccagcgcgggtggcacgtctcctacgacgacggctacaccctcttctaggtctccctctacccgtggccgtggggagcagcaggagatataatataagttaaagcctgaggaggttgctggtatcataaaggactttgatgaacctggtactcttgcaccaactggtcttttcgttggaggtacaaagtacatggtgatccaaggtgaacctggagttgtcatccgaggaaagaagctcaaaaatgaactaccgggcgacaaatattcgaaagcggagggagcgtcggtagtgacatctactaccagcgctggtattcagcttctgccagagaagcactgcgccgatgaagcttgtggagccatggcgggcagtaatggtcctgaaggagtgccagtagtgacttctgctgatgaccctccgacccgtgccgatattccatttctctgcaattcagttgatgaaacatgtgaagccacaggggacgacagtgctcccttggatgctcagatatgtacgggtttctctaagttgatcagcttggaggtgaagaaaggcctccagaagtgcgcgacgttcccaccctcgtctggtcagcctcagcaggaggattgttcatgctcccatgtaggtgatggcctcacgggtgctcctgctttctggcgatctgtgtccttacctgctataacccggactcctcgccctcgtacctcgttgctggcgaagagcgtcatcaatggcgagtggaggttcactacacagccgccggatcttggagcatcattcgcggtcttggcgcgtctacgcaactgtatcctaagggcgtcgaagaggagagacggtacgccggtggcgacaaggtacgatagatttgaactggagtgtggaggtatcgtcggccagtgccatcagcgatgggtggaggtttccgtcgagtcgaggaaggagcgcttcgtgtaaagggatcgacgatagcgagcacaacttctacacgctgaagtgggcgcactgcagcacttcttcccgccgaccaagctgcaacactactgccttgttgtcgtcaccgccaagccctctgtcgcctccattgttcgccctgccaacctaggaaatcataagtggagattgaagttgatcaacttgacactcgaataaaagaatcaacaaatattgcaagtgctgaaagttgtgactgctcaagtccaattgctttatcacacaagttctggtggagatacttattctagaatcttcaaaagcatcaacgttagtgttcaaggttagtataacaagtattgcaagtgttcaaggttagtataacataatcattttaaaacgaagcaacaggtcagtgcctttgaaattaaacaaccaaaatcactgtaaattaaagtccctttgagagctcctcaaaaacaatctgaccatattttatgcttttctccaccttattttttgactttttcctccagggactgattctggactttcaacttaatgcttctctacctgttgtcatactgaagctactgctcctggaagagcatcaccaacatatccctgatggccctctctgcttcatgctccaagcacttggatgttcaccttgaaatataattattaatagggactgtccaaatacttcagctaagcaaaatagcgacctccataaaaaagcaacctgtaactatctctgaaaattttgaaaaaaactgatggtaactgataagctgctgctagcaactaccgtcgcctatttgttttgtttcagaaagttaaggtgcatgaacctctgatatagcatttgacacactgtactttacacatcacccaggaggaactcttgtgtgggtgtgggtgtgggcagggctagaaggaagaaccatgcatgctactacattcatataatctttttcagagggagggcacattgtggcggctacgagagaccgattttcctgtgtggtggtgacaacgacaccgtggagccaagtcaatgtcggcaagctgatttttcagattggaacctatggttctttttaaagatcgaatatgttctagcatctttaaaagatttgtcagaatgtaaacatttgttttgaggtcatttaagcctcaaacaaaatttcttggacttatttcgttggagggaacgagacatctcgagatctaaatgtgtatagaacatatattttttatgggtatcaaatataattgtgtgtaaagcacgtacatagtactataataatgaaa

SEQ ID NO: 22041 - DNA, 753 bp, Zea Mays
atggcgtcctctcctctggcaccaaccaggacctgctcgcccctagtgcccaagctgccccgccgcccctcgctcccatccccgtgtaggtctccccgtcgcagtgcacggtggccgcgcttggcgtcagtcagagcgactccggacagcagctggaccgcggcagcgacggaggagcagaaggagcggaagaggtgcctgagatgcggcggctcttaccgagacgaggagaaccacccgaccgcctgcgccttccatggccacgtcacaggcgagaaggggctgttctccctgtcgccgccgcaccagggcatcgacggcgagtggagcgacaagagcggggtcatcgtgtaccgctggaacgacgaggggagccggcccaacacaggccgcgctaactggaagaggcgctggagctgctgccaggagcgcgaggaggacgcgccgccgtgccagcgcgggtggcacgtctcctacgacgacggctacaccctcttctaggtctccctctacccgtggccgtggggagcagcaggagatataatataagttaaagcctgaggaggttgctggtatcataaaggactttgatgaacctggtactcttgcaccaactggtcttttcgttggaggtacaaagtacatggtgatccaaggtgaacctggagttgtcatccgaggaaagaagcggcgtggttgtacgtttgttgtgttgctgtatcactctgcgtctctgcaagtgctaaaccagtc

SEQ ID NO: 22042 - DNA, 3869 bp, Zea Mays
atggcgtcctctcctctggcaccaaccaggacctgctcgcccctagtgcccaagctgccccgccgcccctcgctcccatccccgtgtaggtctccccgtcgcagtgcacggtggccgcgcttggcgtcagtcagagcgactccggacagcagctggaccgcggcagcgacggaggagcagaaggagcggaagaggtgcctgagatgcggcggctcttaccgagacgaggagaaccacccgaccgcctgcgccttccatggccacgtcacaggcgagaaggggctgttctccctgtcgccgccgcaccagggcatcgacggcgagtggagcgacaagagcggggtcatcgtgtaccgctggaacgacgaggggagccggcccaacacaggccgcgctaactggaagaggcgctggagctgctgccaggagcgcgaggaggacgcgccgccgtgccagcgcgggtggcacgtctcctacgacgacggctacaccctcttctaggtctccctctacccgtggccgtggggagcagcaggagatataatataagttaaagcctgaggaggttgctggtatcataaaggactttgatgaacctggtactcttgcaccaactggtcttttcgttggaggtacaaagtacatggtgatccaaggtgaacctggagttgtcatccgaggaaagaagctcaaaaatgaactaccgggcgacaaatattcgaaagcggagggagcgtcggtagtgacatctactaccagcgctggtattcagcttctgccagagaagcactgcgccgatgaagcttgtggagccatggcgggcagtaatggtcctgaaggagtgccagtagtgacttctgctgatgaccctccgacccgtgccgatattccatttctctgcaattcagttgatgaaacatgtgaagccacaggggacgacagtgctcccttggatgctcagatatgtacgggtttctctaagttgatcagcttggaggtgaagaaaggcctccagaagtgcgcgacgttcccaccctcgtctggtcagcctcagcaggaggattgttcatgctcccatgtaggtgatggcctcacgggtgctcctgctttctggcgatctgtgtccttacctgtgagtacctcatgttaaattattttaccatttgtcttaaatgattgctattgtacttaaagttctactgataagtcgtacgctctgtacttgaatgagatcttttggttgcgatcattatgtatgttcaaagtaatagatggactccatcttggttattttagtgttcgctagcagccttaatacctaatcaaatcaggttcatattcgctttccagtttatcatgctcatacaaaattagcaaccaccttttggaatgcaataatactttgaactaattgaaagacatcctggttttgttgtgttgactgagtgttttctggctaaagctgaacacaaactcaccatataagcatttctttctttattgattatcttcaaaaaaacagagctcagttccaattgtttaaagttgcacatgacctgacatccgctgtccaaatgtaattaattgtttgttcttactttggctatattggtaagcttgcatgtgaattgaaagcttgctccaatactgtaattggtaatgaagaaatgtttaacatttcaggtgataaatacatgtgtgagctaaatctattgatctgcttgtttatgtaacggtacttcaaaactgtatcaccggttatgtcttggcatgcttctttacggatctgttatccatgcatggcagataatagttggcattttagcagcacaacaatatttctaactattaagtgttaattatctaatgttatttctaactattaagtgttaattatctaatgtatttaatgaagtaacacagttagacttgcctaaagaggccagtgaagcttcactggctgcatagagaagtacttttttattatcatgtaaatgcatggttctttggaaccatttggcctatctgattaattattactataaccgggaatgggggcccgaggctataacccggactcctcgccctcgtacctcgttgctggcgaagagcgtcatcaatggcgagtggaggttcactacacagccgccggatcttggagcatcattcgcggtcttggcgcgtctacgcaactgtatcctaagggcgtcgaagaggagagacggtacgccggtggcgacaaggtacgatagatttgaactggagtgtggaggtatcgtcggccagtgccatcagcgatgggtggaggtttccgtcgagtcgaggaaggagcgcttcgtgtaaagtgccgtcaaggaagatgacgatggtggtagggatcgacgatagcgagcacaacttctacacgctgaagtgggcgcactgcagcacttcttcccgccgaccaagctgcaacactactgccttgttgtcgtcaccgccaagccctctgtcgcctccattgttcgccctgccaacctaggcaccgcgaatgtgttgtcgtatgtggggagcagacagtcaacttgcatctaggtctaaataaaatagtagtgattaaatctttgaatctgtagatcaaaccatctcaagtaattttagttttgttatgaaaatttttagctcagatgaaataattgcattttgattattaagatttaacatacatctggttctatgaggaaggaaatcataagtggagattgaagttgatcaacttgacactcgaataaaagaatcaacaaatattgcaagtgctgaaagttgtgactgctcaagtccaattgctttatcacacaagttctggtggagatacttattctagaatcttcaaaagcatcaacgttagtgttcaaggttagtataacaagtattgcaagtgttcaaggttagtataacataatcattttaaaacgaagcaacaggtcagtgcctttgaaattaaacaaccaaaatcactgtaaattaaagtccctttgagagctcctcaaaaacaatctgaccatattttatgcttttctccaccttattttttgactttttcctccagggactgattctggactttcaacttaatgcttctctacctgttgtcatactgaagctactgctcctggaagagcatcaccaacatatccctgatggccctctctgcttcatgctccaagcacttggatgttcaccttgaaatataattattaatagggactgtccaaatacttcagctaagcaaaatagcgacctccataaaaaagcaacctgtaactatctctgaaaattttgaaaaaaactgatggtaactgataagctgctgctagcaactaccgtcgcctatttgttttgtttcagaaagttaaggtgcatgaacctctgatatagcatttgacacactgtactttacacatcacccaggaggaactcttgtgtgggtgtgggtgtgggcagggctagaaggaagaaccatgcatgctactacattcatataatctttttcagagggagggcacattgtggcggctacgagagaccgattttcctgtgtggtggtgacaacgacaccgtggagccaagtcaatgtcggcaagctgatttttcagattggaacctatggttctttttaaagatcgaatatgttctagcatctttaaaagatttgtcagaatgtaaacatttgttttgaggtcatttaagcctcaaacaaaatttcttggacttatttcgttggagggaacgagacatctcgagatctaaatgtgtatagaacatatattttttatgggtatcaaatataattgtgtgtaaagcacgtacatagtactataataatgaaa

SEQ ID NO: 22043 - DNA, 3915 bp, Zea Mays
atggcgtcctctcctctggcaccaaccaggacctgctcgcccctagtgcccaagctgccccgccgcccctcgctcccatccccgtgtaggtctccccgtcgcagtgcacggtggccgcgcttggcgtcagtcagagcgactccggacagcagctggaccgcggcagcgacggaggagcagaaggagcggaagaggtgcctgagatgcggcggctcttaccgagacgaggagaaccacccgaccgcctgcgccttccatggccacgtcacaggcgagaaggggctgttctccctgtcgccgccgcaccagggcatcgacggcgagtggagcgacaagagcggggtcatcgtgtaccgctggaacgacgaggggagccggcccaacacaggccgcgctaactggaagaggcgctggagctgctgccaggagcgcgaggaggacgcgccgccgtgccagcgcgggtggcacgtctcctacgacgacggctacaccctcttctaggtctccctctacccgtggccgtggggagcagcaggagatataatataagttaaagcctgaggaggttgctggtatcataaaggactttgatgaacctggtactcttgcaccaactggtcttttcgttggaggtacaaagtacatggtgatccaaggtgaacctggagttgtcatccgaggaaagaagctcaaaaatgaactaccgggcgacaaatattcgaaagcggagggagcgtcggtagtgacatctactaccagcgctggtattcagcttctgccagagaagcactgcgccgatgaagcttgtggagccatggcgggcagtaatggtcctgaaggagtgccagtagtgacttctgctgatgaccctccgacccgtgccgatattccatttctctgcaattcagttgatgaaacatgtgaagccacaggggacgacagtgctcccttggatgctcagatatgtacgggtttctctaagttgatcagcttggaggtgaagaaaggcctccagaagtgcgcgacgttcccaccctcgtctggtcagcctcagcaggaggattgttcatgctcccatgtaggtgatggcctcacgggtgctcctgctttctggcgatctgtgtccttacctgtgagtacctcatgttaaattattttaccatttgtcttaaatgattgctattgtacttaaagttctactgataagtcgtacgctctgtacttgaatgagatcttttggttgcgatcattatgtatgttcaaagtaatagatggactccatcttggttattttagtgttcgctagcagccttaatacctaatcaaatcaggttcatattcgctttccagtttatcatgctcatacaaaattagcaaccaccttttggaatgcaataatactttgaactaattgaaagacatcctggttttgttgtgttgactgagtgttttctggctaaagctgaacacaaactcaccatataagcatttctttctttattgattatcttcaaaaaaacagagctcagttccaattgtttaaagttgcacatgacctgacatccgctgtccaaatgtaattaattgtttgttcttactttggctatattggtaagcttgcatgtgaattgaaagcttgctccaatactgtaattggtaatgaagaaatgtttaacatttcaggtgataaatacatgtgtgagctaaatctattgatctgcttgtttatgtaacggtacttcaaaactgtatcaccggttatgtcttggcatgcttctttacggatctgttatccatgcatggcagataatagttggcattttagcagcacaacaatatttctaactattaagtgttaattatctaatgttatttctaactattaagtgttaattatctaatgtatttaatgaagtaacacagttagacttgcctaaagaggccagtgaagcttcactggctgcatagagaagtacttttttattatcatgtaaatgcatggttctttggaaccatttggcctatctgattaattattactataaccgggaatgggggcccgaggctataacccggactcctcgccctcgtacctcgttgctggcgaagagcgtcatcaatggcgagtggaggttcactacacagtaagctccctcactcgtttcttcccctcccccaaactctagagattccatccgtgattgaggccggttctctgtccaaggaggccgccggatcttggagcatcattcgcggtcttggcgcgtctacgcaactgtatcctaagggcgtcgaagaggagagacggtacgccggtggcgacaaggtacgatagatttgaactggagtgtggaggtatcgtcggccagtgccatcagcgatgggtggaggtttccgtcgagtcgaggaaggagcgcttcgtgtaaagggatcgacgatagcgagcacaacttctacacgctgaagtgggcgcactgcagcacttcttcccgccgaccaagctgcaacactactgccttgttgtcgtcaccgccaagccctctgtcgcctccattgttcgccctgccaacctaggaaatcataagtggagattgaagttgatcaacttgacactcgaataaaagaatcaacaaatattgcaagtgctgaaagttgtgactgctcaagtccaattgctttatcacacaagttctggtggagatacttattctagaatcttcaaaagcatcaacgttagtgttcaaggttagtataacaagtattgcaagtgttcaaggttagtataacataatcattttaaaacgaagcaacaggtcagtgcctttgaaattaaacaaccaaaatcactgtaaattaaagtccctttgagagctcctcaaaaacaatctgaccatattttatgcttttctccaccttattttttgactttttcctccagggactgattctggactttcaacttaatgcttctctacctgttgtcatactgaagctactgctcctggaagagcatcaccaacatatccctgatggccctctctgcttcatgctccaagcacttggatgttcaccttgaaatataattattaatagggactgtccaaatacttcagctaagcaaaatagcgacctccataaaaaagcaacctgtaactatctctgaaaattttgaaaaaaactgatggtaactgataagctgctgctagcaactaccgtcgcctatttgttttgtttcagaaagttaaggtgcatgaacctctgatatagcatttgacacactgtactttacacatcacccaggaggaactcttgtgtgggtgtgggtgtgggcagggctagaaggaagaaccatgcatgctactacattcatataatctttttcagaggtttaagatatcaacactaatctgactttgattgtctgaaagaatttatcatgctgctgcttactgttttcggtagggggtcaatgcttactttagctgtgcaataattcctcaatattaaaccgagtttgatcaagtaccttgaagctacaagtagcagtgatttgacaggtttactactgcctgaaacatgattggagggcacattgtggcggctacgagagaccgattttcctgtgtggtggtgacaacgacaccgtggagccaagtcaatgtcggcaagctgatttttcagattggaacctatggttctttttaaagatcgaatatgttctagcatctttaaaagatttgtcagaatgtaaacatttgttttgaggtcatttaagcctcaaacaaaatttcttggacttatttcgttggagggaacgagacatctcgagatctaaatgtgtatagaacatatattttttatgggtatcaaatataattgtgtgtaaagcacgtacatagtactataataatgaaa

SEQ ID NO: 22044 - DNA, 2922 bp, Zea Mays
atgcgctatcgccaacccagacgccacctcttcctccccttctcccctcccgcgcctttaaagcctgaggaggttgctggtatcataaaggactttgatgaacctggtactcttgcaccaactggtcttttcgttggaggtacaaagtacatggtgatccaaggtgaacctggagttgtcatccgaggaaagaagctcaaaaatgaactaccgggcgacaaatattcgaaagcggagggagcgtcggtagtgacatctactaccagcgctggtattcagcttctgccagagaagcactgcgccgatgaagcttgtggagccatggcgggcagtaatggtcctgaaggagtgccagtagtgacttctgctgatgaccctccgacccgtgccgatattccatttctctgcaattcagttgatgaaacatgtgaagccacaggggacgacagtgctcccttggatgctcagatatgtacgggtttctctaagttgatcagcttggaggtgaagaaaggcctccagaagtgcgcgacgttcccaccctcgtctggtcagcctcagcaggaggattgttcatgctcccatgtaggtgatggcctcacgggtgctcctgctttctggcgatctgtgtccttacctgctataacccggactcctcgccctcgtacctcgttgctggcgaagagcgtcatcaatggcgagtggaggttcactacacagccgccggatcttggagcatcattcgcggtcttggcgcgtctacgcaactgtatcctaagggcgtcgaagaggagagacggtacgccggtggcgacaaggtacgatagatttgaactggagtgtggaggtatcgtcggccagtgccatcagcgatgggtggaggtttccgtcgagtcgaggaaggagcgcttcgtgtaaaggtagcactgcttgctcacgttaatcatccctatgcctacatctatgttttggttttgctgacctgcatgaatacaaccacttgttttggtccttggtatgttttctatgttttggtttttctaatctgcattggaaggcatgttgttggtaagcattgtcgatgctctggtagaatatatcttgagttacaaatgcgagcttcagttttcacgcaacttcatgaaagcttagctttatagcgcagttcagtgttaattatttaattttgtaggcaataaaaatgcatttcttatcctttatggtagacatttctgtcctttgctactatctaactgaatagctgaaatacaatgttttcattggtcgattaatattctatccacttgaatcacaatcactcccataaagaaaatttcttttccgtaattgaagttaatgaacaatacaaccagggaattgttttgcatccattgcatgtcatttttaggtaccaaagtaaacaagctctggacagattcagtttcagtttcagtgatcctgtttgcaacatccaagcatcctgtaatcacctgtatagcagttacacctgttcatgtacatgcttttaacaataaatcaacaacttacatgatagctttattgtagatgttgtttgtttattgttattatcttatcggaagtgccgtcaaggaagatgacgatggtggtagggatcgacgatagcgagcacaacttctacacgctgaagtgggcgcactgcagcacttcttcccgccgaccaagctgcaacactactgccttgttgtcgtcaccgccaagccctctgtcgcctccattgttcgccctgccaacctaggaaatcataagtggagattgaagttgatcaacttgacactcgaataaaagaatcaacaaatattgcaagtgctgaaagttgtgactgctcaagtccaattgctttatcacacaagttctggtggagatacttattctagaatcttcaaaagcatcaacgttagtgttcaaggttagtataacaagtattgcaagtgttcaaggttagtataacataatcattttaaaacgaagcaacaggtcagtgcctttgaaattaaacaaccaaaatcactgtaaattaaagtccctttgagagctcctcaaaaacaatctgaccatattttatgcttttctccaccttattttttgactttttcctccagggactgattctggactttcaacttaatgcttctctacctgttgtcatactgaagctactgctcctggaagagcatcaccaacatatccctgatggccctctctgcttcatgctccaagcacttggatgttcaccttgaaatataattattaatagggactgtccaaatacttcagctaagcaaaatagcgacctccataaaaaagcaacctgtaactatctctgaaaattttgaaaaaaactgatggtaactgataagctgctgctagcaactaccgtcgcctatttgttttgtttcagaaagttaaggtgcatgaacctctgatatagcatttgacacactgtactttacacatcacccaggaggaactcttgtgtgggtgtgggtgtgggcagggctagaaggaagaaccatgcatgctactacattcatataatctttttcagagggagggcacattgtggcggctacgagagaccgattttcctgtgtggtggtgacaacgacaccgtggagccaagtcaatgtcggcaagctgatttttcagattggaacctatggttctttttaaagatcgaatatgttctagcatctttaaaagatttgtcagaatgtaaacatttgttttgaggtcatttaagcctcaaacaaaatttcttggacttatttcgttggagggaacgagacatctcgagatctaaatgtgtatagaacatatattttttatgggtatcaaatataattgtgtgtaaagcacgtacatagtactataataatgaaa

SEQ ID NO: 22045 - DNA, 2242 bp, Zea Mays
gttatttctaactattaagtgttaattatctaatgtatttaatgaagtaacacagttagacttgcctaaagaggccagtgaagcttcactggctgcatagagaagtacttttttattatcatgtaaatgcatggttctttggaaccatttggcctatctgattaattattactataaccgggaatgggggcccgaggctataacccggactcctcgccctcgtacctcgttgctggcgaagagcgtcatcaatggcgagtggaggttcactacacagccgccggatcttggagcatcattcgcggtcttggcgcgtctacgcaactgtatcctaagggcgtcgaagaggagagacggtacgccggtggcgacaaggtacgatagatttgaactggagtgtggaggtatcgtcggccagtgccatcagcgatgggtggaggtttccgtcgagtcgaggaaggagcgcttcgtgtaaagtgccgtcaaggaagatgacgatggtggtagggatcgacgatagcgagcacaacttctacacgctgaagtgggcgcactgcagcacttcttcccgccgaccaagctgcaacactactgccttgttgtcgtcaccgccaagccctctgtcgcctccattgttcgccctgccaacctagtgcaggcaccgcgaatgtgttgtcgtatgtggggagcagacagtcaacttgcatctaggtctaaataaaatagtagtgattaaatctttgaatctgtagatcaaaccatctcaagtaattttagttttgttatgaaaatttttagctcagatgaaataattgcattttgattattaagatttaacatacatctggttctatgaggaaggaaatcataagtggagattgaagttgatcaacttgacactcgaataaaagaatcaacaaatattgcaagtgctgaaagttgtgactgctcaagtccaattgctttatcacacaagttctggtggagatacttattctagaatcttcaaaagcatcaacgttagtgttcaagggactgattctggactttcaacttaatgcttctctacctgttgtcatactgaagctactgctcctggaagagcatcaccaacatatccctgatggccctctctgcttcatgctccaagcacttggatgttcaccttgaaatataattattaatagggactgtccaaatacttcagctaagcaaaatagcgacctccataaaaaagcaacctgtaactatctctgaaaattttgaaaaaaactgatggtaactgataagctgctgctagcaactaccgtcgcctatttgttttgtttcagaaagttaaggtgcatgaacctctgatatagcatttgacacactgtactttacacatcacccaggaggaactcttgtgtgggtgtgggtgtgggcagggctagaaggaagaaccatgcatgctactacattcatataatctttttcagaggtttaagatatcaacactaatctgactttgattgtctgaaagaatttatcatgctgctgcttactgttttcggtagggggtcaatgcttactttagctgtgcaataattcctcaatattaaaccgagtttgatcaagtaccttgaagctacaagtagcagtgatttgacaggtttactactgcctgaaacatgattgtaagtgttcttagtatatagctcttctccatttcctctccaactgtcacatgtgctcatacgcttttgccttagtttattacatgtccagaacaccaacataaagaaaacctgccctcgattagcattattcagtagagagagttgtggagaaataaagttaatttgtttgttggcgcaactaattagaccacgttttcattaacaataatactaacatgtttttgttgtagggagggcacattgtggcggctacgagagaccgattttcctgtgtggtggtgacaacgacaccgtggagccaagtcaatgtcggcaagctgatttttcagattggaacctatggttctttttaaagatcgaatatgttctagcatctttaaaagatttgtcagaatgtaaacatttgttttgaggtcatttaagcctcaaacaaaatttcttggacttatttcgttggagggaacgagacatctcgagatctaaatgtgtatagaacatatattttttatgggtatcaaatataattgtgtgtaaagcacgtacatagtactataataatgaaa

SEQ ID NO: 22046 - DNA, 1863 bp, Zea Mays
gttatttctaactattaagtgttaattatctaatgtatttaatgaagtaacacagttagacttgcctaaagaggccagtgaagcttcactggctgcatagagaagtacttttttattatcatgtaaatgcatggttctttggaaccatttggcctatctgattaattattactataaccgggaatgggggcccgaggctataacccggactcctcgccctcgtacctcgttgctggcgaagagcgtcatcaatggcgagtggaggttcactacacagccgccggatcttggagcatcattcgcggtcttggcgcgtctacgcaactgtatcctaagggcgtcgaagaggagagacggtacgccggtggcgacaaggtacgatagatttgaactggagtgtggaggtatcgtcggccagtgccatcagcgatgggtggaggtttccgtcgagtcgaggaaggagcgcttcgtgtaaagtgccgtcaaggaagatgacgatggtggtagggatcgacgatagcgagcacaacttctacacgctgaagtgggcgcactgcagcacttcttcccgccgaccaagctgcaacactactgccttgttgtcgtcaccgccaagccctctgtcgcctccattgttcgccctgccaacctagggactgattctggactttcaacttaatgcttctctacctgttgtcatactgaagctactgctcctggaagagcatcaccaacatatccctgatggccctctctgcttcatgctccaagcacttggatgttcaccttgaaatataattattaatagggactgtccaaatacttcagctaagcaaaatagcgacctccataaaaaagcaacctgtaactatctctgaaaattttgaaaaaaactgatggtaactgataagctgctgctagcaactaccgtcgcctatttgttttgtttcagaaagttaaggtgcatgaacctctgatatagcatttgacacactgtactttacacatcacccaggaggaactcttgtgtgggtgtgggtgtgggcagggctagaaggaagaaccatgcatgctactacattcatataatctttttcagaggtttaagatatcaacactaatctgactttgattgtctgaaagaatttatcatgctgctgcttactgttttcggtagggggtcaatgcttactttagctgtgcaataattcctcaatattaaaccgagtttgatcaagtaccttgaagctacaagtagcagtgatttgacaggtttactactgcctgaaacatgattgtaagtgttcttagtatatagctcttctccatttcctctccaactgtcacatgtgctcatacgcttttgccttagtttattacatgtccagaacaccaacataaagaaaacctgccctcgattagcattattcagtagagagagttgtggagaaataaagttaatttgtttgttggcgcaactaattagaccacgttttcattaacaataatactaacatgtttttgttgtagggagggcacattgtggcggctacgagagaccgattttcctgtgtggtggtgacaacgacaccgtggagccaagtcaatgtcggcaagctgatttttcagattggaacctatggttctttttaaagatcgaatatgttctagcatctttaaaagatttgtcagaatgtaaacatttgttttgaggtcatttaagcctcaaacaaaatttcttggacttatttcgttggagggaacgagacatctcgagatctaaatgtgtatagaacatatattttttatgggtatcaaatataattgtgtgtaaagcacgtacatagtactataataatgaaa

SEQ ID NO: 22047 - DNA, 972 bp, Zea Mays
gttatttctaactattaagtgttaattatctaatgtatttaatgaagtaacacagttagacttgcctaaagaggccagtgaagcttcactggctgcatagagaagtacttttttattatcatgtaaatgcatggttctttggaaccatttggcctatctgattaattattactataaccgggaatgggggcccgaggctataacccggactcctcgccctcgtacctcgttgctggcgaagagcgtcatcaatggcgagtggaggttcactacacagccgccggatcttggagcatcattcgcggtcttggcgcgtctacgcaactgtatcctaagggcgtcgaagaggagagacggtacgccggtggcgacaaggtacgatagatttgaactggagtgtggaggtatcgtcggccagtgccatcagcgatgggtggaggtttccgtcgagtcgaggaaggagcgcttcgtgtaaagatgacgatggtggtagggatcgacgatagcgagcacaacttctacacgctgaagtgggcgcactgcagcacttcttcccgccgaccaagctgcaacactactgccttgttgtcgtcaccgccaagccctctgtcgcctccattgttcgccctgccaacctagggagggcacattgtggcggctacgagagaccgattttcctgtgtggtggtgacaacgacaccgtggagccaagtcaatgtcggcaagctgatttttcagattggaacctatggttctttttaaagatcgaatatgttctagcatctttaaaagatttgtcagaatgtaaacatttgttttgaggtcatttaagcctcaaacaaaatttcttggacttatttcgttggagggaacgagacatctcgagatctaaatgtgtatagaacatatattttttatgggtatcaaatataattgtgtgtaaagcacgtacatagtactataataatgaaa

SEQ ID NO: 22048 - DNA, 1106 bp, Zea Mays
gttatttctaactattaagtgttaattatctaatgtatttaatgaagtaacacagttagacttgcctaaagaggccagtgaagcttcactggctgcatagagaagtacttttttattatcatgtaaatgcatggttctttggaaccatttggcctatctgattaattattactataaccgggaatgggggcccgaggctataacccggactcctcgccctcgtacctcgttgctggcgaagagcgtcatcaatggcgagtggaggttcactacacagccgccggatcttggagcatcattcgcggtcttggcgcgtctacgcaactgtatcctaagggcgtcgaagaggagagacggtacgccggtggcgacaaggtacgatagatttgaactggagtgtggaggtatcgtcggccagtgccatcagcgatgggtggaggtttccgtcgagtcgaggaaggagcgcttcgtgtaaagtgccgtcaaggaagatgacgatggtggtagggatcgacgatagcgagcacaacttctacacgctgaagtgggcgcactgcagcacttcttcccgccgaccaagctgcaacactactgccttgttgtcgtcaccgccaagccctctgtcgcctccattgttcgccctgccaacctagggggtcaatgcttactttagctgtgcaataattcctcaatattaaaccgagtttgatcaagtaccttgaagctacaagtagcagtgatttgacaggtttactactgcctgaaacatgattggagggcacattgtggcggctacgagagaccgattttcctgtgtggtggtgacaacgacaccgtggagccaagtcaatgtcggcaagctgatttttcagattggaacctatggttctttttaaagatcgaatatgttctagcatctttaaaagatttgtcagaatgtaaacatttgttttgaggtcatttaagcctcaaacaaaatttcttggacttatttcgttggagggaacgagacatctcgagatctaaatgtgtatagaacatatattttttatgggtatcaaatataattgtgtgtaaagcacgtacatagtactataataatgaaa

SEQ ID NO: 22049 - DNA, 2839 bp, Zea Mays
gttatttctaactattaagtgttaattatctaatgtatttaatgaagtaacacagttagacttgcctaaagaggccagtgaagcttcactggctgcatagagaagtacttttttattatcatgtaaatgcatggttctttggaaccatttggcctatctgattaattattactataaccgggaatgggggcccgaggctataacccggactcctcgccctcgtacctcgttgctggcgaagagcgtcatcaatggcgagtggaggttcactacacagccgccggatcttggagcatcattcgcggtcttggcgcgtctacgcaactgtatcctaagggcgtcgaagaggagagacggtacgccggtggcgacaaggtacgatagatttgaactggagtgtggaggtatcgtcggccagtgccatcagcgatgggtggaggtttccgtcgagtcgaggaaggagcgcttcgtgtaaaggtagcactgcttgctcacgttaatcatccctatgcctacatctatgttttggttttgctgacctgcatgaatacaaccacttgttttggtccttggtatgttttctatgttttggtttttctaatctgcattggaaggcatgttgttggtaagcattgtcgatgctctggtagaatatatcttgagttacaaatgcgagcttcagttttcacgcaacttcatgaaagcttagctttatagcgcagttcagtgttaattatttaattttgtaggcaataaaaatgcatttcttatcctttatggtagacatttctgtcctttgctactatctaactgaatagctgaaatacaatgttttcattggtcgattaatattctatccacttgaatcacaatcactcccataaagaaaatttcttttccgtaattgaagttaatgaacaatacaaccagggaattgttttgcatccattgcatgtcatttttaggtaccaaagtaaacaagctctggacagattcagtttcagtttcagtgatcctgtttgcaacatccaagcatcctatgttgtttgtttattgttattatcttatcggaagtgccgtcaaggaagatgacgatggtggtagggatcgacgatagcgagcacaacttctacacgctgaagtgggcgcactgcagcacttcttcccgccgaccaagctgcaacactactgccttgttgtcgtcaccgccaagccctctgtcgcctccattgttcgccctgccaacctagtgcaggcaccgcgaatgtgttgtcgtatgtggggagcagacagtcaacttgcatctaggtctaaataaaatagtagtgattaaatctttgaatctgtagatcaaaccatctcaagtaattttagttttgttatgaaaatttttagctcagatgaaataattgcattttgattattaagatttaacatacatctggttctatgaggaaggaaatcataagtggagattgaagttgatcaacttgacactcgaataaaagaatcaacaaatattgcaagtgctgaaagttgtgactgctcaagtccaattgctttatcacacaagttctggtggagatacttattctagaatcttcaaaagcatcaacgttagtgttcaagggactgattctggactttcaacttaatgcttctctacctgttgtcatactgaagctactgctcctggaagagcatcaccaacatatccctgatggccctctctgcttcatgctccaagcacttggatgttcaccttgaaatataattattaatagggactgtccaaatacttcagctaagcaaaatagcgacctccataaaaaagcaacctgtaactatctctgaaaattttgaaaaaaactgatggtaactgataagctgctgctagcaactaccgtcgcctatttgttttgtttcagaaagttaaggtgcatgaacctctgatatagcatttgacacactgtactttacacatcacccaggaggaactcttgtgtgggtgtgggtgtgggcagggctagaaggaagaaccatgcatgctactacattcatataatctttttcagaggtttaagatatcaacactaatctgactttgattgtctgaaagaatttatcatgctgctgcttactgttttcggtagggggtcaatgcttactttagctgtgcaataattcctcaatattaaaccgagtttgatcaagtaccttgaagctacaagtagcagtgatttgacaggtttactactgcctgaaacatgattgtaagtgttcttagtatatagctcttctccatttcctctccaactgtcacatgtgctcatacgcttttgccttagtttattacatgtccagaacaccaacataaagaaaacctgccctcgattagcattattcagtagagagagttgtggagaaataaagttaatttgtttgttggcgcaactaattagaccacgttttcattaacaataatactaacatgtttttgttgtagggagggcacattgtggcggctacgagagaccgattttcctgtgtggtggtgacaacgacaccgtggagccaagtcaatgtcggcaagctgatttttcagattggaacctatggttctttttaaagatcgaatatgttctagcatctttaaaagatttgtcagaatgtaaacatttgttttgaggtcatttaagcctcaaacaaaatttcttggacttatttcgttggagggaacgagacatctcgagatctaaatgtgtatagaacatatattttttatgggtatcaaatataattgtgtgtaaagcacgtacatagtactataataatgaaa

SEQ ID NO: 22050 - DNA, 1998 bp, Zea Mays
gttatttctaactattaagtgttaattatctaatgtatttaatgaagtaacacagttagacttgcctaaagaggccagtgaagcttcactggctgcatagagaagtacttttttattatcatgtaaatgcatggttctttggaaccatttggcctatctgattaattattactataaccgggaatgggggcccgaggctataacccggactcctcgccctcgtacctcgttgctggcgaagagcgtcatcaatggcgagtggaggttcactacacagccgccggatcttggagcatcattcgcggtcttggcgcgtctacgcaactgtatcctaagggcgtcgaagaggagagacggtacgccggtggcgacaaggtacgatagatttgaactggagtgtggaggtatcgtcggccagtgccatcagcgatgggtggaggtttccgtcgagtcgaggaaggagcgcttcgtgtaaagtgccgtcaaggaagatgacgatggtggtagggatcgacgatagcgagcacaacttctacacgctgaagtgggcgcactgcagcacttcttcccgccgaccaagctgcaacactactgccttgttgtcgtcaccgccaagccctctgtcgcctccattgttcgccctgccaacctaggaaggaaatcataagtggagattgaagttgatcaacttgacactcgaataaaagaatcaacaaatattgcaagtgctgaaagttgtgactgctcaagtccaattgctttatcacacaagttctggtggagatacttattctagaatcttcaaaagcatcaacgttagtgttcaaggttagtataacaagtattgcaagtgttcaaggttagtataacataatcattttaaaacgaagcaacaggtcagtgcctttgaaattaaacaaccaaaatcactgtaaattaaagtccctttgagagctcctcaaaaacaatctgaccatattttatgcttttctccaccttattttttgactttttcctccagggactgattctggactttcaacttaatgcttctctacctgttgtcatactgaagctactgctcctggaagagcatcaccaacatatccctgatggccctctctgcttcatgctccaagcacttggatgttcaccttgaaatataattattaatagggactgtccaaatacttcagctaagcaaaatagcgacctccataaaaaagcaacctgtaactatctctgaaaattttgaaaaaaactgatggtaactgataagctgctgctagcaactaccgtcgcctatttgttttgtttcagaaagttaaggtgcatgaacctctgatatagcatttgacacactgtactttacacatcacccaggaggaactcttgtgtgggtgtgggtgtgggcagggctagaaggaagaaccatgcatgctactacattcatataatctttttcagaggtttaagatatcaacactaatctgactttgattgtctgaaagaatttatcatgctgctgcttactgttttcggtagggggtcaatgcttactttagctgtgcaataattcctcaatattaaaccgagtttgatcaagtaccttgaagctacaagtagcagtgatttgacaggtttactactgcctgaaacatgattggagggcacattgtggcggctacgagagaccgattttcctgtgtggtggtgacaacgacaccgtggagccaagtcaatgtcggcaagctgatttttcagattggaacctatggttctttttaaagatcgaatatgttctagcatctttaaaagatttgtcagaatgtaaacatttgttttgaggtcatttaagcctcaaacaaaatttcttggacttatttcgttggagggaacgagacatctcgagatctaaatgtgtatagaacatatattttttatgggtatcaaatataattgtgtgtaaagcacgtacatagtactataataatgaaa

SEQ ID NO: 22051 - DNA, 2544 bp, Zea Mays
gttatttctaactattaagtgttaattatctaatgtatttaatgaagtaacacagttagacttgcctaaagaggccagtgaagcttcactggctgcatagagaagtacttttttattatcatgtaaatgcatggttctttggaaccatttggcctatctgattaattattactataaccgggaatgggggcccgaggctataacccggactcctcgccctcgtacctcgttgctggcgaagagcgtcatcaatggcgagtggaggttcactacacagccgccggatcttggagcatcattcgcggtcttggcgcgtctacgcaactgtatcctaagggcgtcgaagaggagagacggtacgccggtggcgacaaggtacgatagatttgaactggagtgtggaggtatcgtcggccagtgccatcagcgatgggtggaggtttccgtcgagtcgaggaaggagcgcttcgtgtaaaggtagcactgcttgctcacgttaatcatccctatgcctacatctatgttttggttttgctgacctgcatgaatacaaccacttgttttggtccttggtatgttttctatgttttggtttttctaatctgcattggaaggcatgttgttggtaagcattgtcgatgctctggtagaatatatcttgagttacaaatgcgagcttcagttttcacgcaacttcatgaaagcttagctttatagcgcagttcagtgttaattatttaattttgtaggcaataaaaatgcatttcttatcctttatggtagacatttctgtcctttgctactatctaactgaatagctgaaatacaatgttttcattggtcgattaatattctatccacttgaatcacaatcactcccataaagaaaatttcttttccgtaattgaagttaatgaacaatacaaccagggaattgttttgcatccattgcatgtcatttttaggtaccaaagtaaacaagctctggacagattcagtttcagtttcagtgatcctgtttgcaacatccaagcatcctgtaatcacctgtatagcagttacacctgttcatgtacatgcttttaacaataaatcaacaacttacatgatagctttattgtagatgttgtttgtttattgttattatcttatcggaagtgccgtcaaggaagatgacgatggtggtagggatcgacgatagcgagcacaacttctacacgctgaagtgggcgcactgcagcacttcttcccgccgaccaagctgcaacactactgccttgttgtcgtcaccgccaagccctctgtcgcctccattgttcgccctgccaacctagggactgattctggactttcaacttaatgcttctctacctgttgtcatactgaagctactgctcctggaagagcatcaccaacatatccctgatggccctctctgcttcatgctccaagcacttggatgttcaccttgaaatataattattaatagggactgtccaaatacttcagctaagcaaaatagcgacctccataaaaaagcaacctgtaactatctctgaaaattttgaaaaaaactgatggtaactgataagctgctgctagcaactaccgtcgcctatttgttttgtttcagaaagttaaggtgcatgaacctctgatatagcatttgacacactgtactttacacatcacccaggaggaactcttgtgtgggtgtgggtgtgggcagggctagaaggaagaaccatgcatgctactacattcatataatctttttcagaggtttaagatatcaacactaatctgactttgattgtctgaaagaatttatcatgctgctgcttactgttttcggtagggggtcaatgcttactttagctgtgcaataattcctcaatattaaaccgagtttgatcaagtaccttgaagctacaagtagcagtgatttgacaggtttactactgcctgaaacatgattgtaagtgttcttagtatatagctcttctccatttcctctccaactgtcacatgtgctcatacgcttttgccttagtttattacatgtccagaacaccaacataaagaaaacctgccctcgattagcattattcagtagagagagttgtggagaaataaagttaatttgtttgttggcgcaactaattagaccacgttttcattaacaataatactaacatgtttttgttgtagggagggcacattgtggcggctacgagagaccgattttcctgtgtggtggtgacaacgacaccgtggagccaagtcaatgtcggcaagctgatttttcagattggaacctatggttctttttaaagatcgaatatgttctagcatctttaaaagatttgtcagaatgtaaacatttgttttgaggtcatttaagcctcaaacaaaatttcttggacttatttcgttggagggaacgagacatctcgagatctaaatgtgtatagaacatatattttttatgggtatcaaatataattgtgtgtaaagcacgtacatagtactataataatgaaa

SEQ ID NO: 22052 - DNA, 1987 bp, Zea Mays
gttatttctaactattaagtgttaattatctaatgtatttaatgaagtaacacagttagacttgcctaaagaggccagtgaagcttcactggctgcatagagaagtacttttttattatcatgtaaatgcatggttctttggaaccatttggcctatctgattaattattactataaccgggaatgggggcccgaggctataacccggactcctcgccctcgtacctcgttgctggcgaagagcgtcatcaatggcgagtggaggttcactacacagccgccggatcttggagcatcattcgcggtcttggcgcgtctacgcaactgtatcctaagggcgtcgaagaggagagacggtacgccggtggcgacaaggtacgatagatttgaactggagtgtggaggtatcgtcggccagtgccatcagcgatgggtggaggtttccgtcgagtcgaggaaggagcgcttcgtgtaaagatgacgatggtggtagggatcgacgatagcgagcacaacttctacacgctgaagtgggcgcactgcagcacttcttcccgccgaccaagctgcaacactactgccttgttgtcgtcaccgccaagccctctgtcgcctccattgttcgccctgccaacctaggcaccgcgaatgtgttgtcgtatgtggggagcagacagtcaacttgcatctaggtctaaataaaatagtagtgattaaatctttgaatctgtagatcaaaccatctcaagtaattttagttttgttatgaaaatttttagctcagatgaaataattgcattttgattattaagatttaacatacatctggttctatgaggaaggaaatcataagtggagattgaagttgatcaacttgacactcgaataaaagaatcaacaaatattgcaagtgctgaaagttgtgactgctcaagtccaattgctttatcacacaagttctggtggagatacttattctagaatcttcaaaagcatcaacgttagtgttcaaggttagtataacaagtattgcaagtgttcaaggttagtataacataatcattttaaaacgaagcaacaggtcagtgcctttgaaattaaacaaccaaaatcactgtaaattaaagtccctttgagagctcctcaaaaacaatctgaccatattttatgcttttctccaccttattttttgactttttcctccagggactgattctggactttcaacttaatgcttctctacctgttgtcatactgaagctactgctcctggaagagcatcaccaacatatccctgatggccctctctgcttcatgctccaagcacttggatgttcaccttgaaatataattattaatagggactgtccaaatacttcagctaagcaaaatagcgacctccataaaaaagcaacctgtaactatctctgaaaattttgaaaaaaactgatggtaactgataagctgctgctagcaactaccgtcgcctatttgttttgtttcagaaagttaaggtgcatgaacctctgatatagcatttgacacactgtactttacacatcacccaggaggaactcttgtgtgggtgtgggtgtgggcagggctagaaggaagaaccatgcatgctactacattcatataatctttttcagagggagggcacattgtggcggctacgagagaccgattttcctgtgtggtggtgacaacgacaccgtggagccaagtcaatgtcggcaagctgatttttcagattggaacctatggttctttttaaagatcgaatatgttctagcatctttaaaagatttgtcagaatgtaaacatttgttttgaggtcatttaagcctcaaacaaaatttcttggacttatttcgttggagggaacgagacatctcgagatctaaatgtgtatagaacatatattttttatgggtatcaaatataattgtgtgtaaagcacgtacatagtactataataatgaaa

SEQ ID NO: 22053 - DNA, 1980 bp, Zea Mays
gttatttctaactattaagtgttaattatctaatgtatttaatgaagtaacacagttagacttgcctaaagaggccagtgaagcttcactggctgcatagagaagtacttttttattatcatgtaaatgcatggttctttggaaccatttggcctatctgattaattattactataaccgggaatgggggcccgaggctataacccggactcctcgccctcgtacctcgttgctggcgaagagcgtcatcaatggcgagtggaggttcactacacagccgccggatcttggagcatcattcgcggtcttggcgcgtctacgcaactgtatcctaagggcgtcgaagaggagagacggtacgccggtggcgacaaggtacgatagatttgaactggagtgtggaggtatcgtcggccagtgccatcagcgatgggtggaggtttccgtcgagtcgaggaaggagcgcttcgtgtaaagatgacgatggtggtagggatcgacgatagcgagcacaacttctacacgctgaagtgggcgcactgcagcacttcttcccgccgaccaagctgcaacactactgccttgttgtcgtcaccgccaagccctctgtcgcctccattgttcgccctgccaacctaggaaatcataagtggagattgaagttgatcaacttgacactcgaataaaagaatcaacaaatattgcaagtgctgaaagttgtgactgctcaagtccaattgctttatcacacaagttctggtggagatacttattctagaatcttcaaaagcatcaacgttagtgttcaaggttagtataacaagtattgcaagtgttcaaggttagtataacataatcattttaaaacgaagcaacaggtcagtgcctttgaaattaaacaaccaaaatcactgtaaattaaagtccctttgagagctcctcaaaaacaatctgaccatattttatgcttttctccaccttattttttgactttttcctccagggactgattctggactttcaacttaatgcttctctacctgttgtcatactgaagctactgctcctggaagagcatcaccaacatatccctgatggccctctctgcttcatgctccaagcacttggatgttcaccttgaaatataattattaatagggactgtccaaatacttcagctaagcaaaatagcgacctccataaaaaagcaacctgtaactatctctgaaaattttgaaaaaaactgatggtaactgataagctgctgctagcaactaccgtcgcctatttgttttgtttcagaaagttaaggtgcatgaacctctgatatagcatttgacacactgtactttacacatcacccaggaggaactcttgtgtgggtgtgggtgtgggcagggctagaaggaagaaccatgcatgctactacattcatataatctttttcagaggtttaagatatcaacactaatctgactttgattgtctgaaagaatttatcatgctgctgcttactgttttcggtagggggtcaatgcttactttagctgtgcaataattcctcaatattaaaccgagtttgatcaagtaccttgaagctacaagtagcagtgatttgacaggtttactactgcctgaaacatgattggagggcacattgtggcggctacgagagaccgattttcctgtgtggtggtgacaacgacaccgtggagccaagtcaatgtcggcaagctgatttttcagattggaacctatggttctttttaaagatcgaatatgttctagcatctttaaaagatttgtcagaatgtaaacatttgttttgaggtcatttaagcctcaaacaaaatttcttggacttatttcgttggagggaacgagacatctcgagatctaaatgtgtatagaacatatattttttatgggtatcaaatataattgtgtgtaaagcacgtacatagtactataataatgaaa

SEQ ID NO: 22054 - DNA, 1021 bp, Zea Mays
gttatttctaactattaagtgttaattatctaatgtatttaatgaagtaacacagttagacttgcctaaagaggccagtgaagcttcactggctgcatagagaagtacttttttattatcatgtaaatgcatggttctttggaaccatttggcctatctgattaattattactataaccgggaatgggggcccgaggctataacccggactcctcgccctcgtacctcgttgctggcgaagagcgtcatcaatggcgagtggaggttcactacacagccgccggatcttggagcatcattcgcggtcttggcgcgtctacgcaactgtatcctaagggcgtcgaagaggagagacggtacgccggtggcgacaaggtacgatagatttgaactggagtgtggaggtatcgtcggccagtgccatcagcgatgggtggaggtttccgtcgagtcgaggaaggagcgcttcgtgtaaagatgttgtttgtttattgttattatcttatcggaagtgccgtcaaggaagatgacgatggtggtagggatcgacgatagcgagcacaacttctacacgctgaagtgggcgcactgcagcacttcttcccgccgaccaagctgcaacactactgccttgttgtcgtcaccgccaagccctctgtcgcctccattgttcgccctgccaacctagggagggcacattgtggcggctacgagagaccgattttcctgtgtggtggtgacaacgacaccgtggagccaagtcaatgtcggcaagctgatttttcagattggaacctatggttctttttaaagatcgaatatgttctagcatctttaaaagatttgtcagaatgtaaacatttgttttgaggtcatttaagcctcaaacaaaatttcttggacttatttcgttggagggaacgagacatctcgagatctaaatgtgtatagaacatatattttttatgggtatcaaatataattgtgtgtaaagcacgtacatagtactataataatgaaa

SEQ ID NO: 22055 - DNA, 2207 bp, Zea Mays
gttatttctaactattaagtgttaattatctaatgtatttaatgaagtaacacagttagacttgcctaaagaggccagtgaagcttcactggctgcatagagaagtacttttttattatcatgtaaatgcatggttctttggaaccatttggcctatctgattaattattactataaccgggaatgggggcccgaggctataacccggactcctcgccctcgtacctcgttgctggcgaagagcgtcatcaatggcgagtggaggttcactacacagccgccggatcttggagcatcattcgcggtcttggcgcgtctacgcaactgtatcctaagggcgtcgaagaggagagacggtacgccggtggcgacaaggtacgatagatttgaactggagtgtggaggtatcgtcggccagtgccatcagcgatgggtggaggtttccgtcgagtcgaggaaggagcgcttcgtgtaaagggatcgacgatagcgagcacaacttctacacgctgaagtgggcgcactgcagcacttcttcccgccgaccaagctgcaacactactgccttgttgtcgtcaccgccaagccctctgtcgcctccattgttcgccctgccaacctaggcaccgcgaatgtgttgtcgtatgtggggagcagacagtcaacttgcatctaggtctaaataaaatagtagtgattaaatctttgaatctgtagatcaaaccatctcaagtaattttagttttgttatgaaaatttttagctcagatgaaataattgcattttgattattaagatttaacatacatctggttctatgaggaaggaaatcataagtggagattgaagttgatcaacttgacactcgaataaaagaatcaacaaatattgcaagtgctgaaagttgtgactgctcaagtccaattgctttatcacacaagttctggtggagatacttattctagaatcttcaaaagcatcaacgttagtgttcaagggactgattctggactttcaacttaatgcttctctacctgttgtcatactgaagctactgctcctggaagagcatcaccaacatatccctgatggccctctctgcttcatgctccaagcacttggatgttcaccttgaaatataattattaatagggactgtccaaatacttcagctaagcaaaatagcgacctccataaaaaagcaacctgtaactatctctgaaaattttgaaaaaaactgatggtaactgataagctgctgctagcaactaccgtcgcctatttgttttgtttcagaaagttaaggtgcatgaacctctgatatagcatttgacacactgtactttacacatcacccaggaggaactcttgtgtgggtgtgggtgtgggcagggctagaaggaagaaccatgcatgctactacattcatataatctttttcagaggtttaagatatcaacactaatctgactttgattgtctgaaagaatttatcatgctgctgcttactgttttcggtagggggtcaatgcttactttagctgtgcaataattcctcaatattaaaccgagtttgatcaagtaccttgaagctacaagtagcagtgatttgacaggtttactactgcctgaaacatgattgtaagtgttcttagtatatagctcttctccatttcctctccaactgtcacatgtgctcatacgcttttgccttagtttattacatgtccagaacaccaacataaagaaaacctgccctcgattagcattattcagtagagagagttgtggagaaataaagttaatttgtttgttggcgcaactaattagaccacgttttcattaacaataatactaacatgtttttgttgtagggagggcacattgtggcggctacgagagaccgattttcctgtgtggtggtgacaacgacaccgtggagccaagtcaatgtcggcaagctgatttttcagattggaacctatggttctttttaaagatcgaatatgttctagcatctttaaaagatttgtcagaatgtaaacatttgttttgaggtcatttaagcctcaaacaaaatttcttggacttatttcgttggagggaacgagacatctcgagatctaaatgtgtatagaacatatattttttatgggtatcaaatataattgtgtgtaaagcacgtacatagtactataataatgaaa

SEQ ID NO: 22056 - DNA, 2212 bp, Zea Mays
gttatttctaactattaagtgttaattatctaatgtatttaatgaagtaacacagttagacttgcctaaagaggccagtgaagcttcactggctgcatagagaagtacttttttattatcatgtaaatgcatggttctttggaaccatttggcctatctgattaattattactataaccgggaatgggggcccgaggctataacccggactcctcgccctcgtacctcgttgctggcgaagagcgtcatcaatggcgagtggaggttcactacacagccgccggatcttggagcatcattcgcggtcttggcgcgtctacgcaactgtatcctaagggcgtcgaagaggagagacggtacgccggtggcgacaaggtacgatagatttgaactggagtgtggaggtatcgtcggccagtgccatcagcgatgggtggaggtttccgtcgagtcgaggaaggagcgcttcgtgtaaagggatcgacgatagcgagcacaacttctacacgctgaagtgggcgcactgcagcacttcttcccgccgaccaagctgcaacactactgccttgttgtcgtcaccgccaagccctctgtcgcctccattgttcgccctgccaacctagtgcaggcaccgcgaatgtgttgtcgtatgtggggagcagacagtcaacttgcatctaggtctaaataaaatagtagtgattaaatctttgaatctgtagatcaaaccatctcaagtaattttagttttgttatgaaaatttttagctcagatgaaataattgcattttgattattaagatttaacatacatctggttctatgaggaaggaaatcataagtggagattgaagttgatcaacttgacactcgaataaaagaatcaacaaatattgcaagtgctgaaagttgtgactgctcaagtccaattgctttatcacacaagttctggtggagatacttattctagaatcttcaaaagcatcaacgttagtgttcaagggactgattctggactttcaacttaatgcttctctacctgttgtcatactgaagctactgctcctggaagagcatcaccaacatatccctgatggccctctctgcttcatgctccaagcacttggatgttcaccttgaaatataattattaatagggactgtccaaatacttcagctaagcaaaatagcgacctccataaaaaagcaacctgtaactatctctgaaaattttgaaaaaaactgatggtaactgataagctgctgctagcaactaccgtcgcctatttgttttgtttcagaaagttaaggtgcatgaacctctgatatagcatttgacacactgtactttacacatcacccaggaggaactcttgtgtgggtgtgggtgtgggcagggctagaaggaagaaccatgcatgctactacattcatataatctttttcagaggtttaagatatcaacactaatctgactttgattgtctgaaagaatttatcatgctgctgcttactgttttcggtagggggtcaatgcttactttagctgtgcaataattcctcaatattaaaccgagtttgatcaagtaccttgaagctacaagtagcagtgatttgacaggtttactactgcctgaaacatgattgtaagtgttcttagtatatagctcttctccatttcctctccaactgtcacatgtgctcatacgcttttgccttagtttattacatgtccagaacaccaacataaagaaaacctgccctcgattagcattattcagtagagagagttgtggagaaataaagttaatttgtttgttggcgcaactaattagaccacgttttcattaacaataatactaacatgtttttgttgtagggagggcacattgtggcggctacgagagaccgattttcctgtgtggtggtgacaacgacaccgtggagccaagtcaatgtcggcaagctgatttttcagattggaacctatggttctttttaaagatcgaatatgttctagcatctttaaaagatttgtcagaatgtaaacatttgttttgaggtcatttaagcctcaaacaaaatttcttggacttatttcgttggagggaacgagacatctcgagatctaaatgtgtatagaacatatattttttatgggtatcaaatataattgtgtgtaaagcacgtacatagtactataataatgaaa

SEQ ID NO: 22057 - DNA, 986 bp, Zea Mays
gttatttctaactattaagtgttaattatctaatgtatttaatgaagtaacacagttagacttgcctaaagaggccagtgaagcttcactggctgcatagagaagtacttttttattatcatgtaaatgcatggttctttggaaccatttggcctatctgattaattattactataaccgggaatgggggcccgaggctataacccggactcctcgccctcgtacctcgttgctggcgaagagcgtcatcaatggcgagtggaggttcactacacagccgccggatcttggagcatcattcgcggtcttggcgcgtctacgcaactgtatcctaagggcgtcgaagaggagagacggtacgccggtggcgacaaggtacgatagatttgaactggagtgtggaggtatcgtcggccagtgccatcagcgatgggtggaggtttccgtcgagtcgaggaaggagcgcttcgtgtaaagtgccgtcaaggaagatgacgatggtggtagggatcgacgatagcgagcacaacttctacacgctgaagtgggcgcactgcagcacttcttcccgccgaccaagctgcaacactactgccttgttgtcgtcaccgccaagccctctgtcgcctccattgttcgccctgccaacctagggagggcacattgtggcggctacgagagaccgattttcctgtgtggtggtgacaacgacaccgtggagccaagtcaatgtcggcaagctgatttttcagattggaacctatggttctttttaaagatcgaatatgttctagcatctttaaaagatttgtcagaatgtaaacatttgttttgaggtcatttaagcctcaaacaaaatttcttggacttatttcgttggagggaacgagacatctcgagatctaaatgtgtatagaacatatattttttatgggtatcaaatataattgtgtgtaaagcacgtacatagtactataataatgaaa

SEQ ID NO: 22058 - DNA, 2483 bp, Zea Mays
gttatttctaactattaagtgttaattatctaatgtatttaatgaagtaacacagttagacttgcctaaagaggccagtgaagcttcactggctgcatagagaagtacttttttattatcatgtaaatgcatggttctttggaaccatttggcctatctgattaattattactataaccgggaatgggggcccgaggctataacccggactcctcgccctcgtacctcgttgctggcgaagagcgtcatcaatggcgagtggaggttcactacacagccgccggatcttggagcatcattcgcggtcttggcgcgtctacgcaactgtatcctaagggcgtcgaagaggagagacggtacgccggtggcgacaaggtacgatagatttgaactggagtgtggaggtatcgtcggccagtgccatcagcgatgggtggaggtttccgtcgagtcgaggaaggagcgcttcgtgtaaaggtagcactgcttgctcacgttaatcatccctatgcctacatctatgttttggttttgctgacctgcatgaatacaaccacttgttttggtccttggtatgttttctatgttttggtttttctaatctgcattggaaggcatgttgttggtaagcattgtcgatgctctggtagaatatatcttgagttacaaatgcgagcttcagttttcacgcaacttcatgaaagcttagctttatagcgcagttcagtgttaattatttaattttgtaggcaataaaaatgcatttcttatcctttatggtagacatttctgtcctttgctactatctaactgaatagctgaaatacaatgttttcattggtcgattaatattctatccacttgaatcacaatcactcccataaagaaaatttcttttccgtaattgaagttaatgaacaatacaaccagggaattgttttgcatccattgcatgtcatttttaggtaccaaagtaaacaagctctggacagattcagtttcagtttcagtgatcctgtttgcaacatccaagcatcctgtaatcacctgtatagcagttacacctgttcatgtacatgcttttaacaataaatcaacaacttacatgatagctttattgtagatgttgtttgtttattgttattatcttatcggaagtgccgtcaaggaagatgacgatggtggtagggatcgacgatagcgagcacaacttctacacgctgaagtgggcgcactgcagcacttcttcccgccgaccaagctgcaacactactgccttgttgtcgtcaccgccaagccctctgtcgcctccattgttcgccctgccaacctaggaaggaaatcataagtggagattgaagttgatcaacttgacactcgaataaaagaatcaacaaatattgcaagtgctgaaagttgtgactgctcaagtccaattgctttatcacacaagttctggtggagatacttattctagaatcttcaaaagcatcaacgttagtgttcaaggttagtataacaagtattgcaagtgttcaaggttagtataacataatcattttaaaacgaagcaacaggtcagtgcctttgaaattaaacaaccaaaatcactgtaaattaaagtccctttgagagctcctcaaaaacaatctgaccatattttatgcttttctccaccttattttttgactttttcctccagggactgattctggactttcaacttaatgcttctctacctgttgtcatactgaagctactgctcctggaagagcatcaccaacatatccctgatggccctctctgcttcatgctccaagcacttggatgttcaccttgaaatataattattaatagggactgtccaaatacttcagctaagcaaaatagcgacctccataaaaaagcaacctgtaactatctctgaaaattttgaaaaaaactgatggtaactgataagctgctgctagcaactaccgtcgcctatttgttttgtttcagaaagttaaggtgcatgaacctctgatatagcatttgacacactgtactttacacatcacccaggaggaactcttgtgtgggtgtgggtgtgggcagggctagaaggaagaaccatgcatgctactacattcatataatctttttcagagggagggcacattgtggcggctacgagagaccgattttcctgtgtggtggtgacaacgacaccgtggagccaagtcaatgtcggcaagctgatttttcagattggaacctatggttctttttaaagatcgaatatgttctagcatctttaaaagatttgtcagaatgtaaacatttgttttgaggtcatttaagcctcaaacaaaatttcttggacttatttcgttggagggaacgagacatctcgagatctaaatgtgtatagaacatatattttttatgggtatcaaatataattgtgtgtaaagcacgtacatagtactataataatgaaa

SEQ ID NO: 22059 - DNA, 2036 bp, Zea Mays
gttatttctaactattaagtgttaattatctaatgtatttaatgaagtaacacagttagacttgcctaaagaggccagtgaagcttcactggctgcatagagaagtacttttttattatcatgtaaatgcatggttctttggaaccatttggcctatctgattaattattactataaccgggaatgggggcccgaggctataacccggactcctcgccctcgtacctcgttgctggcgaagagcgtcatcaatggcgagtggaggttcactacacagccgccggatcttggagcatcattcgcggtcttggcgcgtctacgcaactgtatcctaagggcgtcgaagaggagagacggtacgccggtggcgacaaggtacgatagatttgaactggagtgtggaggtatcgtcggccagtgccatcagcgatgggtggaggtttccgtcgagtcgaggaaggagcgcttcgtgtaaagatgttgtttgtttattgttattatcttatcggaagtgccgtcaaggaagatgacgatggtggtagggatcgacgatagcgagcacaacttctacacgctgaagtgggcgcactgcagcacttcttcccgccgaccaagctgcaacactactgccttgttgtcgtcaccgccaagccctctgtcgcctccattgttcgccctgccaacctaggcaccgcgaatgtgttgtcgtatgtggggagcagacagtcaacttgcatctaggtctaaataaaatagtagtgattaaatctttgaatctgtagatcaaaccatctcaagtaattttagttttgttatgaaaatttttagctcagatgaaataattgcattttgattattaagatttaacatacatctggttctatgaggaaggaaatcataagtggagattgaagttgatcaacttgacactcgaataaaagaatcaacaaatattgcaagtgctgaaagttgtgactgctcaagtccaattgctttatcacacaagttctggtggagatacttattctagaatcttcaaaagcatcaacgttagtgttcaaggttagtataacaagtattgcaagtgttcaaggttagtataacataatcattttaaaacgaagcaacaggtcagtgcctttgaaattaaacaaccaaaatcactgtaaattaaagtccctttgagagctcctcaaaaacaatctgaccatattttatgcttttctccaccttattttttgactttttcctccagggactgattctggactttcaacttaatgcttctctacctgttgtcatactgaagctactgctcctggaagagcatcaccaacatatccctgatggccctctctgcttcatgctccaagcacttggatgttcaccttgaaatataattattaatagggactgtccaaatacttcagctaagcaaaatagcgacctccataaaaaagcaacctgtaactatctctgaaaattttgaaaaaaactgatggtaactgataagctgctgctagcaactaccgtcgcctatttgttttgtttcagaaagttaaggtgcatgaacctctgatatagcatttgacacactgtactttacacatcacccaggaggaactcttgtgtgggtgtgggtgtgggcagggctagaaggaagaaccatgcatgctactacattcatataatctttttcagagggagggcacattgtggcggctacgagagaccgattttcctgtgtggtggtgacaacgacaccgtggagccaagtcaatgtcggcaagctgatttttcagattggaacctatggttctttttaaagatcgaatatgttctagcatctttaaaagatttgtcagaatgtaaacatttgttttgaggtcatttaagcctcaaacaaaatttcttggacttatttcgttggagggaacgagacatctcgagatctaaatgtgtatagaacatatattttttatgggtatcaaatataattgtgtgtaaagcacgtacatagtactataataatgaaa

SEQ ID NO: 22060 - DNA, 2142 bp, Zea Mays
gttatttctaactattaagtgttaattatctaatgtatttaatgaagtaacacagttagacttgcctaaagaggccagtgaagcttcactggctgcatagagaagtacttttttattatcatgtaaatgcatggttctttggaaccatttggcctatctgattaattattactataaccgggaatgggggcccgaggctataacccggactcctcgccctcgtacctcgttgctggcgaagagcgtcatcaatggcgagtggaggttcactacacagaggccgccggatcttggagcatcattcgcggtcttggcgcgtctacgcaactgtatcctaagggcgtcgaagaggagagacggtacgccggtggcgacaaggtacgatagatttgaactggagtgtggaggtatcgtcggccagtgccatcagcgatgggtggaggtttccgtcgagtcgaggaaggagcgcttcgtgtaaagatgttgtttgtttattgttattatcttatcggaagtgccgtcaaggaagatgacgatggtggtagggatcgacgatagcgagcacaacttctacacgctgaagtgggcgcactgcagcacttcttcccgccgaccaagctgcaacactactgccttgttgtcgtcaccgccaagccctctgtcgcctccattgttcgccctgccaacctaggtatgcgaatctccaatccatgtgaggattcagagctagactagatgtagcttctgacctatatgattagttatatatgtattgtaattgatcagtgcaggcaccgcgaatgtgttgtcgtatgtggggagcagacagtcaacttgcatctaggtctaaataaaatagtagtgattaaatctttgaatctgtagatcaaaccatctcaagtaattttagttttgttatgaaaatttttagctcagatgaaataattgcattttgattattaagatttaacatacatctggttctatgaggaaggaaatcataagtggagattgaagttgatcaacttgacactcgaataaaagaatcaacaaatattgcaagtgctgaaagttgtgactgctcaagtccaattgctttatcacacaagttctggtggagatacttattctagaatcttcaaaagcatcaacgttagtgttcaagggactgattctggactttcaacttaatgcttctctacctgttgtcatactgaagctactgctcctggaagagcatcaccaacatatccctgatggccctctctgcttcatgctccaagcacttggatgttcaccttgaaatataattattaatagggactgtccaaatacttcagctaagcaaaatagcgacctccataaaaaagcaacctgtaactatctctgaaaattttgaaaaaaactgatggtaactgataagctgctgctagcaactaccgtcgcctatttgttttgtttcagaaagttaaggtgcatgaacctctgatatagcatttgacacactgtactttacacatcacccaggaggaactcttgtgtgggtgtgggtgtgggcagggctagaaggaagaaccatgcatgctactacattcatataatctttttcagaggtttaagatatcaacactaatctgactttgattgtctgaaagaatttatcatgctgctgcttactgttttcggtagggggtcaatgcttactttagctgtgcaataattcctcaatattaaaccgagtttgatcaagtaccttgaagctacaagtagcagtgatttgacaggtttactactgcctgaaacatgattggagggcacattgtggcggctacgagagaccgattttcctgtgtggtggtgacaacgacaccgtggagccaagtcaatgtcggcaagctgatttttcagattggaacctatggttctttttaaagatcgaatatgttctagcatctttaaaagatttgtcagaatgtaaacatttgttttgaggtcatttaagcctcaaacaaaatttcttggacttatttcgttggagggaacgagacatctcgagatctaaatgtgtatagaacatatattttttatgggtatcaaatataattgtgtgtaaagcacgtacatagtactataataatgaaa

SEQ ID NO: 22061 - DNA, 2223 bp, Zea Mays
gttatttctaactattaagtgttaattatctaatgtatttaatgaagtaacacagttagacttgcctaaagaggccagtgaagcttcactggctgcatagagaagtacttttttattatcatgtaaatgcatggttctttggaaccatttggcctatctgattaattattactataaccgggaatgggggcccgaggctataacccggactcctcgccctcgtacctcgttgctggcgaagagcgtcatcaatggcgagtggaggttcactacacagccgccggatcttggagcatcattcgcggtcttggcgcgtctacgcaactgtatcctaagggcgtcgaagaggagagacggtacgccggtggcgacaaggtacgatagatttgaactggagtgtggaggtatcgtcggccagtgccatcagcgatgggtggaggtttccgtcgagtcgaggaaggagcgcttcgtgtaaagatgacgatggtggtagggatcgacgatagcgagcacaacttctacacgctgaagtgggcgcactgcagcacttcttcccgccgaccaagctgcaacactactgccttgttgtcgtcaccgccaagccctctgtcgcctccattgttcgccctgccaacctaggcaccgcgaatgtgttgtcgtatgtggggagcagacagtcaacttgcatctaggtctaaataaaatagtagtgattaaatctttgaatctgtagatcaaaccatctcaagtaattttagttttgttatgaaaatttttagctcagatgaaataattgcattttgattattaagatttaacatacatctggttctatgaggaaggaaatcataagtggagattgaagttgatcaacttgacactcgaataaaagaatcaacaaatattgcaagtgctgaaagttgtgactgctcaagtccaattgctttatcacacaagttctggtggagatacttattctagaatcttcaaaagcatcaacgttagtgttcaagggactgattctggactttcaacttaatgcttctctacctgttgtcatactgaagctactgctcctggaagagcatcaccaacatatccctgatggccctctctgcttcatgctccaagcacttggatgttcaccttgaaatataattattaatagggactgtccaaatacttcagctaagcaaaatagcgacctccataaaaaagcaacctgtaactatctctgaaaattttgaaaaaaactgatggtaactgataagctgctgctagcaactaccgtcgcctatttgttttgtttcagaaagttaaggtgcatgaacctctgatatagcatttgacacactgtactttacacatcacccaggaggaactcttgtgtgggtgtgggtgtgggcagggctagaaggaagaaccatgcatgctactacattcatataatctttttcagaggtttaagatatcaacactaatctgactttgattgtctgaaagaatttatcatgctgctgcttactgttttcggtagggggtcaatgcttactttagctgtgcaataattcctcaatattaaaccgagtttgatcaagtaccttgaagctacaagtagcagtgatttgacaggtttactactgcctgaaacatgattgtaagtgttcttagtatatagctcttctccatttcctctccaactgtcacatgtgctcatacgcttttgccttagtttattacatgtccagaacaccaacataaagaaaacctgccctcgattagcattattcagtagagagagttgtggagaaataaagttaatttgtttgttggcgcaactaattagaccacgttttcattaacaataatactaacatgtttttgttgtagggagggcacattgtggcggctacgagagaccgattttcctgtgtggtggtgacaacgacaccgtggagccaagtcaatgtcggcaagctgatttttcagattggaacctatggttctttttaaagatcgaatatgttctagcatctttaaaagatttgtcagaatgtaaacatttgttttgaggtcatttaagcctcaaacaaaatttcttggacttatttcgttggagggaacgagacatctcgagatctaaatgtgtatagaacatatattttttatgggtatcaaatataattgtgtgtaaagcacgtacatagtactataataatgaaa

SEQ ID NO: 22062 - DNA, 2228 bp, Zea Mays
gttatttctaactattaagtgttaattatctaatgtatttaatgaagtaacacagttagacttgcctaaagaggccagtgaagcttcactggctgcatagagaagtacttttttattatcatgtaaatgcatggttctttggaaccatttggcctatctgattaattattactataaccgggaatgggggcccgaggctataacccggactcctcgccctcgtacctcgttgctggcgaagagcgtcatcaatggcgagtggaggttcactacacagccgccggatcttggagcatcattcgcggtcttggcgcgtctacgcaactgtatcctaagggcgtcgaagaggagagacggtacgccggtggcgacaaggtacgatagatttgaactggagtgtggaggtatcgtcggccagtgccatcagcgatgggtggaggtttccgtcgagtcgaggaaggagcgcttcgtgtaaagatgacgatggtggtagggatcgacgatagcgagcacaacttctacacgctgaagtgggcgcactgcagcacttcttcccgccgaccaagctgcaacactactgccttgttgtcgtcaccgccaagccctctgtcgcctccattgttcgccctgccaacctagtgcaggcaccgcgaatgtgttgtcgtatgtggggagcagacagtcaacttgcatctaggtctaaataaaatagtagtgattaaatctttgaatctgtagatcaaaccatctcaagtaattttagttttgttatgaaaatttttagctcagatgaaataattgcattttgattattaagatttaacatacatctggttctatgaggaaggaaatcataagtggagattgaagttgatcaacttgacactcgaataaaagaatcaacaaatattgcaagtgctgaaagttgtgactgctcaagtccaattgctttatcacacaagttctggtggagatacttattctagaatcttcaaaagcatcaacgttagtgttcaagggactgattctggactttcaacttaatgcttctctacctgttgtcatactgaagctactgctcctggaagagcatcaccaacatatccctgatggccctctctgcttcatgctccaagcacttggatgttcaccttgaaatataattattaatagggactgtccaaatacttcagctaagcaaaatagcgacctccataaaaaagcaacctgtaactatctctgaaaattttgaaaaaaactgatggtaactgataagctgctgctagcaactaccgtcgcctatttgttttgtttcagaaagttaaggtgcatgaacctctgatatagcatttgacacactgtactttacacatcacccaggaggaactcttgtgtgggtgtgggtgtgggcagggctagaaggaagaaccatgcatgctactacattcatataatctttttcagaggtttaagatatcaacactaatctgactttgattgtctgaaagaatttatcatgctgctgcttactgttttcggtagggggtcaatgcttactttagctgtgcaataattcctcaatattaaaccgagtttgatcaagtaccttgaagctacaagtagcagtgatttgacaggtttactactgcctgaaacatgattgtaagtgttcttagtatatagctcttctccatttcctctccaactgtcacatgtgctcatacgcttttgccttagtttattacatgtccagaacaccaacataaagaaaacctgccctcgattagcattattcagtagagagagttgtggagaaataaagttaatttgtttgttggcgcaactaattagaccacgttttcattaacaataatactaacatgtttttgttgtagggagggcacattgtggcggctacgagagaccgattttcctgtgtggtggtgacaacgacaccgtggagccaagtcaatgtcggcaagctgatttttcagattggaacctatggttctttttaaagatcgaatatgttctagcatctttaaaagatttgtcagaatgtaaacatttgttttgaggtcatttaagcctcaaacaaaatttcttggacttatttcgttggagggaacgagacatctcgagatctaaatgtgtatagaacatatattttttatgggtatcaaatataattgtgtgtaaagcacgtacatagtactataataatgaaa

SEQ ID NO: 22063 - DNA, 2034 bp, Zea Mays
gttatttctaactattaagtgttaattatctaatgtatttaatgaagtaacacagttagacttgcctaaagaggccagtgaagcttcactggctgcatagagaagtacttttttattatcatgtaaatgcatggttctttggaaccatttggcctatctgattaattattactataaccgggaatgggggcccgaggctataacccggactcctcgccctcgtacctcgttgctggcgaagagcgtcatcaatggcgagtggaggttcactacacagccgccggatcttggagcatcattcgcggtcttggcgcgtctacgcaactgtatcctaagggcgtcgaagaggagagacggtacgccggtggcgacaaggtacgatagatttgaactggagtgtggaggtatcgtcggccagtgccatcagcgatgggtggaggtttccgtcgagtcgaggaaggagcgcttcgtgtaaagtgccgtcaaggaagatgacgatggtggtagggatcgacgatagcgagcacaacttctacacgctgaagtgggcgcactgcagcacttcttcccgccgaccaagctgcaacactactgccttgttgtcgtcaccgccaagccctctgtcgcctccattgttcgccctgccaacctaggaaatcataagtggagattgaagttgatcaacttgacactcgaataaaagaatcaacaaatattgcaagtgctgaaagttgtgactgctcaagtccaattgctttatcacacaagttctggtggagatacttattctagaatcttcaaaagcatcaacgttagtgttcaagggactgattctggactttcaacttaatgcttctctacctgttgtcatactgaagctactgctcctggaagagcatcaccaacatatccctgatggccctctctgcttcatgctccaagcacttggatgttcaccttgaaatataattattaatagggactgtccaaatacttcagctaagcaaaatagcgacctccataaaaaagcaacctgtaactatctctgaaaattttgaaaaaaactgatggtaactgataagctgctgctagcaactaccgtcgcctatttgttttgtttcagaaagttaaggtgcatgaacctctgatatagcatttgacacactgtactttacacatcacccaggaggaactcttgtgtgggtgtgggtgtgggcagggctagaaggaagaaccatgcatgctactacattcatataatctttttcagaggtttaagatatcaacactaatctgactttgattgtctgaaagaatttatcatgctgctgcttactgttttcggtagggggtcaatgcttactttagctgtgcaataattcctcaatattaaaccgagtttgatcaagtaccttgaagctacaagtagcagtgatttgacaggtttactactgcctgaaacatgattgtaagtgttcttagtatatagctcttctccatttcctctccaactgtcacatgtgctcatacgcttttgccttagtttattacatgtccagaacaccaacataaagaaaacctgccctcgattagcattattcagtagagagagttgtggagaaataaagttaatttgtttgttggcgcaactaattagaccacgttttcattaacaataatactaacatgtttttgttgtagggagggcacattgtggcggctacgagagaccgattttcctgtgtggtggtgacaacgacaccgtggagccaagtcaatgtcggcaagctgatttttcagattggaacctatggttctttttaaagatcgaatatgttctagcatctttaaaagatttgtcagaatgtaaacatttgttttgaggtcatttaagcctcaaacaaaatttcttggacttatttcgttggagggaacgagacatctcgagatctaaatgtgtatagaacatatattttttatgggtatcaaatataattgtgtgtaaagcacgtacatagtactataataatgaaa

SEQ ID NO: 22064 - DNA, 2029 bp, Zea Mays
gttatttctaactattaagtgttaattatctaatgtatttaatgaagtaacacagttagacttgcctaaagaggccagtgaagcttcactggctgcatagagaagtacttttttattatcatgtaaatgcatggttctttggaaccatttggcctatctgattaattattactataaccgggaatgggggcccgaggctataacccggactcctcgccctcgtacctcgttgctggcgaagagcgtcatcaatggcgagtggaggttcactacacagccgccggatcttggagcatcattcgcggtcttggcgcgtctacgcaactgtatcctaagggcgtcgaagaggagagacggtacgccggtggcgacaaggtacgatagatttgaactggagtgtggaggtatcgtcggccagtgccatcagcgatgggtggaggtttccgtcgagtcgaggaaggagcgcttcgtgtaaagatgttgtttgtttattgttattatcttatcggaagtgccgtcaaggaagatgacgatggtggtagggatcgacgatagcgagcacaacttctacacgctgaagtgggcgcactgcagcacttcttcccgccgaccaagctgcaacactactgccttgttgtcgtcaccgccaagccctctgtcgcctccattgttcgccctgccaacctaggaaatcataagtggagattgaagttgatcaacttgacactcgaataaaagaatcaacaaatattgcaagtgctgaaagttgtgactgctcaagtccaattgctttatcacacaagttctggtggagatacttattctagaatcttcaaaagcatcaacgttagtgttcaaggttagtataacaagtattgcaagtgttcaaggttagtataacataatcattttaaaacgaagcaacaggtcagtgcctttgaaattaaacaaccaaaatcactgtaaattaaagtccctttgagagctcctcaaaaacaatctgaccatattttatgcttttctccaccttattttttgactttttcctccagggactgattctggactttcaacttaatgcttctctacctgttgtcatactgaagctactgctcctggaagagcatcaccaacatatccctgatggccctctctgcttcatgctccaagcacttggatgttcaccttgaaatataattattaatagggactgtccaaatacttcagctaagcaaaatagcgacctccataaaaaagcaacctgtaactatctctgaaaattttgaaaaaaactgatggtaactgataagctgctgctagcaactaccgtcgcctatttgttttgtttcagaaagttaaggtgcatgaacctctgatatagcatttgacacactgtactttacacatcacccaggaggaactcttgtgtgggtgtgggtgtgggcagggctagaaggaagaaccatgcatgctactacattcatataatctttttcagaggtttaagatatcaacactaatctgactttgattgtctgaaagaatttatcatgctgctgcttactgttttcggtagggggtcaatgcttactttagctgtgcaataattcctcaatattaaaccgagtttgatcaagtaccttgaagctacaagtagcagtgatttgacaggtttactactgcctgaaacatgattggagggcacattgtggcggctacgagagaccgattttcctgtgtggtggtgacaacgacaccgtggagccaagtcaatgtcggcaagctgatttttcagattggaacctatggttctttttaaagatcgaatatgttctagcatctttaaaagatttgtcagaatgtaaacatttgttttgaggtcatttaagcctcaaacaaaatttcttggacttatttcgttggagggaacgagacatctcgagatctaaatgtgtatagaacatatattttttatgggtatcaaatataattgtgtgtaaagcacgtacatagtactataataatgaaa

SEQ ID NO: 22065 - DNA, 2715 bp, Zea Mays
gttatttctaactattaagtgttaattatctaatgtatttaatgaagtaacacagttagacttgcctaaagaggccagtgaagcttcactggctgcatagagaagtacttttttattatcatgtaaatgcatggttctttggaaccatttggcctatctgattaattattactataaccgggaatgggggcccgaggctataacccggactcctcgccctcgtacctcgttgctggcgaagagcgtcatcaatggcgagtggaggttcactacacagccgccggatcttggagcatcattcgcggtcttggcgcgtctacgcaactgtatcctaagggcgtcgaagaggagagacggtacgccggtggcgacaaggtacgatagatttgaactggagtgtggaggtatcgtcggccagtgccatcagcgatgggtggaggtttccgtcgagtcgaggaaggagcgcttcgtgtaaaggtagcactgcttgctcacgttaatcatccctatgcctacatctatgttttggttttgctgacctgcatgaatacaaccacttgttttggtccttggtatgttttctatgttttggtttttctaatctgcattggaaggcatgttgttggtaagcattgtcgatgctctggtagaatatatcttgagttacaaatgcgagcttcagttttcacgcaacttcatgaaagcttagctttatagcgcagttcagtgttaattatttaattttgtaggcaataaaaatgcatttcttatcctttatggtagacatttctgtcctttgctactatctaactgaatagctgaaatacaatgttttcattggtcgattaatattctatccacttgaatcacaatcactcccataaagaaaatttcttttccgtaattgaagttaatgaacaatacaaccagggaattgttttgcatccattgcatgtcatttttaggtaccaaagtaaacaagctctggacagattcagtttcagtttcagtgatcctgtttgcaacatccaagcatcctgtaatcacctgtatagcagttacacctgttcatgtacatgcttttaacaataaatcaacaacttacatgatagctttattgtagatgttgtttgtttattgttattatcttatcggaagtgccgtcaaggaagatgacgatggtggtagggatcgacgatagcgagcacaacttctacacgctgaagtgggcgcactgcagcacttcttcccgccgaccaagctgcaacactactgccttgttgtcgtcaccgccaagccctctgtcgcctccattgttcgccctgccaacctaggaaatcataagtggagattgaagttgatcaacttgacactcgaataaaagaatcaacaaatattgcaagtgctgaaagttgtgactgctcaagtccaattgctttatcacacaagttctggtggagatacttattctagaatcttcaaaagcatcaacgttagtgttcaagggactgattctggactttcaacttaatgcttctctacctgttgtcatactgaagctactgctcctggaagagcatcaccaacatatccctgatggccctctctgcttcatgctccaagcacttggatgttcaccttgaaatataattattaatagggactgtccaaatacttcagctaagcaaaatagcgacctccataaaaaagcaacctgtaactatctctgaaaattttgaaaaaaactgatggtaactgataagctgctgctagcaactaccgtcgcctatttgttttgtttcagaaagttaaggtgcatgaacctctgatatagcatttgacacactgtactttacacatcacccaggaggaactcttgtgtgggtgtgggtgtgggcagggctagaaggaagaaccatgcatgctactacattcatataatctttttcagaggtttaagatatcaacactaatctgactttgattgtctgaaagaatttatcatgctgctgcttactgttttcggtagggggtcaatgcttactttagctgtgcaataattcctcaatattaaaccgagtttgatcaagtaccttgaagctacaagtagcagtgatttgacaggtttactactgcctgaaacatgattgtaagtgttcttagtatatagctcttctccatttcctctccaactgtcacatgtgctcatacgcttttgccttagtttattacatgtccagaacaccaacataaagaaaacctgccctcgattagcattattcagtagagagagttgtggagaaataaagttaatttgtttgttggcgcaactaattagaccacgttttcattaacaataatactaacatgtttttgttgtagggagggcacattgtggcggctacgagagaccgattttcctgtgtggtggtgacaacgacaccgtggagccaagtcaatgtcggcaagctgatttttcagattggaacctatggttctttttaaagatcgaatatgttctagcatctttaaaagatttgtcagaatgtaaacatttgttttgaggtcatttaagcctcaaacaaaatttcttggacttatttcgttggagggaacgagacatctcgagatctaaatgtgtatagaacatatattttttatgggtatcaaatataattgtgtgtaaagcacgtacatagtactataataatgaaa

SEQ ID NO: 22066 - DNA, 1310 bp, Zea Mays
attttatcccaggagaggtcgctgcgggcgagctggctcgctcacccacccttgcccgccgtttacggtttagccgcgtgctctctctgtctccctccctccctgtcggggacaattcggctaccgctgccgccctacgccaggttcccagctcttcgccaggcccttctccggcgacgagcacccaccaggccaccaggaggttgtactcaaagaatggatttatggattacttcttgctcacaagcagcgagacatcatgcaaggataggttcagttgattttcctgttaagaagaacgtgaagtcatcccaagtgcaaaacgcgacatgttttgttggtttagtgcggcagttgcagtgcagacggtcagcaaaaagccatatcctgaatgtaaagtctgatacagtagcccaccaaaaggtttctggtgtaagctggagtttggaaaatatgccacgaagaataggatgtgtagtctctggactaggttttgcagcgtatgggctggcgagtgctgagggtcctgttaacaacaacatagatagcactgaatctgccatgtcatcaacaaatttatctcatgggaaagaagttcacacagactattctgttactggcattcctggtgatggaagatgcctgtttcgttctgtggttcacggtgcctacattaggtcaaggaagcccatacctaatgaggatcatcaaagaaggctagctgatgagttgagaacaaaggtcgcagatgaatttatcaagaggcgggcagagactgaatggtttgttgagggggacttcgacacgtacgtatctcagattaggaagccacatgtctggggaggcgagccagagctgttgatggcttcacatgttcttcagatgccaatcaccgtctacatgcacgataaagccgctggtggtctaatagcgatcgcggaatacggccaagagcacgggacggaagctcccgtccaagttctttaccatggctatggccattatgatgcgctgcagataccaggagagggtggtccgaggtcaagactgtaacgttagtggctctgaatctaaatggcaagttccggttcgatactttcttcctttgtacatgtacgtgcatacatacatactagtcactaacgcgcgcctagcgcgcgataggttgtataattttattaaaatgtgtgtatagcatgtattcgtaagagaaaaaaagattaagttatcagaaagtaagtaactatgttgggattcataagaaaacaaaaaaaagtatcttgtcataagaaaacagacatgaattaatt

SEQ ID NO: 22067 - DNA, 1314 bp, Zea Mays
attttatcccaggagaggtcgctgcgggcgagctggctcgctcacccacccttgcccgccgtttacggtttagccgcgtgctctctctgtctccctccctccctgtcggggacaattcggctaccgctgccgccctacgccaggttcccagctcttcgccaggcccttctccggcgacgagcacccaccaggccaccagttgacacttaatactacctgaatctaatgcttatcaatatgcctaatatttgctggcggagctttactttgtgcaacacatattctccatctaatcaactacaaggaggttgtactcaaagaatggatttatggattacttcttgctcacaagcagcgagacatcatgcaaggataggttcagttgattttcctgttaagaagaacgtgaagtcatcccaagtgcaaaacgcgacatgttttgttggtttagtgcggcagttgcagtgcagacggtcagcaaaaagccatatcctgaatgtaaagtctgatacagtagcccaccaaaaggtttctggtgtaagctggagtttggaaaatatgccacgaagaataggatgtgtagtctctggactaggttttgcagcgtatgggctggcgagtgctgagggtcctgttaacaacaacatagatagcactgaatctgccatgtcatcaacaaatttatctcatgggaaagaagttcacacagactattctgttactggcattcctggtgatggaagatgcctgtttcgttctgtggttcacggtgcctacattaggtcaaggaagcccatacctaatgaggatcatcaaagaaggctagctgatgagttgagaacaaaggtcgcagatgaatttatcaagaggcgggcagagactgaatggtttgttgagggggacttcgacacgtacgtatctcagattaggaagccacatgtctggggaggcgagccagagctgttgatggcttcacatgttcttcagatgccaatcaccgtctacatgcacgataaagccgctggtggtctaatagcgatcgcggaatacggccaagagcacgggacggaagctcccgtccaagttctttaccatggctatggccattatgatgcgctgcagataccaggagagggtggtccgaggtcaagactgtaacgttagtggctctgaatctaaatgaaccgaatgtaagtaaaatacaaaagaagaaggaaggccgaattgaaagaatcgaaagtggaagaactggacgtgccttcaaacaattagaagacaatcctagcagaagcccccgttgctatagggaaaaac

SEQ ID NO: 22068 - DNA, 1393 bp, Zea Mays
attttatcccaggagaggtcgctgcgggcgagctggctcgctcacccacccttgcccgccgtttacggtttagccgcgtgctctctctgtctccctccctccctgtcggggacaattcggctaccgctgccgccctacgccaggttcccagctcttcgccaggcccttctccggcgacgagcacccaccaggccaccagttgacacttaatactacctgaatctaatgcttatcaatatgcctaatatttgctggcggagctttactttgtgcaacacatattctccatctaatcaactacaaggaggttgtactcaaagaatggatttatggattacttcttgctcacaagcagcgagacatcatgcaaggataggttcagttgattttcctgttaagaagaacgtgaagtcatcccaagtgcaaaacgcgacatgttttgttggtttagtgcggcagttgcagtgcagacggtcagcaaaaagccatatcctgaatgtaaagtctgatacagtagcccaccaaaaggtttctggtgtaagctggagtttggaaaatatgccacgaagaataggatgtgtagtctctggactaggttttgcagcgtatgggctggcgagtgctgagggtcctgttaacaacaacatagatagcactgaatctgccatgtcatcaacaaatttatctcatgggaaagaagttcacacagactattctgttactggcattcctggtgatggaagatgcctgtttcgttctgtggttcacggtgcctacattaggtcaaggaagcccatacctaatgaggatcatcaaagaaggctagctgatgagttgagaacaaaggtcgcagatgaatttatcaagaggcgggcagagactgaatggtttgttgagggggacttcgacacgtacgtatctcagattaggaagccacatgtctggggaggcgagccagagctgttgatggcttcacatgttcttcagatgccaatcaccgtctacatgcacgataaagccgctggtggtctaatagcgatcgcggaatacggccaagagcacgggacggaagctcccgtccaagttctttaccatggctatggccattatgatgcgctgcagataccaggagagggtggtccgaggtcaagactgtaacgttagtggctctgaatctaaatgcgagcaagttgtctctatggctggagatggttggtgctacgccgacgcagaagaggaggcgaaggtgagcacgtccggatctagcgtgcggtcggcgatcgtcgtcacgtcggacgagaaagagatggtggagatggacgcgtccagctccgacgttgtctcggcgctcgtcgccatggcgagctggtgcgtgtcgtgctgggcaccagtg

SEQ ID NO: 22069 - DNA, 1499 bp, Zea Mays
attttatcccaggagaggtcgctgcgggcgagctggctcgctcacccacccttgcccgccgtttacggtttagccgcgtgctctctctgtctccctccctccctgtcggggacaattcggctaccgctgccgccctacgccaggttcccagctcttcgccaggcccttctccggcgacgagcacccaccaggccaccagttgacacttaatactacctgaatctaatgcttatcaatatgcctaatatttgctggcggagctttactttgtgcaacacatattctccatctaatcaactacaaggaggttgtactcaaagaatggatttatggattacttcttgctcacaagcagcgagacatcatgcaaggataggttcagttgattttcctgttaagaagaacgtgaagtcatcccaagtgcaaaacgcgacatgttttgttggtttagtgcggcagttgcagtgcagacggtcagcaaaaagccatatcctgaatgtaaagtctgatacagtagcccaccaaaaggtttctggtgtaagctggagtttggaaaatatgccacgaagaataggatgtgtagtctctggactaggttttgcagcgtatgggctggcgagtgctgagggtcctgttaacaacaacatagatagcactgaatctgccatgtcatcaacaaatttatctcatgggaaagaagttcacacagactattctgttactggcattcctggtgatggaagatgcctgtttcgttctgtggttcacggtgcctacattaggtcaaggaagcccatacctaatgaggatcatcaaagaaggctagctgatgagttgagaacaaaggtcgcagatgaatttatcaagaggcgggcagagactgaatggtttgttgagggggacttcgacacgtacgtatctcagattaggaagccacatgtctggggaggcgagccagagctgttgatggcttcacatgttcttcagatgccaatcaccgtctacatgcacgataaagccgctggtggtctaatagcgatcgcggaatacggccaagagcacgggacggaagctcccgtccaagttctttaccatggctatggccattatgatgcgctgcagataccaggagagggtggtccgaggtcaagactgtaacgttagtggctctgaatctaaatgaaccgaatgtaagtaaaatacaaaagaagaaggaaggccgaattgaaagaatcgaaagtggaagaactggacgtgccttcaaacaattagaagacaatcctagcagcgagcaagttgtctctatggctggagatggttggtgctacgccgacgcagaagaggaggcgaaggtgagcacgtccggatctagcgtgcggtcggcgatcgtcgtcacgtcggacgagaaagagatggtggagatggacgcgtccagctccgacgttgtctcggcgctcgtcgccatggcgagctggtgcgtgtcgtgctgggcaccagtg

SEQ ID NO: 22070 - DNA, 1512 bp, Zea Mays
attttatcccaggagaggtcgctgcgggcgagctggctcgctcacccacccttgcccgccgtttacggtttagccgcgtgctctctctgtctccctccctccctgtcggggacaattcggctaccgctgccgccctacgccaggttcccagctcttcgccaggcccttctccggcgacgagcacccaccaggccaccagttgacacttaatactacctgaatctaatgcttatcaatatgcctaatatttgctggcggagctttactttgtgcaacacatattctccatctaatcaactacaaggaggttgtactcaaagaatggatttatggattacttcttgctcacaagcagcgagacatcatgcaaggataggttcagttgattttcctgttaagaagaacgtgaagtcatcccaagtgcaaaacgcgacatgttttgttggtttagtgcggcagttgcagtgcagacggtcagcaaaaagccatatcctgaatgtaaagtctgatacagtagcccaccaaaaggtttctggtgtaagctggagtttggaaaatatgccacgaagaataggatgtgtagtctctggactaggttttgcagcgtatgggctggcgagtgctgagggtcctgttaacaacaacatagatagcactgaatctgccatgtcatcaacaaatttatctcatgggaaagaagttcacacagactattctgttactggcattcctggtgatggaagatgcctgtttcgttctgtggttcacggtgcctacattaggtcaaggaagcccatacctaatgaggatcatcaaagaaggctagctgatgagttgagaacaaaggtcgcagatgaatttatcaagaggcgggcagagactgaatggtttgttgagggggacttcgacacgtacgtatctcagattaggaagccacatgtctggggaggcgagccagagctgttgatggcttcacatgttcttcagatgccaatcaccgtctacatgcacgataaagccgctggtggtctaatagcgatcgcggaatacggccaagagcacgggacggaagctcccgtccaagttctttaccatggctatggccattatgatgcgctgcagataccaggagagggtggtccgaggtcaagactgtaacgttagtggctctgaatctaaatgcgacatccgctttggtggcaaagagcagatggtccttcgacgcgcctggaggtcggaggtggaccgacatccgctgatgagctctcacgatcttcagactcctgattccagagcttattcttctgtatatctccgcgtggctctgtttctcctagccaacaaacaagccgtgacagaagaacgacgctgagaatatgagaccatgctcggtcgtcctcgatcgatcgatcaaacaaacaagcagaagaagaaaaaaaattccaggcccatgccgtccgctcatctcagccgcagccgtgacgaagtgccaggtaccgtactgaggcggag

SEQ ID NO: 22071 - DNA, 2021 bp, Zea Mays
ctctattcgcctgctgtgtaaaaccgagtacccccaagcctaacctaagctattttggctatttgtaatcggatctagtctactgcaagtgtataaatatgtgttattatgcctcctaatttcattaatttgggaaaaatatcgggtgtagtcttttactgggtccaacctaagtcttgtttagtggcttaggcctttctaaacctctaaaactaatagttagcagctaaaattacttcagaggtttagaacaggtcagttaatagaccaactaattgttagttttcctctcaaatagctatactccaacccagataaaactagctaataacttattacctgactaacaattagtgctaggggccttagtatgcacgaattataatgatataaggagtcacctggatgtaggtttagtggcttagtatgcacgaattctaatgatataagctgtctatgattttatatatctgggatttggggatgctttttagcatattttgtatccttaaaagttcataaaggtagcaaaggtgaatcctatacggaagggtgtaacaggtcatttctatcttggtgtttgtcgttaaaaataaaatggttatttgccaaagtttggtgtggccttctggacagacttcaatccttaaagcttttttattttattaccttacctatagcttcattgagtgtaatataaccttctttccacttgtatgtggtgtcttattttatttggccaaataatcctatgttccacactacgactgattattaattatgattccctgtaaatacttttcagttgacacttaatactacctgaatctaatgcttatcaatatgcctaatatttgctggcggagctttactttgtgcaacacatattctccatctaatcaactacaaggaggttgtactcaaagaatggatttatggattacttcttgctcacaagcagcgagacatcatgcaaggataggttcagttgattttcctgttaagaagaacgtgaagtcatcccaagtgcaaaacgcgacatgttttgttggtttagtgcggcagttgcagtgcagacggtcagcaaaaagccatatcctgaatgtaaagtctgatacagtagcccaccaaaaggtttctggtgtaagctggagtttggaaaatatgccacgaagaataggatgtgtagtctctggactaggttttgcagcgtatgggctggcgagtgctgagggtcctgttaacaacaacatagatagcactgaatctgccatgtcatcaacaaatttatctcatgggaaagaagttcacacagactattctgttactggcattcctggtgatggaagatgcctgtttcgttctgtggttcacggtgcctacattaggtcaaggaagcccatacctaatgaggatcatcaaagaaggctagctgatgagttgagaacaaaggtcgcagatgaatttatcaagaggcgggcagagactgaatggtttgttgagggggacttcgacacgtacgtatctcagattaggaagccacatgtctggggaggcgagccagagctgttgatggcttcacatgttcttcagatgccaatcaccgtctacatgcacgataaagccgctggtggtctaatagcgatcgcggaatacggccaagagcacgggacggaagctcccgtccaagttctttaccatggctatggccattatgatgcgctgcagataccaggagagggtggtccgaggtcaagactgtaacgttagtggctctgaatctaaatggcaagttccggttcgatactttcttcctttgtacatgtacgtgcatacatacatactagtcactaacgcgcgcctagcgcgcgataggttgtataattttattaaaatgtgtgtatagcatgtattcgtaagagaaaaaaagattaagttatcagaaagtaagtaactatgttgggattcataagaaaacaaaaaaaagtatcttgtcataagaaaacagacatgaattaatt

SEQ ID NO: 22072 - DNA, 2225 bp, Zea Mays
ctctattcgcctgctgtgtaaaaccgagtacccccaagcctaacctaagctattttggctatttgtaatcggatctagtctactgcaagtgtataaatatgtgttattatgcctcctaatttcattaatttgggaaaaatatcgggtgtagtcttttactgggtccaacctaagtcttgtttagtggcttaggcctttctaaacctctaaaactaatagttagcagctaaaattacttcagaggtttagaacaggtcagttaatagaccaactaattgttagttttcctctcaaatagctatactccaacccagataaaactagctaataacttattacctgactaacaattagtgctaggggccttagtatgcacgaattataatgatataaggagtcacctggatgtaggtttagtggcttagtatgcacgaattctaatgatataagctgtctatgattttatatatctgggatttggggatgctttttagcatattttgtatccttaaaagttcataaaggtagcaaaggtgaatcctatacggaagggtgtaacaggtcatttctatcttggtgtttgtcgttaaaaataaaatggttatttgccaaagtttggtgtggccttctggacagacttcaatccttaaagcttttttattttattaccttacctatagcttcattgagtgtaatataaccttctttccacttgtatgtggtgtcttattttatttggccaaataatcctatgttccacactacgactgattattaattatgattccctgtaaatacttttcagttgacacttaatactacctgaatctaatgcttatcaatatgcctaatatttgctggcggagctttactttgtgcaacacatattctccatctaatcaactacaaggaggttgtactcaaagaatggatttatggattacttcttgctcacaagcagcgagacatcatgcaaggataggttcagttgattttcctgttaagaagaacgtgaagtcatcccaagtgcaaaacgcgacatgttttgttggtttagtgcggcagttgcagtgcagacggtcagcaaaaagccatatcctgaatgtaaagtctgatacagtagcccaccaaaaggtttctggtgtaagctggagtttggaaaatatgccacgaagaataggatgtgtagtctctggactaggttttgcagcgtatgggctggcgagtgctgagggtcctgttaacaacaacatagatagcactgaatctgccatgtcatcaacaaatttatctcatgggaaagaagttcacacagactattctgttactggcattcctggtgatggaagatgcctgtttcgttctgtggttcacggtgcctacattaggtcaaggaagcccatacctaatgaggatcatcaaagaaggctagctgatgagttgagaacaaaggtcgcagatgaatttatcaagaggcgggcagagactgaatggtttgttgagggggacttcgacacgtacgtatctcagattaggaagccacatgtctggggaggcgagccagagctgttgatggcttcacatgttcttcagatgccaatcaccgtctacatgcacgataaagccgctggtggtctaatagcgatcgcggaatacggccaagagcacgggacggaagctcccgtccaagttctttaccatggctatggccattatgatgcgctgcagataccaggagagggtggtccgaggtcaagactgtaacgttagtggctctgaatctaaatgaaccgaatgtaagtaaaatacaaaagaagaaggaaggccgaattgaaagaatcgaaagtggaagaactggacgtgccttcaaacaattagaagacaatcctagcaggttagatatttagaggtctacgaccataatagttgttctgttgccaaagggaatatagcgtggttgagagagagaaacatctggagaaaaaggaaaaaaaacaaaatatgcacctgttagatcagatagtagagaagaatcgaatgcggaatccattggctcaatggaaatgcagcgatttttttaatgcaaaatggtttacagaaaaaatctggagaaaaacaaaaacaaaatatgcacatcttagattgaatagcagggaggaatcgaatgcggaatctattggctcaatggaaatgcagcgatttttttaatgcagcgtggttgacag

SEQ ID NO: 22073 - DNA, 2030 bp, Zea Mays
attatataaatagcgcccagctctcaccccacatgttaaactgctacggctacacacctccccagtcaacacagctcagctcggctcggctagcgagctcctcttatctacacagtccccgacgcccgcccgcccgcaccgctgcgactgcgagcgacgcaccgacccccttcgctggtccctgcctggttctggctgccttcttccccctcccgtccgatcggtttcaccattcacggattcacccgtctgcgcgctccaaccgccgcagttcgtactggcgcggtggacagggagctagctaggcggggttgattgcagttggggaggcgggagtgtgtgtgtgatgtacggcgcgccggtgcccaaggacctcaacctaccagcagccctgccgcagccgaccagggccggtgcgaggacgccaccgcagcagcagcagcagatgagctccgcggggctgctgcgctacaggtcggcgccgagcacgctgctcggcgaggtgatgtgcggggatcaggacttccccgcgacggatggcggcggagggcacggaccaccggaccacgccgccacggacaacgtcctcgcgctctttctcgccgggcaccactcagaggcccgggactgcaagcctccccgccccgccgcggccgctcacttcatggacgaagctgccgcctcgcaacagcagcagctcatgtaccagtcgcagcagcagcagcagatggccgccatggaggggctgtaccacaacgtcagctccggtggcacggagcacggtgcgggcgttggcgctggtaataacagcctgatccgccagagcagctcccccgccggcttcctcaccaacgggtacggcggcatgctccgtgcgggcatgggcatggccggcggcttcaggaacggcgtcagcgacgcgcggctcaaggggcagctgagcttcccgtcccggcaggggtcggtgatgtcgcagatctcggaggtgggcagcgaggagctcgacggcggaggcggcggcagccccgaggcggccggcagcaacgccagcggcgcgccgcgcggctacgtcggcatcccggggtacccgatgggcggcggcacgtccggcgcctggtcggacgagccgtcgccgtcgccgacgtccggcgcgaagcgccgcccccgcgactccggtcccgcgccgcagaacgtgcagcagcaaccgctggcgccgcagctcagcctgcccagcggcggcaagccggcctcggcggagatggcggcgatcgagaagttcctgcagttccaggacgccgtcccctgcaagatccgcgccaagcgcgggtgcgccacccacccgcgcagcatcgccgagcgggtgaggaggacgaagatcagcgagcggatacggaagctgcaggagctcgtgcccaacatggaaaagcaaaccaacactgccgacatgctggatctggctgtggactacatcaaggatcttcagaagcaggtcaaggtgctgaacgacggccgcgccaactgcacctgctccggcggcggcaagctgcaggacccgttcaccagttagaaggagcagcagccggcgcgcgcgtagcagtgcgcggccatgcatggcccgccgcaaggccggcctgactgacgcctccgtgccggccggcggctaagctcgcttcgagcgctcctcctcgattggagtaagagtcgtcgaagtatagtagtatcagtgtacgtgttcggctttacatagttaactgaatgagtagtacgtagtctgttatacatgcaagttcattagcaggcaggccccacgtacgtataccagtgacacagctgcgtcagttatctgtggctcttgcagcatgtgtgtctctgtcatcgtttgcacttactgctcggatcctacgcgacacgtacatgcatatgtacgcatgcatgcacacgcacctgatccaatccgactggatgcattgcgtctgttgtgtctgcctgccggctggctggctgcgtgcgtgcaggcagtggcagtgtac

SEQ ID NO: 22074 - DNA, 1929 bp, Zea Mays
agctcctcttatctacacagtccccgacgcccgcccgcccgcaccgctgcgactgcgagcgacgcaccgacccccttcgctggtccctgcctggttctggctgccttcttccccctcccgtccgatcggtttcaccattcacggattcacccgtctgcgcgctccaaccgccgcagttcgtactggcgcggtggacagggagctagctaggcggggttgattgcagttggggaggcgggagtgtgtgtgtgatgtacggcgcgccggtgcccaaggacctcaacctaccagcagccctgccgcagccgaccagggccggtgcgaggacgccaccgcagcagcagcagcagatgagctccgcggggctgctgcgctacaggtcggcgccgagcacgctgctcggcgaggtgatgtgcggggatcaggacttccccgcgacggatggcggcggagggcacggaccaccggaccacgccgccacggacaacgtcctcgcgctctttctcgccgggcaccactcagaggcccgggactgcaagcctccccgccccgccgcggccgctcacttcatggacgaagctgccgcctcgcaacagcagcagctcatgtaccagtcgcagcagcagcagcagatggccgccatggaggggctgtaccacaacgtcagctccggtggcacggagcacggtgcgggcgttggcgctggtaataacagcctgatccgccagagcagctcccccgccggcttcctcaccaacgggtacggcggcatgctccgtgcgggcatgggcatggccggcggcttcaggaacggcgtcagcgacgcgcggctcaaggggcagctgagcttcccgtcccggcaggggtcggtgatgtcgcagatctcggaggtgggcagcgaggagctcgacggcggaggcggcggcagccccgaggcggccggcagcaacgccagcggcgcgccgcgcggctacgtcggcatcccggggtacccgatgggcggcggcacgtccggcgcctggtcggacgagccgtcgccgtcgccgacgtccggcgcgaagcgccgcccccgcgactccggtcccgcgccgcagaacgtgcagcagcaaccgctggcgccgcagctcagcctgcccagcggcggcaagccggcctcggcggagatggcggcgatcgagaagttcctgcagttccaggacgccgtcccctgcaagatccgcgccaagcgcgggtgcgccacccacccgcgcagcatcgccgagcgggtgaggaggacgaagatcagcgagcggatacggaagctgcaggagctcgtgcccaacatggaaaagcaaaccaacactgccgacatgctggatctggctgtggactacatcaaggatcttcagaagcaggtgctgaacgacggccgcgccaactgcacctgctccggcggcggcaagctgcaggacccgttcaccagttagaaggagcagcagccggcgcgcgcgtagcagtgcgcggccatgcatggcccgccgcaaggccggcctgactgacgcctccgtgccggccggcggctaagctcgcttcgagcgctcctcctcgattggagtaagagtcgtcgaagtatagtagtatcagtgtacgtgttcggctttacatagttaactgaatgagtagtacgtagtctgttatacatgcaagttcattagcaggcaggccccacgtacgtataccagtgacacagctgcgtcagttatctgtggctcttgcagcatgtgtgtctctgtcatcgtttgcacttactgctcggatcctacgcgacacgtacatgcatatgtacgcatgcatgcacacgcacctgatccaatccgactggatgcattgcgtctgttgtgtctgcctgccggctggctggctgcgtgcgtgcaggcagtggcagtgtac

SEQ ID NO: 22075 - DNA, 1661 bp, Zea Mays
caagagccagaaatatcttcgccactcctgcgcttttgcgctttttctccccccgcaccccagaaccagcacgccggtcctcctgatggccgccgccggcgagggcgaggctgagcgtgtgtcagcgctgctgcgggaaataacgggggagggcgggttcgctttcgttgcctcggcggagaaggcgggggcgggggacctgcgcgcggcggaggcggcgcgggagatggcgtgggagcagctccactcgggcccctggagcgaggtcggcaccgcctggagggacgcctacgcgctcgcctgcctcaacgtcgcgcggctccgcacccacgcggccagcggcggagatagcgaccgctccgcggcgctccgggcactcgacatggggctcatcatgggaggcaacctactgcgcgccgacctcgaggcggcactggcgcgcatctccgcggaagcgtgtggcggaagcgaaggtggcgagggggtcgtggataaggagaaccagaggtggagggaagcgctcgacaggaaccgagacatcgctgatgcactgaaaattcttccagcgaactctttatcctgtaagaaagttgagaggcgatcatgcatttccttggaggagttcatatgtaattactttttgcgcgacacccccgtcataattagtggcaccatcgaccattggcctgcaaggacaaaatggaaggacattgagtacctcaagaagattgctggagatcgtactgttcctgttgaagttggaaagaattacgtgtgtagtgagtggaagcaggagcttatcacattttctcagttcctggatagaatgtcgtcaactgtctgtccatcaaacttgacatatctggctcagcatccattgtttgagcagataaaagagctcagtgaagacataattgttcccgaatactgttacgctggtggaggtgcactccaatcacttaatgcttggtttggtccagaggggacagtgacaccattgcaccatgatccacatcacaatatcttagctcaggtattgggcaggaagtatattagactctatcctgctttcatagctgaggacttgtatccacacacagagactatgctaagcaataccagtcagttagaatgcactgttgttttgcaggtagatcttgacaacattgatttgaaggagtttccaagggttgaaaacctggaattcattgactgcatattggaggagggcgacctgctttacatccctccaaaatggtggcactacgtcagatctctctccaccagtttctcggtgactccgcttttgaatggatgtacacacgtcatcaccaatgtccattgttagttttacttttaccacagtgattaaaatgttgaaattgcttatatgccgaccatcatgctatcatgtgattcttgaaagcagaggttgaaggatgtcttcactgctacaatgtcaaattcttgaaattgtaaaggtggacttactagctccgagaatttaatttagatgtattctcgatctgactaaataggtagataaaagtattaatttttataacatcaaatatatattatataagtatgtttcattacgaacctaatggtatttattttgtatgataagtattagtatttttatataaatttgatcaaat

SEQ ID NO: 22076 - DNA, 1181 bp, Zea Mays
tcgctattgcctttgcactgaaaattcttccagcgaactctttatcctgtaagaaagttgagaggcgatcatgcatttccttggaggagttcatatgtaattactttttgcgcgacacccccgtcataattagtggcaccatcgaccattggcctgcaaggacaaaatggaaggacattgagtacctcaagaagattgctggagatcgtactgttcctgttgaagttggaaagaattacgtgtgtagtgagtggaagcaggagcttatcacattttctcagttcctggatagaatgtcgtcaactgtctgtccatcaaacttgacatatctggctcagcatccattgtttgagcaggtagctgatttttcatgttgatcctctagtagtttgcctttgttcagttgtgcattttacctcattggatttggcagataaaagagctcagtgaagacataattgttcccgaatactgttacgctggtggaggtgcactccaatcacttaatgcttggtttggtccagaggggacagtgacaccattgcaccatgatccacatcacaatatcttagctcaggtattgggcaggaagtatattagactctatcctgctttcatagctgaggacttgtatccacacacagagactatgctaagcaataccagtcaggtagatcttgacaacattgatttgaaggagtttccaagggttgaaaacctggaattcattgactgcatattggaggagggcgacctgctttacatccctccaaaatggtggcactacgtcagatctctctccaccagtttctcggtgactccgcttttgaatggatgtacacacgtcatcaccaatgtccattgttagttttacttttaccacagtgattaaaatgttgaaattgcttatatgccgaccatcatgctatcatgtgattcttgaaagcagaggttgaaggatgtcttcactgctacaatgtcaaattcttgaaattgtaaaggtggacttactagctccgagaatttaatttagatgtattctcgatctgactaaataggtagataaaagtattaatttttataacatcaaatatatattatataagtatgtttcattacgaacctaatggtatttattttgtatgataagtattagtatttttatataaatttgatcaaat

SEQ ID NO: 22077 - DNA, 1056 bp, Zea Mays
gtagaattgcaactcatttgaatgccctttcccttttaagctaatataaagttggaaagaattacgtgtgtagtgagtggaagcaggagcttatcacattttctcagttcctggatagaatgtcgtcaactgtctgtccatcaaacttgacatatctggctcagcatccattgtttgagcagataaaagagctcagtgaagacataattgttcccgaatactgttacgctggtggaggtgcactccaatcacttaatgcttggtttggtccagaggggacagtgacaccattgcaccatgatccacatcacaatatcttagctcaggtattgggcaggaagtatattagactctatcctgctttcatagctgaggacttgtatccacacacagagactatgctaagcaataccagtcaggtagatcttgacaacattgatttgaaggagtttccaagggttgaaaacctggaattcattgactgcatattggaggagggcgacctgctttacatccctccaaaatggtggcactacgtcagatctctctccaccagtttctcggttagcttttggtggcgtgcagcagttcaaccttcaggaggctcatagcgtcaatttcatgtctcccatattatcaaaaccagattgcagaaaaccaaagtaacctgacaggaccctttgtttcaggtgactccgcttttgaatggatgtacacacgtcatcaccaatgtccattgttagttttacttttaccacagtgattaaaatgttgaaattgcttatatgccgaccatcatgctatcatgtgattcttgaaagcagaggttgaaggatgtcttcactgctacaatgtcaaattcttgaaattgtaaaggtggacttactagctccgagaatttaatttagatgtattctcgatctgactaaataggtagataaaagtattaatttttataacatcaaatatatattatataagtatgtttcattacgaacctaatggtatttattttgtatgataagtattagtatttttatataaatttgatcaaat

SEQ ID NO: 22078 - DNA, 914 bp, Zea Mays
aattgatcttttgccttggcagtcgaaatactaggttggaaagaattacgtgtgtagtgagtggaagcaggagcttatcacattttctcagttcctggatagaatgtcgtcaactgtctgtccatcaaacttgacatatctggctcagcatccattgtttgagcagataaaagagctcagtgaagacataattgttcccgaatactgttacgctggtggaggtgcactccaatcacttaatgcttggtttggtccagaggggacagtgacaccattgcaccatgatccacatcacaatatcttagctcaggtattgggcaggaagtatattagactctatcctgctttcatagctgaggacttgtatccacacacagagactatgctaagcaataccagtcaggtagatcttgacaacattgatttgaaggagtttccaagggttgaaaacctggaattcattgactgcatattggaggagggcgacctgctttacatccctccaaaatggtggcactacgtcagatctctctccaccagtttctcggtgactccgcttttgaatggatgtacacacgtcatcaccaatgtccattgttagttttacttttaccacagtgattaaaatgttgaaattgcttatatgccgaccatcatgctatcatgtgattcttgaaagcagaggttgaaggatgtcttcactgctacaatgtcaaattcttgaaattgtaaaggtggacttactagctccgagaatttaatttagatgtattctcgatctgactaaataggtagataaaagtattaatttttataacatcaaatatatattatataagtatgtttcattacgaacctaatggtatttattttgtatgataagtattagtatttttatataaatttgatcaaat

SEQ ID NO: 22079 - DNA, 3318 bp, Zea Mays
agttgatcttacactgtgctttgtatttcaggctcgctagagcttgtactctggtattgtaataacttttattcgaactctgtactaattgaagtaagaaatgtggttactagcctcctgaggctagtaattgtatcacatttgagttccagaggatcgagtcgcttcaggagactttgggatttatttgatctaaatgaattaagcatggagaagtctaaacatatccgaccgtaagattaacattctaaagaagacggggtagacgaagatgcatccaccaagtaaagcatccgctttcttctgatgcaggaagccgaaatctagttcctgagatgaacaagaaatggcataggcaaaggtcgcagcagaatcagcaaccaatcaagcgtttactgttcgcattctaataacgagctcatatatagcatgctcagttgctcacacatactctcatgctactggaagcttgatctatgcagaaagaagcagggcaaaaatgaaaagaagtcgaaaacacaacccgccacgactcgcacggtcgcatggccaaatctaagcagagacctcacctgcactccacgcctgcctcggcagctcggcgcggggtgctcttccggcggctcccgtgatgccggaagccgctccgcttcgcggcctcgtcgtccttctcctcctcggtcgccgggtcgcagccgcgcttgggctgctgttgccgccgccgccgcctcttcttcttccctccgctctccggcgagaccacggccggcttcgcgtcctccatgggctcggccttggcagcgtcgtcctcctcgtcgtcggtgtcgtcagccgtgtggtgcttctgcggccgccccctcctcttgtaggctggcgtcacggtcacggcctcctcctcgccgccgctgccggcgtcagcatcctcgctgtggttagcttgcgacgtcggccgtttagccttccctccccttggcctgcccatccttcccggagcgcggaaaccctcaaactgctttggaccaatagggttgataagaacacatggttctaacaccaccaccagaaatactcctagtcgtagaagcgagatgacagatgaaacatctaccggctcctcctattttgacattcggatgatatcggggaagagagattgcagcgccatgaaatctgctacaggcggcggcgtcttggtcgacggtgagcgtcggaggtttcgcgcaggagctccgagagctttatctgagcagaggacggagatcagaaggccgcgcaagaactggttccgctgtcctgcttcagagagacgagggaggggggagatgcttgctcttgcttggcttggccgccagaaatactacacagctagtccgtgggccgtacgaacactaacgtgccagggcccagggacaggcgtcacagtaaaagccgttccgcgcactatttacattacagcccaagaagcatgcaatacatacaaatataaccaaagaaacgggaggttaaacacgcgacacgacactgtgccatgtccctgctgtgctggctcaggacacgctctgctgtgctccttgccgtacggaggagacgcgatgagacgaagcggagaaggaacaccgaccgaagaagcaaagaagcctgtctcgggtcggctgcctacagaagaccattagcagcaccaaaacggagaagaaaacgcgagaccacctccctcctgcgctctgcaagccctgctccgtcgacggtttaagcgaaaccgtgtgcgtgccgggctcttgttcttcttcttcttcgcatccgataaacagggggccaaaaccagccgtgtttcggaccgactggcaactgggaccgattggccaaacgcccgcggtggaacgtgtcaaaaatcttgcgaaaaaaggaagaggcaacggccgggaggtgcaggtggagccgtgcaacggaaggcggcggtcgcgtccggcgcaaggaaagctggcgaccgccgctgcatgccggcggcttccccctcactctacctatccgcgccggtctccaaccacatgatgcacgcagcgaaagccacgggctcgtcggtgtgatgttccttgacgaatacgtgcgggtgctctctctctctctctctctctctctctctctctctctctctctctctctctctctctctctctctctctctctctctcttctgcaggaggaggcgtcagggctctggagagcctggcgggcgcggcgtcgtttgggagacaagggagtacagtagccatagcgagcgtgggcgcggccggggctggtgcgtgcgcgctggccgacagccccgcgtcgaggaccgcaggcgcgctcgtgcccgcctgccccgctcgcgcgcgcgctcgtgctttgccggattcagaccaaccaccgcgcgcacgcggtgcccgacggcctgcccgtggccgtggatggttagatgcgatgcggatgtgaggctgcaacccggcgagcgcggcgccgccgtccgtcttgcgttcaaacagacgagggatacgccggccagacgcctgcacgcgtgcgcacgctgggagggggagggcggtcaaggctccaattatcccttggtcgccagtcgccacgacgcgttgccgaggaggagcaggcggcaggccaactcagtggagtggaagcagaagcgtgctgggtctgggttgctgccgtgtgcggtgcccagtgaccagcctttattttcccctccttttttctgagacggaggaaatcaggaaacggagtaggactacttttggttgctttcgtctccgttctctatacaaaacttacttatgtatcgaaacctcgtttttctaagaaaaattagttcattttttctcttaaaaaatagaaatcttttgagaaaatagagtttctaaactaaagaataacgttttcccaaaagattttaattatcccttggaaaaatgaaaatcccttgacaaaatgagattcctaaactagccctagaagagtaaaatttctcgttcccttgctcgtccgtccatttcttgctccgtgctctctactctcacacttatctctatctctgtccctgtataatgtatcgattaaaccaataaattaacctcaatcaaatcccaccattaaaatcaacgcaccagatcgcttcattacctcctatctcttaattaactccaaccaaatcccaccattaaaatcaacgtccctgttgggggcatgcttcgttgccaaaggtcccgcaggaagaaacaccttcggcaaacccctttgaacgtagtactgaagctaccattcatgaagcttcgg

SEQ ID NO: 22080 - DNA, 2731 bp, Zea Mays
tccgctttcttctgatgcaggaagccgaaatctagttcctgagatgaacaagaaatggcataggcaaaggtcgcagcagaatcagcaaccaatcaagcgtttactgttcgcattctaataacgagctcatatatagcatgctcagttgctcacacatactctcatgctactggaagcttgatctatgcagaaagaagcagggcaaaaatgaaaagaagtcgaaaacacaacccgccacgactcgcacggtcgcatggccaaatctaagcagagacctcacctgcactccacgcctgcctcggcagctcggcgcggggtgctcttccggcggctcccgtgatgccggaagccgctccgcttcgcggcctcgtcgtccttctcctcctcggtcgccgggtcgcagccgcgcttgggctgctgttgccgccgccgccgcctcttcttcttccctccgctctccggcgagaccacggccggcttcgcgtcctccatgggctcggccttggcagcgtcgtcctcctcgtcgtcggtgtcgtcagccgtgtggtgcttctgcggccgccccctcctcttgtaggctggcgtcacggtcacggcctcctcctcgccgccgctgccggcgtcagcatcctcgctgtggttagcttgcgacgtcggccgtttagccttccctccccttggccgcgcaagaactggttccgctgtcctgcttcagagagacgagggaggggggagatgcttgctcttgcttggcttggccgccagaaatactacacagctagtccgtgggccgtacgaacactaacgtgccagggcccagggacaggcgtcacagtaaaagccgttccgcgcactatttacattacagcccaagaagcatgcaatacatacaaatataaccaaagaaacgggaggttaaacacgcgacacgacactgtgccatgtccctgctgtgctggctcaggacacgctctgctgtgctccttgccgtacggaggagacgcgatgagacgaagcggagaaggaacaccgaccgaagaagcaaagaagcctgtctcgggtcggctgcctacagaagaccattagcagcaccaaaacggagaagaaaacgcgagaccacctccctcctgcgctctgcaagccctgctccgtcgacggtttaagcgaaaccgtgtgcgtgccgggctcttgttcttcttcttcttcgcatccgataaacagggggccaaaaccagccgtgtttcggaccgactggcaactgggaccgattggccaaacgcccgcggtggaacgtgtcaaaaatcttgcgaaaaaaggaagaggcaacggccgggaggtgcaggtggagccgtgcaacggaaggcggcggtcgcgtccggcgcaaggaaagctggcgaccgccgctgcatgccggcggcttccccctcactctacctatccgcgccggtctccaaccacatgatgcacgcagcgaaagccacgggctcgtcggtgtgatgttccttgacgaatacgtgcgggtgctctctctctctctctctctctctctctctctctctctctctctctctctctctctctctctctctctctctctctctcttctgcaggaggaggcgtcagggctctggagagcctggcgggcgcggcgtcgtttgggagacaagggagtacagtagccatagcgagcgtgggcgcggccggggctggtgcgtgcgcgctggccgacagccccgcgtcgaggaccgcaggcgcgctcgtgcccgcctgccccgctcgcgcgcgcgctcgtgctttgccggattcagaccaaccaccgcgcgcacgcggtgcccgacggcctgcccgtggccgtggatggttagatgcgatgcggatgtgaggctgcaacccggcgagcgcggcgccgccgtccgtcttgcgttcaaacagacgagggatacgccggccagacgcctgcacgcgtgcgcacgctgggagggggagggcggtcaaggctccaattatcccttggtcgccagtcgccacgacgcgttgccgaggaggagcaggcggcaggccaactcagtggagtggaagcagaagcgtgctgggtctgggttgctgccgtgtgcggtgcccagtgaccagcctttattttcccctccttttttctgagacggaggaaatcaggaaacggagtaggactacttttggttgctttcgtctccgttctctatacaaaacttacttatgtatcgaaacctcgtttttctaagaaaaattagttcattttttctcttaaaaaatagaaatcttttgagaaaatagagtttctaaactaaagaataacgttttcccaaaagattttaattatcccttggaaaaatgaaaatcccttgacaaaatgagattcctaaactagccctagaagagtaaaatttctcgttcccttgctcgtccgtccatttcttgctccgtgctctctactctcacacttatctctatctctgtccctgtataatgtatcgattaaaccaataaattaacctcaatcaaatcccaccattaaaatcaacgcaccagatcgcttcattacctcctatctcttaattaactccaaccaaatcccaccattaaaatcaacgtccctgttgggggcatgcttcgttgccaaaggtcccgcaggaagaaacaccttcggcaaacccctttgaacgtagtactgaagctaccattcatgaagcttcgg

SEQ ID NO: 22081 - DNA, 3314 bp, Zea Mays
taaaacaatttattacgacgctgaggcattttctcgtgaaagaaaacgcactcccgactcccgagtgatcccgagtcccgacggccgacgcgcgcttaagggcttacggctaatccggcggctacgaaaggaaacatctaccccgttcaaccgttccatttcttctcccgttccgttcaccccccccgcgagctctatctttcgtggcgcagctcggcagctgggcggccgccccccgccggcgccacgccctaagctacgccaggttcccagttcttcgtccgtccttttgctaggtcttcgttggacacttaaacggcgacgagcaccgccagacgcgctggtgcctggatccggcgggagtgcttcaggttttgacggttcgtctctctcgttgtttccggcggggttatgaaggcggtgggatacagcccctacgacagcagcggaaaaggagagcttgattactgaactcaggaaagaactgagggtttctgatgaggagcatagggagctattaaataaagtcaatgaagatgggaccatccgtcgaatgagggagttaagacaggcaggtggatccccaagtggtttgcatcatggcaacatggttttatatggtgcagaacctgggtccactaccaagaggcaaagggcatctcattcgattcctttgcaatcagcaggcctccagtcccctatgatgccctcccactcagtttcatctgcaaaatggggtcctttgcaagcaagaggcacgaaagcgaggacgcccattcctttggcgttaccatctgtggatccaagttcactaataaaccataaagtttatacaaggtggccagaagacaacaacttctatgaggccaccataacacgatataaccctgtgacggtttgtttcaatttttgctactgttttgatccttaatgcaggtatgcatcagtgcccagtaaccttctttcatgttctctctagggtgagcatggacttgtctatgacatgggcacacaagccgagagttgggaatcagttagactttgtgatatggcacctgaagatataagatggggatttgatggacacctttcaaatcgtgatgtctggagcccttctggccctatgttgatgaggcacatgaccaacaatggtgctatggcaggttcaatcaagggaagagggaggttatcaataaatgagactataaaggactatgctccacctgaaaatggcaccaataggaattttgatcatgtcgacataccaaataccggaagtgttgttatggaggtgaagagggtattgttcaacccaaatatgcctgaaatcgagaaggcaaggaaacttttgaaagatcaggagcagtcattacttgatgcaattgccagacttgatgaagcatctgatagcgataatggtaagttcctggccagttctacttcattgaagatcagataatactatagggaaagatagtactcacccccttccaaaagttagatgttttaactttttcctatgtcatacttttctaactttgacccaatttagagtaaaattacaccgccactctgtaaactgttgcgtcatactcatccaagtccccgaactatgaaattgtagatctaggtccgtaaactatttaagtaccccaattctgatccaaagcacccatatcatagcaaattagctaatgtggagctctagcatgaaattgacatgttgctccgcagctcatgtttacacggtcggtccctatactatatgtgatcagggattctaacaaaggttgccaaactatgaaattgcaaacctagggctctaaagtactcaaatcatggtccaaagcatctatgagcctgtttgtttcagcttctggcagcttctggccactaaaagctgctacggactgccaaacgctcagcttttcagccagtttctataaaattcgttggggcaaaaaccatctaaaatcaacataaacacataatcggttcagtcgttgtaatagtaggaatccatcactttctagatcctgagccctatgaacaactttatcttcctccacacgtaatcgtaatgatactcagattctccccacagccagattttcaaaaaagctggttagaaaaaagctgaaccaaacaggccctcgtctgccgatgtaagggtgacactgctggaacgagctatgcagggttctcaactacagcaagctcaaaagacagtgtccatgcatggtgcacagaatgagttgctgccacttaaggtcttcatgcagatgctcttctatgagaaagcttgtgtggtgacactatatagtccatcacagcaggctgcagcaagatttggaacctaaatgagagtccccaaactattatagtccatcacaaggtcaagaacctctctagtgagccggacaacaatagtttggagatcaaaatgagagtgacatattagtttatgggccggccgtgtagtttactcttataggagaaactactaacatcaataccaaacaaatgaacgtccaatacatattttaatggtggatgttggtgcctttttctatacacttccaagacaaatataaggttaaatcacgagaaaactaaaatgacttttatttttttggaagaggtagtatttgctaatggttttttgtataaaatagaattcttggatgaatcatttgagagactgtaattttaactggtggtgtattgaagtcttcctggatgcttgttgaatggacatcagaaatgtacattcgccagctgatgcatcttacatggtgtattcatgcttcgtatatttccctgaccattttttgtgttacagaagatatggccatggaaggccgaatgggttctgctggggaaaggaatggcatcactacgtagttgcttctggcatgttggaattttggtagattaacatgcatttgtgtagcacctacctcgaccgcagaacaaggaaaccacattatggcaaaactgcatgccagaaaatggtgtcctggaaacggttgacgcctgaaatgggattttttggctacacaaaattgagcgcacgagcggcagagatgcaaatgttaaagaactgtttaagcgccattgcatggtgtttcctatgtagcaaactagaggcaactaaatgttctagttgatcattagcatggagcacttagcattcctgattcagtacaggtagatgtctaacactccagcataatatccaacttggctgttcttgtactctaatgtgaaaaaggattgttgtgcacgcttttcatgtaagcctcgagtgagta

SEQ ID NO: 22082 - DNA, 2650 bp, Zea Mays
taaaacaatttattacgacgctgaggcattttctcgtgaaagaaaacgcactcccgactcccgagtgatcccgagtcccgacggccgacgcgcgcttaagggcttacggctaatccggcggctacgaaaggaaacatctaccccgttcaaccgttccatttcttctcccgttccgttcaccccccccgcgagctctatctttcgtggcgcagctcggcagctgggcggccgccccccgccggcgccacgccctaagctacgccaggttcccagttcttcgtccgtccttttgctaggtcttcgttggacacttaaacggcgacgagcaccgccagacgcgctggtgcctggatccggcgggagtgcttcaggttttgacggttcgtctctctcgttgtttccggcggggttatgaaggcggtgggatacagcccctacgacagcagcgggactgatgacgatctccctccagcacaaaatagaggactaagagggcgatctttcagtgggaatgtcgtagcatctgctggggcatttccttacatgagggcaaataatgatctggagagtgaaatacatcgggttgagcaagatgcatatactggtattcttagggcatttaaagtgcaatctgatgcaatatcctgggaaaaggagagcttgattactgaactcaggaaagaactgagggtttctgatgaggagcatagggagctattaaataaagtcaatgaagatgggaccatccgtcgaatgagggagttaagacaggcaggtggatccccaagtggtttgcatcatggcaacatggttttatatggtgcagaacctgggtccactaccaagaggcaaagggcatctcattcgattcctttgcaatcagcaggcctccagtcccctatgatgccctcccactcagtttcatctgcaaaatggggtcctttgcaagcaagaggcacgaaagcgaggacgcccattcctttggcgttaccatctgtggatccaagttcactaataaaccataaagtttatacaaggtggccagaagacaacaacttctatgaggccaccataacacgatataaccctgtgacgggtgagcatggacttgtctatgacatgggcacacaagccgagagttgggaatcagttagactttgtgatatggcacctgaagatataagatggggatttgatggacacctttcaaatcgtgatgtctggagcccttctggccctatgttgatgaggcacatgaccaacaatggtgctatggcaggttcaatcaagggaagagggaggttatcaataaatgagactataaaggactatgctccacctgaaaatggcaccaataggaattttgatcatgtcgacataccaaataccggaagtgttgttatggaggtgaagagggtattgttcaacccaaatatgcctgaaatcgagaaggcaaggaaacttttgaaagatcaggagcagtcattacttgatgcaattgccagacttgatgaagcatctgatagcgataatgggttctcaactacagcaagctcaaaagacagtgtccatgcatggtgcacagaatgagttgctgccacttaaggtcttcatgcagatgctcttctatgagaaagcttgtgtggtgacactatatagtccatcacagcaggctgcagcaagatttggaacctaaatgagagtccccaaactattatagtccatcacaaggtcaagaacctctctagtgagccggacaacaatagtttggagatcaaaatgagagtgacatattagtttatgggccggccgtgtagtttactcttataggagaaactactaacatcaataccaaacaaatgaacgtccaatacatattttaatggtggatgttggtgcctttttctatacacttccaagacaaatataaggttaaatcacgagaaaactaaaatgacttttatttttttggaagaggtagtatttgctaatggttttttgtataaaatagaattcttggatgaatcatttgagagactgtaattttaactggtggtgtattgaagtcttcctggatgcttgttgaatggacatcagaaatgtacattcgccagctgatgcatcttacatggtgtattcatgcttcgtatatttccctgaccattttttgtgttacagaagatatggccatggaaggccgaatgggttctgctggggaaaggaatggcatcactacgtagttgcttctggcatgttggaattttggtagattaacatgcatttgtgtagcacctacctcgaccgcagaacaaggaaaccacattatggcaaaactgcatgccagaaaatggtgtcctggaaacggttgacgcctgaaatgggattttttggctacacaaaattgagcgcacgagcggcagagatgcaaatgttaaagaactgtttaagcgccattgcatggtgtttcctatgtagcaaactagaggcaactaaatgttctagttgatcattagcatggagcacttagcattcctgattcagtacaggtagatgtctaacactccagcataatatccaacttggctgttcttgtactctaatgtgaaaaaggattgttgtgcacgcttttcatgtaagcctcgagtgagta

SEQ ID NO: 22083 - DNA, 1891 bp, Zea Mays
taaaacaatttattacgacgctgaggcattttctcgtgaaagaaaacgcactcccgactcccgagtgatcccgagtcccgacggccgacgcgcgcttaagggcttacggctaatccggcggctacgaaaggaaacatctaccccgttcaaccgttccatttcttctcccgttccgttcaccccccccgcgagctctatctttcgtggcgcagctcggcagctgggcggccgccccccgccggcgccacgccctaagctacgccaggttcccagttcttcgtccgtccttttgctaggtcttcgttggacacttaaacggcgacgagcaccgccagacgcgctggtgcctggatccggcgggagtgcttcaggttttgacggttcgtctctctcgttgtttccggcggggttatgaaggcggtgggatacagcccctacgacagcagcgggactgatgacgatctccctccagcacaaaatagaggactaagagggcgatctttcagtgggaatgtcgtagcatctgctggggcatttccttacatgagggcaaataatgatctggagagtgaaatacatcgggttgagcaagatgcatatactggtattcttagggcatttaaagtgcaatctgatgcaatatcctgggaaaaggagagcttgattactgaactcaggaaagaactgagggtttctgatgaggagcatagggagctattaaataaagtcaatgaagatgggaccatccgtcgaatgagggagttaagacaggcaggtggatccccaagtggtttgcatcatggcaacatggttttatatggtgcagaacctgggtccactaccaagaggcaaagggcatctcattcgattcctttgcaatcagcaggcctccagtcccctatgatgccctcccactcagtttcatctgcaaaatggggtcctttgcaagcaagaggcacgaaagcgaggacgcccattcctttggcgttaccatctgtggatccaagttcactaataaaccataaagtttatacaaggtggccagaagacaacaacttctatgaggccaccataacacgatataaccctgtgacgggtgagcatggacttgtctatgacatgggcacacaagccgagagttgggaatcagttagactttgtgatgttcaatcaagggaagagggaggttatcaataaatgagactataaaggactatgctccacctgaaaatggcaccaataggaattttgatcatgtcgacataccaaataccggaagtgttgttatggaggtgaagagggtattgttcaacccaaatatgcctgaaatcgagaaggcaaggaaacttttgaaagatcaggagcagtcattacttgatgcaattgccagacttgatgaagcatctgatagcgataatgaagatatggccatggaaggccgaatgggttctgctggggaaaggaatggcatcactacgtagttgcttctggcatgttggaattttggtagattaacatgcatttgtgtagcacctacctcgaccgcagaacaaggaaaccacattatggcaaaactgcatgccagaaaatggtgtcctggaaacggttgacgcctgaaatgggattttttggctacacaaaattgagcgcacgagcggcagagatgcaaatgttaaagaactgtttaagcgccattgcatggtgtttcctatgtagcaaactagaggcaactaaatgttctagttgatcattagcatggagcacttagcattcctgattcagtacaggtagatgtctaacactccagcataatatccaacttggctgttcttgtactctaatgtgaaaaaggattgttgtgcacgcttttcatgtaagcctcgagtgagta

SEQ ID NO: 22084 - DNA, 1691 bp, Zea Mays
taaaacaatttattacgacgctgaggcattttctcgtgaaagaaaacgcactcccgactcccgagtgatcccgagtcccgacggccgacgcgcgcttaagggcttacggctaatccggcggctacgaaaggaaacatctaccccgttcaaccgttccatttcttctcccgttccgttcaccccccccgcgagctctatctttcgtggcgcagctcggcagctgggcggccgccccccgccggcgccacgccctaagctacgccaggttcccagttcttcgtccgtccttttgctaggtcttcgttggacacttaaacggcgacgagcaccgccagacgcgctggtgcctggatccggcgggagtgcttcaggttttgacggttcgtctctctcgttgtttccggcggggttatgaaggcggtgggatacagcccctacgacagcagcggaaaaggagagcttgattactgaactcaggaaagaactgagggtttctgatgaggagcatagggagctattaaataaagtcaatgaagatgggaccatccgtcgaatgagggagttaagacaggcaggtggatccccaagtggtttgcatcatggcaacatggttttatatggtgcagaacctgggtccactaccaagaggcaaagggcatctcattcgattcctttgcaatcagcaggcctccagtcccctatgatgccctcccactcagtttcatctgcaaaatggggtcctttgcaagcaagaggcacgaaagcgaggacgcccattcctttggcgttaccatctgtggatccaagttcactaataaaccataaagtttatacaaggtggccagaagacaacaacttctatgaggccaccataacacgatataaccctgtgacgggtgagcatggacttgtctatgacatgggcacacaagccgagagttgggaatcagttagactttgtgatgttcaatcaagggaagagggaggttatcaataaatgagactataaaggactatgctccacctgaaaatggcaccaataggaattttgatcatgtcgacataccaaataccggaagtgttgttatggaggtgaagagggtattgttcaacccaaatatgcctgaaatcgagaaggcaaggaaacttttgaaagatcaggagcagtcattacttgatgcaattgccagacttgatgaagcatctgatagcgataatgaagatatggccatggaaggccgaatgggttctgctggggaaaggaatggcatcactacgtagttgcttctggcatgttggaattttggtagattaacatgcatttgtgtagcacctacctcgaccgcagaacaaggaaaccacattatggcaaaactgcatgccagaaaatggtgtcctggaaacggttgacgcctgaaatgggattttttggctacacaaaattgagcgcacgagcggcagagatgcaaatgttaaagaactgtttaagcgccattgcatggtgtttcctatgtagcaaactagaggcaactaaatgttctagttgatcattagcatggagcacttagcattcctgattcagtacaggtagatgtctaacactccagcataatatccaacttggctgttcttgtactctaatgtgaaaaaggattgttgtgcacgcttttcatgtaagcctcgagtgagta

SEQ ID NO: 22085 - DNA, 3430 bp, Zea Mays
taaaacaatttattacgacgctgaggcattttctcgtgaaagaaaacgcactcccgactcccgagtgatcccgagtcccgacggccgacgcgcgcttaagggcttacggctaatccggcggctacgaaaggaaacatctaccccgttcaaccgttccatttcttctcccgttccgttcaccccccccgcgagctctatctttcgtggcgcagctcggcagctgggcggccgccccccgccggcgccacgccctaagctacgccaggttcccagttcttcgtccgtccttttgctaggtcttcgttggacacttaaacggcgacgagcaccgccagacgcgctggtgcctggatccggcgggagtgcttcaggttttgacggttcgtctctctcgttgtttccggcggggttatgaaggcggtgggatacagcccctacgacagcagcgggactgatgacgatctccctccagcacaaaatagaggactaagagggcgatctttcagtgggaatgtcgtagcatctgctggggcatttccttacatgagggcaaataatgatctggagagtgaaatacatcgggttgagcaagatgcatatactggtattcttagggcatttaaagtgcaatctgatgcaatatcctgggaaaaggagagcttgattactgaactcaggaaagaactgagggtttctgatgaggagcatagggagctattaaataaagtcaatgaagatgggaccatccgtcgaatgagggagttaagacaggcaggtggatccccaagtggtttgcatcatggcaacatggttttatatggtgcagaacctgggtccactaccaagaggcaaagggcatctcattcgattcctttgcaatcagcaggcctccagtcccctatgatgccctcccactcagtttcatctgcaaaatggggtcctttgcaagcaagaggcacgaaagcgaggacgcccattcctttggcgttaccatctgtggatccaagttcactaataaaccataaagtttatacaaggtggccagaagacaacaacttctatgaggccaccataacacgatataaccctgtgacgggtgagcatggacttgtctatgacatgggcacacaagccgagagttgggaatcagttagactttgtgatatggcacctgaagatataagatggggatttgatggacacctttcaaatcgtgatgtctggagcccttctggccctatgttgatgaggcacatgaccaacaatggtgctatggcaggttcaatcaagggaagagggaggttatcaataaatgagactataaaggactatgctccacctgaaaatggcaccaataggaattttgatcatgtcgacataccaaataccggaagtgttgttatggaggtgaagagggtattgttcaacccaaatatgcctgaaatcgagaaggcaaggaaacttttgaaagatcaggagcagtcattacttgatgcaattgccagacttgatgaagcatctgatagcgataatggtaagttcctggccagttctacttcattgaagatcagataatactatagggaaagatagtactcacccccttccaaaagttagatgttttaactttttcctatgtcatacttttctaactttgacccaatttagagtaaaattacaccgccactctgtaaactgttgcgtcatactcatccaagtccccgaactatgaaattgtagatctaggtccgtaaactatttaagtaccccaattctgatccaaagcacccatatcatagcaaattagctaatgtggagctctagcatgaaattgacatgttgctccgcagctcatgtttacacggtcggtccctatactatatgtgatcagggattctaacaaaggttgccaaactatgaaattgcaaacctagggctctaaagtactcaaatcatggtccaaagcatctatgagcctgtttgtttcagcttctggcagcttctggccactaaaagctgctacggactgccaaacgctcagcttttcagccagtttctataaaattcgttggggcaaaaaccatctaaaatcaacataaacacataatcggttcagtcgttgtaatagtaggaatccatcactttctagatcctgagccctatgaacaactttatcttcctccacacgtaatcgtaatgatactcagattctccccacagccagattttcaaaaaagctggttagaaaaaagctgaaccaaacaggccctcgtctgccgatgtaagggtgacactgctggaacgagctatgcagggttctcaactacagcaagctcaaaagacagtgtccatgcatggtgcacagaatgagttgctgccacttaaggtcttcatgcagatgctcttctatgagaaagcttgtgtggtgacactatatagtccatcacagcaggctgcagcaagatttggaacctaaatgagagtccccaaactattatagtccatcacaaggtcaagaacctctctagtgagccggacaacaatagtttggagatcaaaatgagagtgacatattagtttatgggccggccgtgtagtttactcttataggagaaactactaacatcaataccaaacaaatgaacgtccaatacatattttaatggtggatgttggtgcctttttctatacacttccaagacaaatataaggttaaatcacgagaaaactaaaatgacttttatttttttggaagaggtagtatttgctaatggttttttgtataaaatagaattcttggatgaatcatttgagagactgtaattttaactggtggtgtattgaagtcttcctggatgcttgttgaatggacatcagaaatgtacattcgccagctgatgcatcttacatggtgtattcatgcttcgtatatttccctgaccattttttgtgttacagaagatatggccatggaaggccgaatgggttctgctggggaaaggaatggcatcactacgtagttgcttctggcatgttggaattttggtagattaacatgcatttgtgtagcacctacctcgaccgcagaacaaggaaaccacattatggcaaaactgcatgccagaaaatggtgtcctggaaacggttgacgcctgaaatgggattttttggctacacaaaattgagcgcacgagcggcagagatgcaaatgttaaagaactgtttaagcgccattgcatggtgtttcctatgtagcaaactagaggcaactaaatgttctagttgatcattagcatggagcacttagcattcctgattcagtacaggtagatgtctaacactccagcataatatccaacttggctgttcttgtactctaatgtgaaaaaggattgttgtgcacgcttttcatgtaagcctcgagtgagta

SEQ ID NO: 22086 - DNA, 1800 bp, Zea Mays
taaaacaatttattacgacgctgaggcattttctcgtgaaagaaaacgcactcccgactcccgagtgatcccgagtcccgacggccgacgcgcgcttaagggcttacggctaatccggcggctacgaaaggaaacatctaccccgttcaaccgttccatttcttctcccgttccgttcaccccccccgcgagctctatctttcgtggcgcagctcggcagctgggcggccgccccccgccggcgccacgccctaagctacgccaggttcccagttcttcgtccgtccttttgctaggtcttcgttggacacttaaacggcgacgagcaccgccagacgcgctggtgcctggatccggcgggagtgcttcaggttttgacggttcgtctctctcgttgtttccggcggggttatgaaggcggtgggatacagcccctacgacagcagcggaaaaggagagcttgattactgaactcaggaaagaactgagggtttctgatgaggagcatagggagctattaaataaagtcaatgaagatgggaccatccgtcgaatgagggagttaagacaggcaggtggatccccaagtggtttgcatcatggcaacatggttttatatggtgcagaacctgggtccactaccaagaggcaaagggcatctcattcgattcctttgcaatcagcaggcctccagtcccctatgatgccctcccactcagtttcatctgcaaaatggggtcctttgcaagcaagaggcacgaaagcgaggacgcccattcctttggcgttaccatctgtggatccaagttcactaataaaccataaagtttatacaaggtggccagaagacaacaacttctatgaggccaccataacacgatataaccctggtgagcatggacttgtctatgacatgggcacacaagccgagagttgggaatcagttagactttgtgatatggcacctgaagatataagatggggatttgatggacacctttcaaatcgtgatgtctggagcccttctggccctatgttgatgaggcacatgaccaacaatggtgctatggcaggttcaatcaagggaagagggaggttatcaataaatgagactataaaggactatgctccacctgaaaatggcaccaataggaattttgatcatgtcgacataccaaataccggaagtgttgttatggaggtgaagagggtattgttcaacccaaatatgcctgaaatcgagaaggcaaggaaacttttgaaagatcaggagcagtcattacttgatgcaattgccagacttgatgaagcatctgatagcgataatgaagatatggccatggaaggccgaatgggttctgctggggaaaggaatggcatcactacgtagttgcttctggcatgttggaattttggtagattaacatgcatttgtgtagcacctacctcgaccgcagaacaaggaaaccacattatggcaaaactgcatgccagaaaatggtgtcctggaaacggttgacgcctgaaatgggattttttggctacacaaaattgagcgcacgagcggcagagatgcaaatgttaaagaactgtttaagcgccattgcatggtgtttcctatgtagcaaactagaggcaactaaatgttctagttgatcattagcatggagcacttagcattcctgattcagtacaggtagatgtctaacactccagcataatatccaacttggctgttcttgtactctaatgtgaaaaaggattgttgtgcacgcttttcatgtaagcctcgagtgagta

SEQ ID NO: 22087 - DNA, 2000 bp, Zea Mays
taaaacaatttattacgacgctgaggcattttctcgtgaaagaaaacgcactcccgactcccgagtgatcccgagtcccgacggccgacgcgcgcttaagggcttacggctaatccggcggctacgaaaggaaacatctaccccgttcaaccgttccatttcttctcccgttccgttcaccccccccgcgagctctatctttcgtggcgcagctcggcagctgggcggccgccccccgccggcgccacgccctaagctacgccaggttcccagttcttcgtccgtccttttgctaggtcttcgttggacacttaaacggcgacgagcaccgccagacgcgctggtgcctggatccggcgggagtgcttcaggttttgacggttcgtctctctcgttgtttccggcggggttatgaaggcggtgggatacagcccctacgacagcagcgggactgatgacgatctccctccagcacaaaatagaggactaagagggcgatctttcagtgggaatgtcgtagcatctgctggggcatttccttacatgagggcaaataatgatctggagagtgaaatacatcgggttgagcaagatgcatatactggtattcttagggcatttaaagtgcaatctgatgcaatatcctgggaaaaggagagcttgattactgaactcaggaaagaactgagggtttctgatgaggagcatagggagctattaaataaagtcaatgaagatgggaccatccgtcgaatgagggagttaagacaggcaggtggatccccaagtggtttgcatcatggcaacatggttttatatggtgcagaacctgggtccactaccaagaggcaaagggcatctcattcgattcctttgcaatcagcaggcctccagtcccctatgatgccctcccactcagtttcatctgcaaaatggggtcctttgcaagcaagaggcacgaaagcgaggacgcccattcctttggcgttaccatctgtggatccaagttcactaataaaccataaagtttatacaaggtggccagaagacaacaacttctatgaggccaccataacacgatataaccctggtgagcatggacttgtctatgacatgggcacacaagccgagagttgggaatcagttagactttgtgatatggcacctgaagatataagatggggatttgatggacacctttcaaatcgtgatgtctggagcccttctggccctatgttgatgaggcacatgaccaacaatggtgctatggcaggttcaatcaagggaagagggaggttatcaataaatgagactataaaggactatgctccacctgaaaatggcaccaataggaattttgatcatgtcgacataccaaataccggaagtgttgttatggaggtgaagagggtattgttcaacccaaatatgcctgaaatcgagaaggcaaggaaacttttgaaagatcaggagcagtcattacttgatgcaattgccagacttgatgaagcatctgatagcgataatgaagatatggccatggaaggccgaatgggttctgctggggaaaggaatggcatcactacgtagttgcttctggcatgttggaattttggtagattaacatgcatttgtgtagcacctacctcgaccgcagaacaaggaaaccacattatggcaaaactgcatgccagaaaatggtgtcctggaaacggttgacgcctgaaatgggattttttggctacacaaaattgagcgcacgagcggcagagatgcaaatgttaaagaactgtttaagcgccattgcatggtgtttcctatgtagcaaactagaggcaactaaatgttctagttgatcattagcatggagcacttagcattcctgattcagtacaggtagatgtctaacactccagcataatatccaacttggctgttcttgtactctaatgtgaaaaaggattgttgtgcacgcttttcatgtaagcctcgagtgagta

SEQ ID NO: 22088 - DNA, 1989 bp, Zea Mays
taaaacaatttattacgacgctgaggcattttctcgtgaaagaaaacgcactcccgactcccgagtgatcccgagtcccgacggccgacgcgcgcttaagggcttacggctaatccggcggctacgaaaggaaacatctaccccgttcaaccgttccatttcttctcccgttccgttcaccccccccgcgagctctatctttcgtggcgcagctcggcagctgggcggccgccccccgccggcgccacgccctaagctacgccaggttcccagttcttcgtccgtccttttgctaggtcttcgttggacacttaaacggcgacgagcaccgccagacgcgctggtgcctggatccggcgggagtgcttcaggttttgacggttcgtctctctcgttgtttccggcggggttatgaaggcggtgggatacagcccctacgacagcagcgggactgatgacgatctccctccagcacaaaatagaggactaagagggcgatctttcagtgggaatgtcgtagcatctgctggggcatttccttacatgagggcaaataatgatctggagagtgaaatacatcgggttgagcaagatgcatatactggtattcttagggcatttaaagtgcaatctgatgcaatatcctgggaaaaggagagcttgattactgaactcaggaaagaactgagggtttctgatgaggagcatagggagctattaaataaagtcaatgaagatgggaccatccgtcgaatgagggagttaagacaggcaggtggatccccaagtggtttgcatcatggcaacatggttttatatggtgcagaacctgggtccactaccaagaggcaaagggcatctcattcgattcctttgcaatcagcaggcctccagtcccctatgatgccctcccactcagtttcatctgcaaaatggggtcctttgcaagcaagagcccattcctttggcgttaccatctgtggatccaagttcactaataaaccataaagtttatacaaggtggccagaagacaacaacttctatgaggccaccataacacgatataaccctgtgacgggtgagcatggacttgtctatgacatgggcacacaagccgagagttgggaatcagttagactttgtgatatggcacctgaagatataagatggggatttgatggacacctttcaaatcgtgatgtctggagcccttctggccctatgttgatgaggcacatgaccaacaatggtgctatggcaggttcaatcaagggaagagggaggttatcaataaatgagactataaaggactatgctccacctgaaaatggcaccaataggaattttgatcatgtcgacataccaaataccggaagtgttgttatggaggtgaagagggtattgttcaacccaaatatgcctgaaatcgagaaggcaaggaaacttttgaaagatcaggagcagtcattacttgatgcaattgccagacttgatgaagcatctgatagcgataatgaagatatggccatggaaggccgaatgggttctgctggggaaaggaatggcatcactacgtagttgcttctggcatgttggaattttggtagattaacatgcatttgtgtagcacctacctcgaccgcagaacaaggaaaccacattatggcaaaactgcatgccagaaaatggtgtcctggaaacggttgacgcctgaaatgggattttttggctacacaaaattgagcgcacgagcggcagagatgcaaatgttaaagaactgtttaagcgccattgcatggtgtttcctatgtagcaaactagaggcaactaaatgttctagttgatcattagcatggagcacttagcattcctgattcagtacaggtagatgtctaacactccagcataatatccaacttggctgttcttgtactctaatgtgaaaaaggattgttgtgcacgcttttcatgtaagcctcgagtgagta

SEQ ID NO: 22089 - DNA, 1788 bp, Zea Mays
taaaacaatttattacgacgctgaggcattttctcgtgaaagaaaacgcactcccgactcccgagtgatcccgagtcccgacggccgacgcgcgcttaagggcttacggctaatccggcggctacgaaaggaaacatctaccccgttcaaccgttccatttcttctcccgttccgttcaccccccccgcgagctctatctttcgtggcgcagctcggcagctgggcggccgccccccgccggcgccacgccctaagctacgccaggttcccagttcttcgtccgtccttttgctaggtcttcgttggacacttaaacggcgacgagcaccgccagacgcgctggtgcctggatccggcgggagtgcttcaggttttgacggttcgtctctctcgttgtttccggcggggttatgaaggcggtgggatacagcccctacgacagcagcggaaaaggagagcttgattactgaactcaggaaagaactgagggtttctgatgaggagcatagggagctattaaataaagtcaatgaagatgggaccatccgtcgaatgagggagttaagacaggcaggtggatccccaagtggtttgcatcatggcaacatggttttatatggtgcagaacctgggtccactaccaagaggcaaagggcatctcattcgattcctttgcaatcagcaggcctccagtcccctatgatgccctcccactcagtttcatctgcaaaatggggtcctttgcaagcaagaggcacgaaagcgaggacgcccattcctttggcgttaccatctgtggatccaagttcactaataaaccataaagtttatacaaggtggccagaagacaacaacttctatgaggccaccataacacgatataaccctgtgacgggtgagcatggacttgtctatgacatgggcacacaagccgagagttgggaatcagttagactttgtgatatggcacctgaagatataagatggggatttgatggacacctttcaaatcgtgatgtctggagcccttctggccctatgttgatgaggcacatgaccaacaatggtgctatggcaggttcaatcaagggaagagggaggttatcaataaatgagactataaaggactatgctccacctgaaaatggcaccaataggaattttgatcatgtcgacataccaaataccggaagtgttgttatggaggtgaagagggtattgttcaacccaaatatgcctgaaatcgagaaggatcaggagcagtcattacttgatgcaattgccagacttgatgaagcatctgatagcgataatgaagatatggccatggaaggccgaatgggttctgctggggaaaggaatggcatcactacgtagttgcttctggcatgttggaattttggtagattaacatgcatttgtgtagcacctacctcgaccgcagaacaaggaaaccacattatggcaaaactgcatgccagaaaatggtgtcctggaaacggttgacgcctgaaatgggattttttggctacacaaaattgagcgcacgagcggcagagatgcaaatgttaaagaactgtttaagcgccattgcatggtgtttcctatgtagcaaactagaggcaactaaatgttctagttgatcattagcatggagcacttagcattcctgattcagtacaggtagatgtctaacactccagcataatatccaacttggctgttcttgtactctaatgtgaaaaaggattgttgtgcacgcttttcatgtaagcctcgagtgagta

SEQ ID NO: 22090 - DNA, 1867 bp, Zea Mays
taaaacaatttattacgacgctgaggcattttctcgtgaaagaaaacgcactcccgactcccgagtgatcccgagtcccgacggccgacgcgcgcttaagggcttacggctaatccggcggctacgaaaggaaacatctaccccgttcaaccgttccatttcttctcccgttccgttcaccccccccgcgagctctatctttcgtggcgcagctcggcagctgggcggccgccccccgccggcgccacgccctaagctacgccaggttcccagttcttcgtccgtccttttgctaggtcttcgttggacacttaaacggcgacgagcaccgccagacgcgctggtgcctggatccggcgggagtgcttcaggttttgacggttcgtctctctcgttgtttccggcggggttatgaaggcggtgggatacagcccctacgacagcagcgcacaaaatagaggactaagagggcgatctttcagtgggaatgtcgtagcatctgctggggcatttccttacatgagggcaaataatgatctggagagtgaaatacatcgggttgagcaagatgcatatactggtattcttagggcatttaaagtgcaatctgatgcaatatcctgggaaaaggagagcttgattactgaactcaggaaagaactgagggtttctgatgaggagcatagggagctattaaataaagtcaatgaagatgggaccatccgtcgaatgagggagttaagacaggcaggtggatccccaagtggtttgcatcatggcaacatggttttatatggtgcagaacctgggtccactaccaagaggcaaagggcatctcattcgattcctttgcaatcagcaggcctccagtcccctatgatgccctcccactcagtttcatctgcaaaatggggtcctttgcaagcaagaggcacgaaagcgaggacgcccattcctttggcgttaccatctgtggatccaagttcactaataaaccataaagtttatacaaggtggccagaagacaacaacttctatgaggccaccataacacgatataaccctgtgacgggtgagcatggacttgtctatgacatgggcacacaagccgagagttgggaatcagttagactttgtgatgttcaatcaagggaagagggaggttatcaataaatgagactataaaggactatgctccacctgaaaatggcaccaataggaattttgatcatgtcgacataccaaataccggaagtgttgttatggaggtgaagagggtattgttcaacccaaatatgcctgaaatcgagaaggcaaggaaacttttgaaagatcaggagcagtcattacttgatgcaattgccagacttgatgaagcatctgatagcgataatgaagatatggccatggaaggccgaatgggttctgctggggaaaggaatggcatcactacgtagttgcttctggcatgttggaattttggtagattaacatgcatttgtgtagcacctacctcgaccgcagaacaaggaaaccacattatggcaaaactgcatgccagaaaatggtgtcctggaaacggttgacgcctgaaatgggattttttggctacacaaaattgagcgcacgagcggcagagatgcaaatgttaaagaactgtttaagcgccattgcatggtgtttcctatgtagcaaactagaggcaactaaatgttctagttgatcattagcatggagcacttagcattcctgattcagtacaggtagatgtctaacactccagcataatatccaacttggctgttcttgtactctaatgtgaaaaaggattgttgtgcacgcttttcatgtaagcctcgagtgagta

SEQ ID NO: 22091 - DNA, 2315 bp, Zea Mays
ttttattgggtcaatcaaaattagatagctagtccatttggttgccatggagtggtatgtatacaattaatccttttttcttaattagggatccccgttttgttgggtgaatatgtatttcggcctgactgtatgatgccttgtttcttgagattgatatctgttgccactaagcaatgtaaacgttcaacagatttttttgttgttgtggcgttataaagatagcccaatggataactgctgaaacttttgatttctactcctgacgcccaggattaagtcctgggtggctagacattagatataagaatccaatcccgagataaaggtggaaacagagagtatcacaactgtataaacaaaaagtttgagagtaagcattatataatctcctttttttgttaaagaatagataacccattttctctttaccacacggacccattaggatgtgttttctttattttgacacctaaaaaagtgcaaactaccaatcctatttttttgcatattcttttaaaatatatagggacttgtttttaggggtttcagagatgtaatacagagtattggctatggaaaactgtataccagtgctgtagtagttttacttgttaggaatgattttttactttacagtttacactcacggtacctggctttggattcatggtaccatgtcactcacctttcctgactagtgactagttccgggtttctggcccactagataccaaattgtaaattcgaattacaagcgtagtcggtgttatagtcataggattacataatccaacatgcataccttatggtttgctgtcgagttgtgcatttcatatactacagtattggttcctctccctttattgtagggactgatgacgatctccctccagcacaaaatagaggactaagagggcgatctttcagtgggaatgtcgtagcatctgctggggcatttccttacatgagggcaaataatgatctggagagtgaaatacatcgggttgagcaagatgcatatactggtattcttagggcatttaaagtgcaatctgatgcaatatcctgggaaaaggagagcttgattactgaactcaggaaagaactgagggtttctgatgaggagcatagggagctattaaataaagtcaatgaagatgggaccatccgtcgaatgagggagttaagacaggcaggtggatccccaagtggtttgcatcatggcaacatggttttatatggtgcagaacctgggtccactaccaagaggcaaagggcatctcattcgattcctttgcaatcagcaggcctccagtcccctatgatgccctcccactcagtttcatctgcaaaatggggtcctttgcaagcaagaggcacgaaagcgaggacgcccattcctttggcgttaccatctgtggatccaagttcactaataaaccataaagtttatacaaggtggccagaagacaacaacttctatgaggccaccataacacgatataaccctgtgacgggtgagcatggacttgtctatgacatgggcacacaagccgagagttgggaatcagttagactttgtgatgttcaatcaagggaagagggaggttatcaataaatgagactataaaggactatgctccacctgaaaatggcaccaataggaattttgatcatgtcgacataccaaataccggaagtgttgttatggaggtgaagagggtattgttcaacccaaatatgcctgaaatcgagaaggcaaggaaacttttgaaagatcaggagcagtcattacttgatgcaattgccagacttgatgaagcatctgatagcgataatgaagatatggccatggaaggccgaatgggttctgctggggaaaggaatggcatcactacgtagttgcttctggcatgttggaattttggtagattaacatgcatttgtgtagcacctacctcgaccgcagaacaaggaaaccacattatggcaaaactgcatgccagaaaatggtgtcctggaaacggttgacgcctgaaatgggattttttggctacacaaaattgagcgcacgagcggcagagatgcaaatgttaaagaactgtttaagcgccattgcatggtgtttcctatgtagcaaactagaggcaactaaatgttctagttgatcattagcatggagcacttagcattcctgattcagtacaggtagatgtctaacactccagcataatatccaacttggctgttcttgtactctaatgtgaaaaaggattgttgtgcacgcttttcatgtaagcctcgagtgagta

SEQ ID NO: 22092 - DNA, 2376 bp, Zea Mays
ggagtggtatgtatacaattaatccttttttcttaattagggatccccgttttgttgggtgaatatgtatttcggcctgactgtatgatgccttgtttcttgagattgatatctgttgccactaagcaatgtaaacgttcaacagatttttttgttgttgtggcgttataaagatagcccaatggataactgctgaaacttttgatttctactcctgacgcccaggattaagtcctgggtggctagacattagatataagaatccaatcccgagataaaggtggaaacagagagtatcacaactgtataaacaaaaagtttgagagtaagcattatataatctcctttttttgttaaagaatagataacccattttctctttaccacacggacccattaggatgtgttttctttattttgacacctaaaaaagtgcaaactaccaatcctatttttttgcatattcttttaaaatatatagggacttgtttttaggggtttcagagatgtaatacagagtattggctatggaaaactgtataccagtgctgtagtagttttacttgttaggaatgattttttactttacagtttacactcacggtacctggctttggattcatggtaccatgtcactcacctttcctgactagtgactagttccgggtttctggcccactagataccaaattgtaaattcgaattacaagcgtagtcggtgttatagtcataggattacataatccaacatgcataccttatggtttgctgtcgagttgtgcatttcatatactacagtattggttcctctccctttattgtagggactgatgacgatctccctccagcacaaaatagaggactaagagggcgatctttcagtgggaatgtcgtagcatctgctggggcatttccttacatgagggcaaataatgatctggagagtgaaatacatcgggttgagcaagatgcatatactggtattcttagggcatttaaagtgcaatctgatgcaatatcctgggaaaaggagagcttgattactgaactcaggaaagaactgagggtttctgatgaggagcatagggagctattaaataaagtcaatgaagatgggaccatccgtcgaatgagggagttaagacaggcaggtggatccccaagtggtttgcatcatggcaacatggttttatatggtgcagaacctgggtccactaccaagaggcaaagggcatctcattcgattcctttgcaatcagcaggcctccagtcccctatgatgccctcccactcagtttcatctgcaaaatggggtcctttgcaagcaagaggcacgaaagcgaggacgcccattcctttggcgttaccatctgtggatccaagttcactaataaaccataaagtttatacaaggtggccagaagacaacaacttctatgaggccaccataacacgatataaccctggtgagcatggacttgtctatgacatgggcacacaagccgagagttgggaatcagttagactttgtgatatggcacctgaagatataagatggggatttgatggacacctttcaaatcgtgatgtctggagcccttctggccctatgttgatgaggcacatgaccaacaatggtgctatggcaggttcaatcaagggaagagggaggttatcaataaatgagactataaaggactatgctccacctgaaaatggcaccaataggaattttgatcatgtcgacataccaaataccggaagtgttgttatggaggtgaagagggtattgttcaacccaaatatgcctgaaatcgagaaggcaaggaaacttttgaaagatcaggagcagtcattacttgatgcaattgccagacttgatgaagcatctgatagcgataatgaagatatggccatggaaggccgaatgggttctgctggggaaaggaatggcatcactacgtagttgcttctggcatgttggaattttggtagattaacatgcatttgtgtagcacctacctcgaccgcagaacaaggaaaccacattatggcaaaactgcatgccagaaaatggtgtcctggaaacggttgacgcctgaaatgggattttttggctacacaaaattgagcgcacgagcggcagagatgcaaatgttaaagaactgtttaagcgccattgcatggtgtttcctatgtagcaaactagaggcaactaaatgttctagttgatcattagcatggagcacttagcattcctgattcagtacaggtagatgtctaacactccagcataatatccaacttggctgttcttgtactctaatgtgaaaaaggattgttgtgcacgcttttcatgtaagcctcgagtgagta

SEQ ID NO: 22093 - DNA, 2971 bp, Zea Mays
ccgtccgtgcacacctctctctctattgtgcgttgtcgatcccccgcgagcccgccctccctcacccccacgagatggtcgggagatccgccctcgccttgcctccgcgcaacaatcgtgcgcccactcctcatcgcaatccagtagctccggcctcgcctcctcaaccgcgcattcccctctcccacacccgcctcgttcgcccctaccgcgccatcaacgcgcctcccccgccgcacaccccgtcctccccatgccgaatcgtgatggttatgctccccacccacgcgccgcgtgcctcctccttccccgccgctcccacccgagatggttagctcccctccttctggtcccttcccctgcctcactgccagccagcgatggagcaaggccaggggattcgccggattcaccgagcgggctctggtggcggccggcgctgccgtcgtgtccgccattcttgtcaacccccttgacgtcgccaagaagtaatattgctcgaaaatgtagagctgactcttgaagcctttgactaaatgcagctgccattcacgctgaaaggacaaattaggaagctaagcatctagataggagaatttgattggtttgtgtcaatatttaatttcttagctcactctgttcatgcctttgtggttcatggacaactgctgctacgtgctcccttccccgacagcgcattctaacacggcatgatacactagcaactggaatgttgtcaacatcagcggcaacgacgacaacgccacatcgagaaacaacaactgtgggctagggagcacaatcccgtggtgcggtgacttgcccacgtttgccatgctgccttgatgcatggcacatcaacaagaagagcaccagtttggaaggctaattccgaaggaattgagatgtgcagagggagatgaagaatgtggagaaagacatcagggtagctactaagcgcaatgacatgttatctgcaaagagctgatgctgctcggagtcatctcgctgctgctcagccagacggcacgcttcatatcggagatctgcgtgccgtcctcgctcttcaccagccgcttctacatctgctctgagagcgactaccaggacctgctgcgcaacacggacgccaaccagacggcgctcgacaagaacatgttcggtggccagcggctgcacgtctgtggcgagggccatgaaccttttgtttcgtacgagggccttgagcagctgcaccggtttctcttcatccttggtatcactcatgtgttgtacagttttgtaacagtggttctgtccatgatcaagatctatagctggaggaagtgggaaaccttagcaggtccaattgctgctgaggaattgaaagctaggagaaccaaggtgatgagaaggcagtcaacctttgtttttaacaatgcttctcatccatggagcaaaaataaaatacttatttggatggtaaaattccttttctgtttcttgatctttctgtggaacagatactgactgtatcatcctttgttatctgattagtgtattaccgtgtaaagacataaaaatgccttatttttctagctcatccagtcatttcgaattcaacctcaagtttactgatgaaagaacatctaagagtgtcaccgaccatagtcaaaagattcatgtatctgaagcctcaaataagtagtatacatccataatcacttggatttaaagtttctttaattgcattatagctttgctttttgcgccaattcaagggctccataataaggtcagactatttggcactgaggttgggctttgtcacagtgagtactctaatttttttctaatgttttagcatcctcgccccacctcctccccctgccaagatgattctaatatgccactttgttcatgtgtttttcttattagtatcacaagctaccacattcatatgacttccataaatacatggtacggagcatggaagattattacaatgggactattggtatcagttggccactttgggcatatgtgattgtctgcgtattaatcaatgttcatggtatctctactacttattaaggctgtaagggtagcctccctttttttgttctgtctttttcattttcctgttttgccctttccattcccacccgcgcattgcattgatcaccaatcgcatcgcagcagcacaagcagcacgccgtgccgctccaaccgtcttgcttccccgcttagcttcccgccgcgccatggcgtcgaccaaggctcccggcgagaagcaccactccatcgacacgcagctccatcagctggtcccaggcaaggtctccgaggacgacaagctcatcgagtacgatgcgctgctcattgatcgcttcctcaacatcctccaggacctccatgggcccagccttcgcgaatttgtccaggagtgctacgaggtctcggccgactacgagggcaaaggagacacgacgaagctgggcgagctcagcgccaagctcatggggctggcccccgtcgacgccatcctcgtggcgagctccatcctgcacatgctcaacctcgccaacctctccgaggaggtgcagatcacgcaccgctgccgcaacagcaagctcaagaaaggtggcttcgccgacgagggctcagccaccaccgagtccgacatcgaggagacgctcaagcgcctcgtgtccgaggtcggcaagtccctcgaggaggtgttcgaggcgctcaagaaccagatagatccacatttatgcttatgtttattttatattttttgatttgaatatctaaactatgatgttctatgaaagatcattcttgaatttttgcctttaaattttcttgttaaatcttgtatactacactattaaatgagtgctcgtgcgtcacagtcccgagtttctctttaacgtcatcctggacggttcgtggatgtcgtcctccaactcataacagtataacacac

SEQ ID NO: 22094 - DNA, 4274 bp, Zea Mays
ccgtccgtgcacacctctctctctattgtgcgttgtcgatcccccgcgagcccgccctccctcacccccacgagatggtcgggagatccgccctcgccttgcctccgcgcaacaatcgtgcgcccactcctcatcgcaatccagtagctccggcctcgcctcctcaaccgcgcattcccctctcccacacccgcctcgttcgcccctaccgcgccatcaacgcgcctcccccgccgcacaccccgtcctccccatgccgaatcgtgatggttatgctccccacccacgcgccgcgtgcctcctccttccccgccgctcccacccgagatggttagctcccctccttctggtcccttcccctgcctcactgccagccagcgatggagcaaggccaggggattcgccggattcaccgagcgggctctggtggcggccggcgctgccgtcgtgtccgccattcttgtcaacccccttgacgtcgccaaggtacgccggtgaccctgtcgttgcctctttcgcttcctctcaactgccgcccctcaaccctcgacacttgcccacaactgtcgccattgcccgctcgccatggcgctaaaataaaccccctctgcggccgccccgtatcctctcgctgcggccgcgggctggggagcaccggccttggcatcgtcatagccgcgggagtcttcagcgccgccgcctcgttgctcctcgcctacttcttctggcagtgcaccgggaagggcaaaggaggccgccgtcgccacaggcgcggcaccagcgagtcgggcggtggggaagacgggagctggtggaccgagaggctgcgggcggcgcacaaccgcctggtcccggtctcgctgttccagaagcccatcgtgaaggtcaagctcgctgacctgatggccgccacccatgacttcagcactagccacatcgtggtcgccgggagctcgcaggcggggatagcttaccgagccgtgctacgggacgggtctgcgctgacggtcaagcgcctgcactcgtgcccactttcggagaaggcgttcagggcagagatgggtcgtatggggcagctgcggcatcctaacatcgtgccactgctgggcttctgtgttgtcgaggacgagaggctgctggtgtataagcatatggagagtggggctctttcatcggtgatgaagaagccaggggaagcgccgctggattgggcaacgcgacttaggatcgccgtgggggcagcaagggggcttgcgtggctgcaccatgggttccaggttccgcagattcaccagaatttgagctcgagtgcagtgcttctcgacgaggattatgatgctcggatcacggatgttggactcacaaggttggtccggatggcgcctggcgagggtggtgataccagtcctttcctgaacggggactttggggagtttggctatgttgctccagagtatgctagcaatccagttggtacgatgaaaggcgatgcgtatgcatttggggtgatattgtttgagcttgttagcgggcaggagtctgctgctgtggttactgacgtgacgggtgaaggattcaaggggacattggtggactgggttaaccagctcaaggcttctggtcgaatcagtgatgctattgataaaccattgcgtggaaagggccatgaggcagagattcaggagttcttgaagatagcttttgcttgcacccagccccgtgtgacggagaggcattcaatgtatcgggttttccacgctctgaagagcatcggagagggctgcgatgtcacggagcagtttgatgagttcccattggcctataacaaggatgattcagacgctatttagctgatgatgctgattgccaattcgattgtggaaatgtttggtcaggcttattgatgatatatatatttagccttgctatggacagaccggaagcataaatgagtgataagagaacaatatcgaggcaccaaatctagcgccggatgccgggtggtcaattacatcgttgcatcgacaggggatgtgataaccataagtaatattgctcgaaaatgtagagctgactcttgaagcctttgactaaatgcagctgccattcacgctgaaagcgcattctaacacggcatgatacactagcaactggaatgttgtcaacatcagcggcaacgacgacaacgccacatcgagaaacaacaactgtgggctagggagcacaatcccgtggtgcggtgacttgcccacgtttgccatgctgccttgatgcatggcacatcaacaagaagagcaccagtttggaaggctaattccgaaggaattgagatgtgcagagggagatgaagaatgtggagaaagacatcagggtagctactaagcgcaatgacatgttatctgcaaagagctgatgctgctcggagtcatctcgctgctgctcagccagacggcacgcttcatatcggagatctgcgtgccgtcctcgctcttcaccagccgcttctacatctgctctgagagcgactaccaggacctgctgcgcaacacggacgccaaccagacggcgctcgacaagaacatgttcggtggccagcggctgcacgtctgtggcgagggccatgaaccttttgtttcgtacgagggccttgagcagctgcaccggtttctcttcatccttggtatcactcatgtgttgtacagttttgtaacagtggttctgtccatgatcaagatctatagctggaggaagtgggaaaccttagcaggtccaattgctgctgaggaattgaaagctaggagaaccaaggtgatgagaaggcagtcaacctttgtttttaacaatgcttctcatccatggagcaaaaataaaatacttatttggatggtaaaattccttttctgtttcttgatctttctgtggaacagatactgactgtatcatcctttgttatctgattagtgtattaccgtgtaaagacataaaaatgccttatttttctagctcatccagtcatttcgaattcaacctcaagtttactgatgaaagaacatctaagagtgtcaccgaccatagtcaaaagattcatgtatctgaagcctcaaataagtagtatacatccataatcacttggatttaaagtttctttaattgcattatagctttgctttttgcgccaattcaagggctccataataaggtcagactatttggcactgagtatcacaagctaccacattcatatgacttccataaatacatggtacggagcatggaagattattacaatgggactattggtatcagttggccactttgggcatatgtgattgtctgcgtattaatcaatgttcatggtatctctactacttattaaggctgtaagggtagcctccctttttttgttctgtctttttcattttcctgttttgccctttccattcccacccgcgcattgcattgatcaccaatcgcatcgcagcagcacaagcagcacgccgtgccgctccaaccgtcttgcttccccgcttagcttcccgccgcgccatggcgtcgaccaaggctcccggcgagaagcaccactccatcgacacgcagctccatcagctggtcccaggcaaggtctccgaggacgacaagctcatcgagtacgatgcgctgctcattgatcgcttcctcaacatcctccaggacctccatgggcccagccttcgcgaatttgtccaggagtgctacgaggtctcggccgactacgagggcaaaggagacacgacgaagctgggcgagctcagcgccaagctcatggggctggcccccgtcgacgccatcctcgtggcgagctccatcctgcacatgctcaacctcgccaacctctccgaggaggtgcagatcacgcaccgctgccgcaacagcaagctcaagaaaggtggcttcgccgacgagggctcagccaccaccgagtccgacatcgaggagacgctcaagcgcctcgtgtccgaggtcggcaagtccctcgaggaggtgttcgaggcgctcaagaaccagatagatccacatttatgcttatgtttattttatattttttgatttgaatatctaaactatgatgttctatgaaagatcattcttgaatttttgcctttaaattttcttgttaaatcttgtatactacactattaaatgagtgctcgtgcgtcacagtcccgagtttctctttaacgtcatcctggacggttcgtggatgtcgtcctccaactcataacagtataacacac

SEQ ID NO: 22095 - DNA, 5553 bp, Zea Mays
ccgtccgtgcacacctctctctctattgtgcgttgtcgatcccccgcgagcccgccctccctcacccccacgagatggtcgggagatccgccctcgccttgcctccgcgcaacaatcgtgcgcccactcctcatcgcaatccagtagctccggcctcgcctcctcaaccgcgcattcccctctcccacacccgcctcgttcgcccctaccgcgccatcaacgcgcctcccccgccgcacaccccgtcctccccatgccgaatcgtgatggttatgctccccacccacgcgccgcgtgcctcctccttccccgccgctcccacccgagatggttagctcccctccttctggtcccttcccctgcctcactgccagccagcgatggagcaaggccaggggattcgccggattcaccgagcgggctctggtggcggccggcgctgccgtcgtgtccgccattcttgtcaacccccttgacgtcgccaagtgcaccgggaagggcaaaggaggccgccgtcgccacaggcgcggcaccagcgagtcgggcggtggggaagacgggagctggtggaccgagaggctgcgggcggcgcacaaccgcctggtcccggtctcgctgttccagaagcccatcgtgaaggtcaagctcgctgacctgatggccgccacccatgacttcagcactagccacatcgtggtcgccgggagctcgcaggcggggatagcttaccgagccgtgctacgggacgggtctgcgctgacggtcaagcgcctgcactcgtgcccactttcggagaaggcgttcagggcagagatgggtcgtatggggcagctgcggcatcctaacatcgtgccactgctgggcttctgtgttgtcgaggacgagaggctgctggtgtataagcatatggagagtggggctctttcatcggtgatgaagaagccaggggaagcgccgctggattgggcaacgcgacttaggatcgccgtgggggcagcaagggggcttgcgtggctgcaccatgggttccaggttccgcagattcaccagaatttgagctcgagtgcagtgcttctcgacgaggattatgatgctcggatcacggatgttggactcacaaggttggtccggatggcgcctggcgagggtggtgataccagtcctttcctgaacggggactttggggagtttggctatgttgctccagagtatgctagcaatccagttggtacgatgaaaggcgatgcgtatgcatttggggtgatattgtttgagcttgttagcgggcaggagtctgctgctgtggttactgacgtgacgggtgaaggattcaaggggacattggtggactgggttaaccagctcaaggcttctggtcgaatcagtgatgctattgataaaccattgcgtggaaagggccatgaggcagagattcaggagttcttgaagatagcttttgcttgcacccagccccgtgtgacggagaggcattcaatgtatcgggttttccacgctctgaagagcatcggagagggctgcgatgtcacggagcagtttgatgagttcccattggcctataacaaggatgattcagacgctatttagctgatgatgctgattgccaattcgattgtggaaatgtttggtcaggcttattgatgatatatatatttagccttgctatggacagaccggaagcataaatgagtgataagagaacaatatcgaggcaccaaatctagcgccggatgccgggtggtcaattacatcgttgcatcgacaggggatgtgataaccataagtaatattgctcgaaaatgtagagctgactcttgaagcctttgactaaatgcagctgccattcacgctgaaaggacaaattaggaagctaagcatctagataggagaatttgattggtttgtgtcaatatttaatttcttagctcactctgttcatgcctttgtggttcatggacaactgctgctacgtgctcccttccccgacagcgcattctaacacggcatgatacactagcaactggaatgttgtcaacatcagcggcaacgacgacaacgccacatcgagaaacaacaactgtgggctagggagcacaatcccgtggtgcggtgacttgcccacgtttgccatgctgccttgatgcatggcacatcaacaagaagagcaccagtttggaaggctaattccgaaggaattgagatgtgcagagggagatgaagaatgtggagaaagacatcagggtagctactaagcgcaatgacatgttatctgcaaaggtacggtcagtctgatcttgttttctatataagtgttcctctcttgtagcatggattgctgggattctgacagtagcacagtttgtcaaggtgaatcttggagtaatgtagatacaaatcaaagttatctcctggcgctaaataaggttttagaattgatgttcatcttcttgtctaatgtggattgggtgctattacatgagcaaaagaaaaccttaaaggttgtcttagtgtataaataataaacatggcaggagcagaaccaaaagaaaaaacaatatcataacctttgcacacctcactacaaatttaatatgctgatgtcatacatatgatgtactattacttttgatataagcttcatacctggtaatcgaatataatatgtgaatgtgtgttgggtcacacattaattatttttctagaaaaatgtaaagtttgaagattattttagttggtttgcaaattcttcagctcctgcgtttgactattgtcatctcaatttattttagtcgacatttgtttactggagactagagttcagttttacttccattggatcaattgttgtgcgaatcatgaataaacttattaattggagtaattggttttgtctgaacttcctacttccaagaatgctcgggtatttgagattgactttggatccgttgaggatgcccaaacaggcattctcatgtttctggcacaaacagagaaagatatgttagccaccaaaacttattgccactaataataattcatcgcaagaatacagtaaaaaacttcttatttatagttcttcattagtaatggtcttaccacaaatatggagtttctacattattaaataggattcttgtgtcagcatccactttaaaaggagggtacatcatcaaattgatcataatcttattcatcattaatatcctcgactctgataatatttttttctgggcaaaataatgtagctcatcatcttgtttcttgtcactttttgggtttaaaagttaatatgtctgtagaattcccaagtcacatccttcgtgaggacaaaaggttcgtctctatatccaatatttttgaggtccatggttattggttgtcaatttgtcataccatattcagggtccactataatgcctccacctgccaatttcacccattgccaatgaaacagatgaacctttaaatatactaatgaacctttaaatatactaactcatagtcgactgttagcctctcaccaatagaagccatgtctgcacgcagagctgatgctgctcggagtcatctcgctgctgctcagccagacggcacgcttcatatcggagatctgcgtgccgtcctcgctcttcaccagccgcttctacatctgctctgagagcgactaccaggacctgctgcgcaacacggacgccaaccagacggcgctcgacaagaacatgttcggtggccagcggctgcacgtctgtggcgagggccatgaaccttttgtttcgtacgagggccttgagcagctgcaccggtttctcttcatccttggtatcactcatgtgttgtacagttttgtaacagtggttctgtccatgatcaagatctatagctggaggaagtgggaaaccttagcaggtccaattgctgctgaggaattgaaagctaggagaaccaaggtgatgagaaggcagtcaacctttgtttttaacaatgcttctcatccatggagcaaaaataaaatacttatttggatggtaaaattccttttctgtttcttgatctttctgtggaacagatactgactgtatcatcctttgttatctgattagtgtattaccgtgtaaagacataaaaatgccttatttttctagctcatccagtcatttcgaattcaacctcaagtttactgatgaaagaacatctaagagtgtcaccgaccatagtcaaaagattcatgtatctgaagcctcaaataagtagtatacatccataatcacttggatttaaagtttctttaattgcattatagctttgctttttgcgccaattcaagggctccataataaggtcagactatttggcactgaggttgggctttgtcacagtgagtactctaatttttttctaatgttttagcatcctcgccccacctcctccccctgccaagatgattctaatatgccactttgttcatgtgtttttcttattagtatcacaagctaccacattcatatgacttccataaatacatggtacggagcatggaagattattacaatgggactattggtatcagttggccactttgggcatatgtgattgtctgcgtattaatcaatgttcatggtatctctactacttattaaggctgtaagggtagcctccctttttttgttctgtctttttcattttcctgttttgccctttccattcccacccgcgcattgcattgatcaccaatcgcatcgcagcagcacaagcagcacgccgtgccgctccaaccgtcttgcttccccgcttagcttcccgccgcgccatggcgtcgaccaaggctcccggcgagaagcaccactccatcgacacgcagctccatcagctggtcccaggcaaggtctccgaggacgacaagctcatcgagtacgatgcgctgctcattgatcgcttcctcaacatcctccaggacctccatgggcccagccttcgcgaatttgtccaggagtgctacgaggtctcggccgactacgagggcaaaggagacacgacgaagctgggcgagctcagcgccaagctcatggggctggcccccgtcgacgccatcctcgtggcgagctccatcctgcacatgctcaacctcgccaacctctccgaggaggtgcagatcacgcaccgctgccgcaacagcaagctcaagaaaggtggcttcgccgacgagggctcagccaccaccgagtccgacatcgaggagacgctcaagcgcctcgtgtccgaggtcggcaagtccctcgaggaggtgttcgaggcgctcaagaaccagatagatccacatttatgcttatgtttattttatattttttgatttgaatatctaaactatgatgttctatgaaagatcattcttgaatttttgcctttaaattttcttgttaaatcttgtatactacactattaaatgagtgctcgtgcgtcacagtcccgagtttctctttaacgtcatcctggacggttcgtggatgtcgtcctccaactcataacagtataacacac

SEQ ID NO: 22096 - DNA, 3874 bp, Zea Mays
ccgtccgtgcacacctctctctctattgtgcgttgtcgatcccccgcgagcccgccctccctcacccccacgagatggtcgggagatccgccctcgccttgcctccgcgcaacaatcgtgcgcccactcctcatcgcaatccagtagctccggcctcgcctcctcaaccgcgcattcccctctcccacacccgcctcgttcgcccctaccgcgccatcaacgcgcctcccccgccgcacaccccgtcctccccatgccgaatcgtgatggttatgctccccacccacgcgccgcgtgcctcctccttccccgccgctcccacccgagatggttagctcccctccttctggtcccttcccctgcctcactgccagccagcgatggagcaaggccaggggattcgccggattcaccgagcgggctctggtggcggccggcgctgccgtcgtgtccgccattcttgtcaacccccttgacgtcgccaaggtacgccggtgaccctgtcgttgcctctttcgcttcctctcaactgccgcccctcaaccctcgacacttgcccacaactgtcgccattgcccgctcgccatggcgctaaaataaaccccctctgcggccgccccgtatcctctcgctgcggccgcgggctggggagcaccggccttggcatcgtcatagccgcgggagtcttcagcgccgccgcctcgttgctcctcgcctacttcttctggcagtgcaccgggaagggcaaaggaggccgccgtcgccacaggcgcggcaccagcgagtcgggcggtggggaagacgggagctggtggaccgagaggctgcgggcggcgcacaaccgcctggtcccggtctcgctgttccagaagcccatcgtgaaggtcaagctcgctgacctgatggccgccacccatgacttcagcactagccacatcgtggtcgccgggagctcgcaggcggggatagcttaccgagccgtgctacgggacgggtctgcgctgacggtcaagcgcctgcactcgtgcccactttcggagaaggcgttcagggcagagatgggtcgtatggggcagctgcggcatcctaacatcgtgccactgctgggcttctgtgttgtcgaggacgagaggctgctggtgtataagcatatggagagtggggctctttcatcggtgatgaagaagccaggggaagcgccgctggattgggcaacgcgacttaggatcgccgtgggggcagcaagggggcttgcgtggctgcaccatgggttccaggttccgcagattcaccagaatttgagctcgagtgcagtgcttctcgacgaggattatgatgctcggatcacggatgttggactcacaaggttggtccggatggcgcctggcgagggtggtgataccagtcctttcctgaacggggactttggggagtttggctatgttgctccagagtatgctagcaatccagttggtacgatgaaaggcgatgcgtatgcatttggggtgatattgtttgagcttgttagcgggcaggagtctgctgctgtggttactgacgtgacgggtgaaggattcaaggggacattggtggactgggttaaccagctcaaggcttctggtcgaatcagtgatgctattgataaaccattgcgtggaaagggccatgaggcagagattcaggagttcttgaagatagcttttgcttgcacccagccccgtgtgacggagaggcattcaatgtatcgggttttccacgctctgaagagcatcggagagggctgcgatgtcacggagcagtttgatgagttcccattggcctataacaaggatgattcagacgctatttagctgatgatgctgattgccaattcgattgtggaaatgtttggtcaggcttattgatgatatatatatttagccttgctatggacagaccggaagcataaatgagtgataagagaacaatatcgaggcaccaaatctagcgccggatgccgggtggtcaattacatcgttgcatcgacaggggatgtgataaccataagtaatattgctcgaaaatgtagagctgactcttgaagcctttgactaaatgcagctgccattcacgctgaaagcgcattctaacacggcatgatacactagcaactggaatgttgtcaacatcagcggcaacgacgacaacgccacatcgagaaacaacaactgtgggctagggagcacaatcccgtggtgcggtgacttgcccacgtttgccatgctgccttgatgcatggcacatcaacaagaagagcaccagtttggaaggctaattccgaaggaattgagatgtgcagagggagatgaagaatgtggagaaagacatcagggtagctactaagcgcaatgacatgttatctgcaaagagctgatgctgctcggagtcatctcgctgctgctcagccagacggcacgcttcatatcggagatctgcgtgccgtcctcgctcttcaccagccgcttctacatctgctctgagagcgactaccaggacctgctgcgcaacacggacgccaaccagacggcgctcgacaagaacatgttcggtggccagcggctgcacgtctgtggcgagggccatgaaccttttgtttcgtacgagggccttgagcagctgcaccggtttctcttcatccttggtatcactcatgtgttgtacagttttgtaacagtggttctgtccatgatcaagatctatagctggaggaagtgggaaaccttagcaggtccaattgctgctgaggaattgaaagctaggagaaccaaggtgatgagaaggcagtcaacctttgtttttaacaatgcttctcatccatggagcaaaaataaaatacttatttggatgctttgctttttgcgccaattcaagggctccataataaggtcagactatttggcactgagtatcacaagctaccacattcatatgacttccataaatacatggtacggagcatggaagattattacaatgggactattggtatcagttggccactttgggcatatgtgattgtctgcgtattaatcaatgttcatgcagcacaagcagcacgccgtgccgctccaaccgtcttgcttccccgcttagcttcccgccgcgccatggcgtcgaccaaggctcccggcgagaagcaccactccatcgacacgcagctccatcagctggtcccaggcaaggtctccgaggacgacaagctcatcgagtacgatgcgctgctcattgatcgcttcctcaacatcctccaggacctccatgggcccagccttcgcgaatttgtccaggagtgctacgaggtctcggccgactacgagggcaaaggagacacgacgaagctgggcgagctcagcgccaagctcatggggctggcccccgtcgacgccatcctcgtggcgagctccatcctgcacatgctcaacctcgccaacctctccgaggaggtgcagatcacgcaccgctgccgcaacagcaagctcaagaaaggtggcttcgccgacgagggctcagccaccaccgagtccgacatcgaggagacgctcaagcgcctcgtgtccgaggtcggcaagtccctcgaggaggtgttcgaggcgctcaagaaccagatagatccacatttatgcttatgtttattttatattttttgatttgaatatctaaactatgatgttctatgaaagatcattcttgaatttttgcctttaaattttcttgttaaatcttgtatactacactattaaatgagtgctcgtgcgtcacagtcccgagtttctctttaacgtcatcctggacggttcgtggatgtcgtcctccaactcataacagtataacacac

SEQ ID NO: 22097 - DNA, 4026 bp, Zea Mays
ccgtccgtgcacacctctctctctattgtgcgttgtcgatcccccgcgagcccgccctccctcacccccacgagatggtcgggagatccgccctcgccttgcctccgcgcaacaatcgtgcgcccactcctcatcgcaatccagtagctccggcctcgcctcctcaaccgcgcattcccctctcccacacccgcctcgttcgcccctaccgcgccatcaacgcgcctcccccgccgcacaccccgtcctccccatgccgaatcgtgatggttatgctccccacccacgcgccgcgtgcctcctccttccccgccgctcccacccgagatggttagctcccctccttctggtcccttcccctgcctcactgccagccagcgatggagcaaggccaggggattcgccggattcaccgagcgggctctggtggcggccggcgctgccgtcgtgtccgccattcttgtcaacccccttgacgtcgccaagtgcaccgggaagggcaaaggaggccgccgtcgccacaggcgcggcaccagcgagtcgggcggtggggaagacgggagctggtggaccgagaggctgcgggcggcgcacaaccgcctggtcccggtctcgctgttccagaagcccatcgtgaaggtcaagctcgctgacctgatggccgccacccatgacttcagcactagccacatcgtggtcgccgggagctcgcaggcggggatagcttaccgagccgtgctacgggacgggtctgcgctgacggtcaagcgcctgcactcgtgcccactttcggagaaggcgttcagggcagagatgggtcgtatggggcagctgcggcatcctaacatcgtgccactgctgggcttctgtgttgtcgaggacgagaggctgctggtgtataagcatatggagagtggggctctttcatcggtgatgaagaagccaggggaagcgccgctggattgggcaacgcgacttaggatcgccgtgggggcagcaagggggcttgcgtggctgcaccatgggttccaggttccgcagattcaccagaatttgagctcgagtgcagtgcttctcgacgaggattatgatgctcggatcacggatgttggactcacaaggttggtccggatggcgcctggcgagggtggtgataccagtcctttcctgaacggggactttggggagtttggctatgttgctccagagtatgctagcaatccagttggtacgatgaaaggcgatgcgtatgcatttggggtgatattgtttgagcttgttagcgggcaggagtctgctgctgtggttactgacgtgacgggtgaaggattcaaggggacattggtggactgggttaaccagctcaaggcttctggtcgaatcagtgatgctattgataaaccattgcgtggaaagggccatgaggcagagattcaggagttcttgaagatagcttttgcttgcacccagccccgtgtgacggagaggcattcaatgtatcgggttttccacgctctgaagagcatcggagagggctgcgatgtcacggagcagtttgatgagttcccattggcctataacaaggatgattcagacgctatttagctgatgatgctgattgccaattcgattgtggaaatgtttggtcaggcttattgatgatatatatatttagccttgctatggacagaccggaagcataaatgagtgataagagaacaatatcgaggcaccaaatctagcgccggatgccgggtggtcaattacatcgttgcatcgacaggggatgtgataaccataagtaatattgctcgaaaatgtagagctgactcttgaagcctttgactaaatgcagctgccattcacgctgaaagcgcattctaacacggcatgatacactagcaactggaatgttgtcaacatcagcggcaacgacgacaacgccacatcgagaaacaacaactgtgggctagggagcacaatcccgtggtgcggtgacttgcccacgtttgccatgctgccttgatgcatggcacatcaacaagaagagcaccagtttggaaggctaattccgaaggaattgagatgtgcagagggagatgaagaatgtggagaaagacatcagggtagctactaagcgcaatgacatgttatctgcaaagagctgatgctgctcggagtcatctcgctgctgctcagccagacggcacgcttcatatcggagatctgcgtgccgtcctcgctcttcaccagccgcttctacatctgctctgagagcgactaccaggacctgctgcgcaacacggacgccaaccagacggcgctcgacaagaacatgttcggtggccagcggctgcacgtctgtggcgagggccatgaaccttttgtttcgtacgagggccttgagcagctgcaccggtttctcttcatccttggtatcactcatgtgttgtacagttttgtaacagtggttctgtccatgatcaagatctatagctggaggaagtgggaaaccttagcaggtccaattgctgctgaggaattgaaagctaggagaaccaaggtgatgagaaggcagtcaacctttgtttttaacaatgcttctcatccatggagcaaaaataaaatacttatttggatggtaaaattccttttctgtttcttgatctttctgtggaacagatactgactgtatcatcctttgttatctgattagtgtattaccgtgtaaagacataaaaatgccttatttttctagctcatccagtcatttcgaattcaacctcaagtttactgatgaaagaacatctaagagtgtcaccgaccatagtcaaaagattcatgtatctgaagcctcaaataagtagtatacatccataatcacttggatttaaagtttctttaattgcattatagctttgctttttgcgccaattcaagggctccataataaggtcagactatttggcactgaggttgggctttgtcacagtgagtactctaatttttttctaatgttttagcatcctcgccccacctcctccccctgccaagatgattctaatatgccactttgttcatgtgtttttcttattagtatcacaagctaccacattcatatgacttccataaatacatggtacggagcatggaagattattacaatgggactattggtatcagttggccactttgggcatatgtgattgtctgcgtattaatcaatgttcatgcagcacaagcagcacgccgtgccgctccaaccgtcttgcttccccgcttagcttcccgccgcgccatggcgtcgaccaaggctcccggcgagaagcaccactccatcgacacgcagctccatcagctggtcccaggcaaggtctccgaggacgacaagctcatcgagtacgatgcgctgctcattgatcgcttcctcaacatcctccaggacctccatgggcccagccttcgcgaatttgtccaggagtgctacgaggtctcggccgactacgagggcaaaggagacacgacgaagctgggcgagctcagcgccaagctcatggggctggcccccgtcgacgccatcctcgtggcgagctccatcctgcacatgctcaacctcgccaacctctccgaggaggtgcagatcacgcaccgctgccgcaacagcaagctcaagaaaggtggcttcgccgacgagggctcagccaccaccgagtccgacatcgaggagacgctcaagcgcctcgtgtccgaggtcggcaagtccctcgaggaggtgttcgaggcgctcaagaaccagatagatccacatttatgcttatgtttattttatattttttgatttgaatatctaaactatgatgttctatgaaagatcattcttgaatttttgcctttaaattttcttgttaaatcttgtatactacactattaaatgagtgctcgtgcgtcacagtcccgagtttctctttaacgtcatcctggacggttcgtggatgtcgtcctccaactcataacagtataacacac

SEQ ID NO: 22098 - DNA, 3999 bp, Zea Mays
ccgtccgtgcacacctctctctctattgtgcgttgtcgatcccccgcgagcccgccctccctcacccccacgagatggtcgggagatccgccctcgccttgcctccgcgcaacaatcgtgcgcccactcctcatcgcaatccagtagctccggcctcgcctcctcaaccgcgcattcccctctcccacacccgcctcgttcgcccctaccgcgccatcaacgcgcctcccccgccgcacaccccgtcctccccatgccgaatcgtgatggttatgctccccacccacgcgccgcgtgcctcctccttccccgccgctcccacccgagatggttagctcccctccttctggtcccttcccctgcctcactgccagccagcgatggagcaaggccaggggattcgccggattcaccgagcgggctctggtggcggccggcgctgccgtcgtgtccgccattcttgtcaacccccttgacgtcgccaaggtacgccggtgaccctgtcgttgcctctttcgcttcctctcaactgccgcccctcaaccctcgacacttgcccacaactgtcgccattgcccgctcgccatggcgctaaaataaaccccctctgcggccgccccgtatcctctcgctgcggccgcgggctggggagcaccggccttggcatcgtcatagccgcgggagtcttcagcgccgccgcctcgttgctcctcgcctacttcttctggcagtgcaccgggaagggcaaaggaggccgccgtcgccacaggcgcggcaccagcgagtcgggcggtggggaagacgggagctggtggaccgagaggctgcgggcggcgcacaaccgcctggtcccggtctcgctgttccagaagcccatcgtgaaggtcaagctcgctgacctgatggccgccacccatgacttcagcactagccacatcgtggtcgccgggagctcgcaggcggggatagcttaccgagccgtgctacgggacgggtctgcgctgacggtcaagcgcctgcactcgtgcccactttcggagaaggcgttcagggcagagatgggtcgtatggggcagctgcggcatcctaacatcgtgccactgctgggcttctgtgttgtcgaggacgagaggctgctggtgtataagcatatggagagtggggctctttcatcggtgatgaagaagccaggggaagcgccgctggattgggcaacgcgacttaggatcgccgtgggggcagcaagggggcttgcgtggctgcaccatgggttccaggttccgcagattcaccagaatttgagctcgagtgcagtgcttctcgacgaggattatgatgctcggatcacggatgttggactcacaaggttggtccggatggcgcctggcgagggtggtgataccagtcctttcctgaacggggactttggggagtttggctatgttgctccagagtatgctagcaatccagttggtacgatgaaaggcgatgcgtatgcatttggggtgatattgtttgagcttgttagcgggcaggagtctgctgctgtggttactgacgtgacgggtgaaggattcaaggggacattggtggactgggttaaccagctcaaggcttctggtcgaatcagtgatgctattgataaaccattgcgtggaaagggccatgaggcagagattcaggagttcttgaagatagcttttgcttgcacccagccccgtgtgacggagaggcattcaatgtatcgggttttccacgctctgaagagcatcggagagggctgcgatgtcacggagcagtttgatgagttcccattggcctataacaaggatgattcagacgctatttagctgatgatgctgattgccaattcgattgtggaaatgtttggtcaggcttattgatgatatatatatttagccttgctatggacagaccggaagcataaatgagtgataagagaacaatatcgaggcaccaaatctagcgccggatgccgggtggtcaattacatcgttgcatcgacaggggatgtgataaccataagtaatattgctcgaaaatgtagagctgactcttgaagcctttgactaaatgcagctgccattcacgctgaaagcgcattctaacacggcatgatacactagcaactggaatgttgtcaacatcagcggcaacgacgacaacgccacatcgagaaacaacaactgtgggctagggagcacaatcccgtggtgcggtgacttgcccacgtttgccatgctgccttgatgcatggcacatcaacaagaagagcaccagtttggaaggctaattccgaaggaattgagatgtgcagagggagatgaagaatgtggagaaagacatcagggtagctactaagcgcaatgacatgttatctgcaaagagctgatgctgctcggagtcatctcgctgctgctcagccagacggcacgcttcatatcggagatctgcgtgccgtcctcgctcttcaccagccgcttctacatctgctctgagagcgactaccaggacctgctgcgcaacacggacgccaaccagacggcgctcgacaagaacatgttcggtggccagcggctgcacgtctgtggcgagggccatgaaccttttgtttcgtacgagggccttgagcagctgcaccggtttctcttcatccttggtatcactcatgtgttgtacagttttgtaacagtggttctgtccatgatcaagatctatagctggaggaagtgggaaaccttagcaggtccaattgctgctgaggaattgaaagctaggagaaccaaggtgatgagaaggcagtcaacctttgtttttaacaatgcttctcatccatggagcaaaaataaaatacttatttggatgctttgctttttgcgccaattcaagggctccataataaggtcagactatttggcactgagtatcacaagctaccacattcatatgacttccataaatacatggtacggagcatggaagattattacaatgggactattggtatcagttggccactttgggcatatgtgattgtctgcgtattaatcaatgttcatggtatctctactacttattaaggctgtaagggtagcctccctttttttgttctgtctttttcattttcctgttttgccctttccattcccacccgcgcattgcattgatcaccaatcgcatcgcagcagcacaagcagcacgccgtgccgctccaaccgtcttgcttccccgcttagcttcccgccgcgccatggcgtcgaccaaggctcccggcgagaagcaccactccatcgacacgcagctccatcagctggtcccaggcaaggtctccgaggacgacaagctcatcgagtacgatgcgctgctcattgatcgcttcctcaacatcctccaggacctccatgggcccagccttcgcgaatttgtccaggagtgctacgaggtctcggccgactacgagggcaaaggagacacgacgaagctgggcgagctcagcgccaagctcatggggctggcccccgtcgacgccatcctcgtggcgagctccatcctgcacatgctcaacctcgccaacctctccgaggaggtgcagatcacgcaccgctgccgcaacagcaagctcaagaaaggtggcttcgccgacgagggctcagccaccaccgagtccgacatcgaggagacgctcaagcgcctcgtgtccgaggtcggcaagtccctcgaggaggtgttcgaggcgctcaagaaccagatagatccacatttatgcttatgtttattttatattttttgatttgaatatctaaactatgatgttctatgaaagatcattcttgaatttttgcctttaaattttcttgttaaatcttgtatactacactattaaatgagtgctcgtgcgtcacagtcccgagtttctctttaacgtcatcctggacggttcgtggatgtcgtcctccaactcataacagtataacacac

SEQ ID NO: 22099 - DNA, 4261 bp, Zea Mays
ccgtccgtgcacacctctctctctattgtgcgttgtcgatcccccgcgagcccgccctccctcacccccacgagatggtcgggagatccgccctcgccttgcctccgcgcaacaatcgtgcgcccactcctcatcgcaatccagtagctccggcctcgcctcctcaaccgcgcattcccctctcccacacccgcctcgttcgcccctaccgcgccatcaacgcgcctcccccgccgcacaccccgtcctccccatgccgaatcgtgatggttatgctccccacccacgcgccgcgtgcctcctccttccccgccgctcccacccgagatggttagctcccctccttctggtcccttcccctgcctcactgccagccagcgatggagcaaggccaggggattcgccggattcaccgagcgggctctggtggcggccggcgctgccgtcgtgtccgccattcttgtcaacccccttgacgtcgccaaggtacgccggtgaccctgtcgttgcctctttcgcttcctctcaactgccgcccctcaaccctcgacacttgcccacaactgtcgccattgcccgctcgccatggcgctaaaataaaccccctctgcggccgccccgtatcctctcgctgcggccgcgggctggggagcaccggccttggcatcgtcatagccgcgggagtcttcagcgccgccgcctcgttgctcctcgcctacttcttctggcagtgcaccgggaagggcaaaggaggccgccgtcgccacaggcgcggcaccagcgagtcgggcggtggggaagacgggagctggtggaccgagaggctgcgggcggcgcacaaccgcctggtcccggtctcgctgttccagaagcccatcgtgaaggtcaagctcgctgacctgatggccgccacccatgacttcagcactagccacatcgtggtcgccgggagctcgcaggcggggatagcttaccgagccgtgctacgggacgggtctgcgctgacggtcaagcgcctgcactcgtgcccactttcggagaaggcgttcagggcagagatgggtcgtatggggcagctgcggcatcctaacatcgtgccactgctgggcttctgtgttgtcgaggacgagaggctgctggtgtataagcatatggagagtggggctctttcatcggtgatgaagaagccaggggaagcgccgctggattgggcaacgcgacttaggatcgccgtgggggcagcaagggggcttgcgtggctgcaccatgggttccaggttccgcagattcaccagaatttgagctcgagtgcagtgcttctcgacgaggattatgatgctcggatcacggatgttggactcacaaggttggtccggatggcgcctggcgagggtggtgataccagtcctttcctgaacggggactttggggagtttggctatgttgctccagagtatgctagcaatccagttggtacgatgaaaggcgatgcgtatgcatttggggtgatattgtttgagcttgttagcgggcaggagtctgctgctgtggttactgacgtgacgggtgaaggattcaaggggacattggtggactgggttaaccagctcaaggcttctggtcgaatcagtgatgctattgataaaccattgcgtggaaagggccatgaggcagagattcaggagttcttgaagatagcttttgcttgcacccagccccgtgtgacggagaggcattcaatgtatcgggttttccacgctctgaagagcatcggagagggctgcgatgtcacggagcagtttgatgagttcccattggcctataacaaggatgattcagacgctatttagctgatgatgctgattgccaattcgattgtggaaatgtttggtcaggcttattgatgatatatatatttagccttgctatggacagaccggaagcataaatgagtgataagagaacaatatcgaggcaccaaatctagcgccggatgccgggtggtcaattacatcgttgcatcgacaggggatgtgataaccataagtaatattgctcgaaaatgtagagctgactcttgaagcctttgactaaatgcagctgccattcacgctgaaagcgcattctaacacggcatgatacactagcaactggaatgttgtcaacatcagcggcaacgacgacaacgccacatcgagaaacaacaactgtgggctagggagcacaatcccgtggtgcggtgacttgcccacgtttgccatgctgccttgatgcatggcacatcaacaagaagagcaccagtttggaaggctaattccgaaggaattgagatgtgcagagggagatgaagaatgtggagaaagacatcagggtagctactaagcgcaatgacatgttatctgcaaagttaatatgtctgtagaattcccaagtcacatccttcgtgaggacaaaaggttcgtctctatatccaatatttttgaggtccatggttattggttgtcaatttgtcataccatattcagggtccactataatgcctccacctgccaatttcacccattgccaatgaaacagatgaacctttaaatatactaatgaacctttaaatatactaactcatagtcgactgttagcctctcaccaatagaagccatgtctgcacgcagagctgatgctgctcggagtcatctcgctgctgctcagccagacggcacgcttcatatcggagatctgcgtgccgtcctcgctcttcaccagccgcttctacatctgctctgagagcgactaccaggacctgctgcgcaacacggacgccaaccagacggcgctcgacaagaacatgttcggtggccagcggctgcacgtctgtggcgagggccatgaaccttttgtttcgtacgagggccttgagcagctgcaccggtttctcttcatccttggtatcactcatgtgttgtacagttttgtaacagtggttctgtccatgatcaagatctatagctggaggaagtgggaaaccttagcaggtccaattgctgctgaggaattgaaagctaggagaaccaaggtgatgagaaggcagtcaacctttgtttttaacaatgcttctcatccatggagcaaaaataaaatacttatttggatgctttgctttttgcgccaattcaagggctccataataaggtcagactatttggcactgagtatcacaagctaccacattcatatgacttccataaatacatggtacggagcatggaagattattacaatgggactattggtatcagttggccactttgggcatatgtgattgtctgcgtattaatcaatgttcatggtatctctactacttattaaggctgtaagggtagcctccctttttttgttctgtctttttcattttcctgttttgccctttccattcccacccgcgcattgcattgatcaccaatcgcatcgcagcagcacaagcagcacgccgtgccgctccaaccgtcttgcttccccgcttagcttcccgccgcgccatggcgtcgaccaaggctcccggcgagaagcaccactccatcgacacgcagctccatcagctggtcccaggcaaggtctccgaggacgacaagctcatcgagtacgatgcgctgctcattgatcgcttcctcaacatcctccaggacctccatgggcccagccttcgcgaatttgtccaggagtgctacgaggtctcggccgactacgagggcaaaggagacacgacgaagctgggcgagctcagcgccaagctcatggggctggcccccgtcgacgccatcctcgtggcgagctccatcctgcacatgctcaacctcgccaacctctccgaggaggtgcagatcacgcaccgctgccgcaacagcaagctcaagaaaggtggcttcgccgacgagggctcagccaccaccgagtccgacatcgaggagacgctcaagcgcctcgtgtccgaggtcggcaagtccctcgaggaggtgttcgaggcgctcaagaaccagatagatccacatttatgcttatgtttattttatattttttgatttgaatatctaaactatgatgttctatgaaagatcattcttgaatttttgcctttaaattttcttgttaaatcttgtatactacactattaaatgagtgctcgtgcgtcacagtcccgagtttctctttaacgtcatcctggacggttcgtggatgtcgtcctccaactcataacagtataacacac

SEQ ID NO: 22100 - DNA, 2574 bp, Zea Mays
ccgtccgtgcacacctctctctctattgtgcgttgtcgatcccccgcgagcccgccctccctcacccccacgagatggtcgggagatccgccctcgccttgcctccgcgcaacaatcgtgcgcccactcctcatcgcaatccagtagctccggcctcgcctcctcaaccgcgcattcccctctcccacacccgcctcgttcgcccctaccgcgccatcaacgcgcctcccccgccgcacaccccgtcctccccatgccgaatcgtgatggttatgctccccacccacgcgccgcgtgcctcctccttccccgccgctcccacccgagatggttagctcccctccttctggtcccttcccctgcctcactgccagccagcgatggagcaaggccaggggattcgccggattcaccgagcgggctctggtggcggccggcgctgccgtcgtgtccgccattcttgtcaacccccttgacgtcgccaagaagtaatattgctcgaaaatgtagagctgactcttgaagcctttgactaaatgcagctgccattcacgctgaaaggacaaattaggaagctaagcatctagataggagaatttgattggtttgtgtcaatatttaatttcttagctcactctgttcatgcctttgtggttcatggacaactgctgctacgtgctcccttccccgacagcgcattctaacacggcatgatacactagcaactggaatgttgtcaacatcagcggcaacgacgacaacgccacatcgagaaacaacaactgtgggctagggagcacaatcccgtggtgcggtgacttgcccacgtttgccatgctgccttgatgcatggcacatcaacaagaagagcaccagtttggaaggctaattccgaaggaattgagatgtgcagagggagatgaagaatgtggagaaagacatcagggtagctactaagcgcaatgacatgttatctgcaaagagctgatgctgctcggagtcatctcgctgctgctcagccagacggcacgcttcatatcggagatctgcgtgccgtcctcgctcttcaccagccgcttctacatctgctctgagagcgactaccaggacctgctgcgcaacacggacgccaaccagacggcgctcgacaagaacatgttcggtggccagcggctgcacgtctgtggcgagggccatgaaccttttgtttcgtacgagggccttgagcagctgcaccggtttctcttcatccttggtatcactcatgtgttgtacagttttgtaacagtggttctgtccatgatcaagatctatagctggaggaagtgggaaaccttagcaggtccaattgctgctgaggaattgaaagctaggagaaccaaggtgatgagaaggcagtcaacctttgtttttaacaatgcttctcatccatggagcaaaaataaaatacttatttggatgctttgctttttgcgccaattcaagggctccataataaggtcagactatttggcactgagtatcacaagctaccacattcatatgacttccataaatacatggtacggagcatggaagattattacaatgggactattggtatcagttggccactttgggcatatgtgattgtctgcgtattaatcaatgttcatggtatctctactacttattaaggctgtaagggtagcctccctttttttgttctgtctttttcattttcctgttttgccctttccattcccacccgcgcattgcattgatcaccaatcgcatcgcagcagcacaagcagcacgccgtgccgctccaaccgtcttgcttccccgcttagcttcccgccgcgccatggcgtcgaccaaggctcccggcgagaagcaccactccatcgacacgcagctccatcagctggtcccaggcaaggtctccgaggacgacaagctcatcgagtacgatgcgctgctcattgatcgcttcctcaacatcctccaggacctccatgggcccagccttcgcgaatttgtccaggagtgctacgaggtctcggccgactacgagggcaaaggagacacgacgaagctgggcgagctcagcgccaagctcatggggctggcccccgtcgacgccatcctcgtggcgagctccatcctgcacatgctcaacctcgccaacctctccgaggaggtgcagatcacgcaccgctgccgcaacagcaagctcaagaaaggtggcttcgccgacgagggctcagccaccaccgagtccgacatcgaggagacgctcaagcgcctcgtgtccgaggtcggcaagtccctcgaggaggtgttcgaggcgctcaagaaccagatagatccacatttatgcttatgtttattttatattttttgatttgaatatctaaactatgatgttctatgaaagatcattcttgaatttttgcctttaaattttcttgttaaatcttgtatactacactattaaatgagtgctcgtgcgtcacagtcccgagtttctctttaacgtcatcctggacggttcgtggatgtcgtcctccaactcataacagtataacacac

SEQ ID NO: 22101 - DNA, 3871 bp, Zea Mays
ccgtccgtgcacacctctctctctattgtgcgttgtcgatcccccgcgagcccgccctccctcacccccacgagatggtcgggagatccgccctcgccttgcctccgcgcaacaatcgtgcgcccactcctcatcgcaatccagtagctccggcctcgcctcctcaaccgcgcattcccctctcccacacccgcctcgttcgcccctaccgcgccatcaacgcgcctcccccgccgcacaccccgtcctccccatgccgaatcgtgatggttatgctccccacccacgcgccgcgtgcctcctccttccccgccgctcccacccgagatggttagctcccctccttctggtcccttcccctgcctcactgccagccagcgatggagcaaggccaggggattcgccggattcaccgagcgggctctggtggcggccggcgctgccgtcgtgtccgccattcttgtcaacccccttgacgtcgccaaggtacgccggtgaccctgtcgttgcctctttcgcttcctctcaactgccgcccctcaaccctcgacacttgcccacaactgtcgccattgcccgctcgccatggcgctaaaataaaccccctctgcggccgccccgtatcctctcgctgcggccgcgggctggggagcaccggccttggcatcgtcatagccgcgggagtcttcagcgccgccgcctcgttgctcctcgcctacttcttctggcagtgcaccgggaagggcaaaggaggccgccgtcgccacaggcgcggcaccagcgagtcgggcggtggggaagacgggagctggtggaccgagaggctgcgggcggcgcacaaccgcctggtcccggtctcgctgttccagaagcccatcgtgaaggtcaagctcgctgacctgatggccgccacccatgacttcagcactagccacatcgtggtcgccgggagctcgcaggcggggatagcttaccgagccgtgctacgggacgggtctgcgctgacggtcaagcgcctgcactcgtgcccactttcggagaaggcgttcagggcagagatgggtcgtatggggcagctgcggcatcctaacatcgtgccactgctgggcttctgtgttgtcgaggacgagaggctgctggtgtataagcatatggagagtggggctctttcatcggtgatgaagaagccaggggaagcgccgctggattgggcaacgcgacttaggatcgccgtgggggcagcaagggggcttgcgtggctgcaccatgggttccaggttccgcagattcaccagaatttgagctcgagtgcagtgcttctcgacgaggattatgatgctcggatcacggatgttggactcacaaggttggtccggatggcgcctggcgagggtggtgataccagtcctttcctgaacggggactttggggagtttggctatgttgctccagagtatgctagcaatccagttggtacgatgaaaggcgatgcgtatgcatttggggtgatattgtttgagcttgttagcgggcaggagtctgctgctgtggttactgacgtgacgggtgaaggattcaaggggacattggtggactgggttaaccagctcaaggcttctggtcgaatcagtgatgctattgataaaccattgcgtggaaagggccatgaggcagagattcaggagttcttgaagatagcttttgcttgcacccagccccgtgtgacggagaggcattcaatgtatcgggttttccacgctctgaagagcatcggagagggctgcgatgtcacggagcagtttgatgagttcccattggcctataacaaggatgattcagacgctatttagctgatgatgctgattgccaattcgattgtggaaatgtttggtcaggcttattgatgatatatatatttagccttgctatggacagaccggaagcataaatgagtgataagagaacaatatcgaggcaccaaatctagcgccggatgccgggtggtcaattacatcgttgcatcgacaggggatgtgataaccataagtaatattgctcgaaaatgtagagctgactcttgaagcctttgactaaatgcagctgccattcacgctgaaagcgcattctaacacggcatgatacactagcaactggaatgttgtcaacatcagcggcaacgacgacaacgccacatcgagaaacaacaactgtgggctagggagcacaatcccgtggtgcggtgacttgcccacgtttgccatgctgccttgatgcatggcacatcaacaagaagagcaccagtttggaaggctaattccgaaggaattgagatgtgcagagggagatgaagaatgtggagaaagacatcagggtagctactaagcgcaatgacatgttatctgcaaagagctgatgctgctcggagtcatctcgctgctgctcagccagacggcacgcttcatatcggagatctgcgtgccgtcctcgctcttcaccagccgcttctacatctgctctgagagcgactaccaggacctgctgcgcaacacggacgccaaccagacggcgctcgacaagaacatgttcggtggccagcggctgcacgtctgtggcgagggccatgaaccttttgtttcgtacgagggccttgagcagctgcaccggtttctcttcatccttggtatcactcatgtgttgtacagttttgtaacagtggttctgtccatgatcaagatctatagctggaggaagtgggaaaccttagcaggtccaattgctgctgaggaattgaaagctaggagaaccaaggtgatgagaaggcagtcaacctttgtttttaacaatgcttctcatccatggagcaaaaataaaatacttatttggatgctttgctttttgcgccaattcaagggctccataataaggtcagactatttggcactgagtatcacaagctaccacattcatatgacttccataaatacatggtacggagcatggaagattattacaatgggactattggtatcagttggccactttgggcatatgtgattgtctgcgtattaatcaatgttcatgcacaagcagcacgccgtgccgctccaaccgtcttgcttccccgcttagcttcccgccgcgccatggcgtcgaccaaggctcccggcgagaagcaccactccatcgacacgcagctccatcagctggtcccaggcaaggtctccgaggacgacaagctcatcgagtacgatgcgctgctcattgatcgcttcctcaacatcctccaggacctccatgggcccagccttcgcgaatttgtccaggagtgctacgaggtctcggccgactacgagggcaaaggagacacgacgaagctgggcgagctcagcgccaagctcatggggctggcccccgtcgacgccatcctcgtggcgagctccatcctgcacatgctcaacctcgccaacctctccgaggaggtgcagatcacgcaccgctgccgcaacagcaagctcaagaaaggtggcttcgccgacgagggctcagccaccaccgagtccgacatcgaggagacgctcaagcgcctcgtgtccgaggtcggcaagtccctcgaggaggtgttcgaggcgctcaagaaccagatagatccacatttatgcttatgtttattttatattttttgatttgaatatctaaactatgatgttctatgaaagatcattcttgaatttttgcctttaaattttcttgttaaatcttgtatactacactattaaatgagtgctcgtgcgtcacagtcccgagtttctctttaacgtcatcctggacggttcgtggatgtcgtcctccaactcataacagtataacacac

SEQ ID NO: 22102 - DNA, 882 bp, Zea Mays
atggatgcgggcaccaatgccagcgacatggagccgtcggggccgtactttcttggccggccacgctttttcttggtccccggctcacccgcgccacccgagtgcacgggcgcgccaccattgcctcctacgccagccaagcttgaagcagacgcggcgctgccgcccacgggctggtatgtcgccgtcgcgggcggcacggagctcaccggggtgaagatggcggtgccgtccgtcgtgtacgccatgcgcaggccctgcgtgcccccggaggacggcggcgttgccggggtcttcggcagcccgaacggctcccttcccgccatcactccttgctccggagacgggctcacctccatcattccacaccgaacaggtgcgccgaagcagaagcggaactacgaatctggcaatctgcggctgtcttcagcgattttccttgactgaaggcggccgctctcctgcttcacagcaaatcggacaaccggcgaagcggcgtagggtggcggcaacctgtgtaacggcggggaagaaacgaggagagatggaaggaatataagccgtaaatcacagtaaaaaaagacagagagagagagaaaagaatgaagaaggtaaggatttggcaaataaagcagataaattagagattacccgctcgagaaatgaagcagagaattcctccaggaggtcttcagaaattagtatagcactaggaaaatggagacagaaggcaggaaaatagtcagggatagcaagacgcagagctcgcacactggcaggttaagcggcggagctcaagagtcaccactcaccggaggccaatcaaagaactcagctcaagcagccagctaacgatagaattcaatggatttggcttatatc

SEQ ID NO: 22103 - DNA, 877 bp, Zea Mays
atggatgcgggcaccaatgccagcgacatggagccgtcggggccgtactttcttggccggccacgctttttcttggtccccggctcacccgcgccacccgagtgcacgggcgcgccaccattgcctcctacgccagccaagcttgaagcagacgcggcgctgccgcccacgggctggtatgtcgccgtcgcgggcggcacggagctcaccggggtgaagatggcggtgccgtccgtcgtgtacgccatgcgcaggccctgcgtgcccccggaggacggcggcgttgccggggtcttcggcagcccgaacggctcccttcccgccatcactccttgctccggagacgggctcacctccatcattccacaccgaacaggtgcgccgaagcagaagcggaactacgaatctggcaatctgcggctgtcttcagcgattttccttgactgaaggcggccgctctcctgcttcacagcaaatcggacaaccggcgaagcggggtggcggcaacctgtgtaacggcggggaagaaacgaggagagatggaaggaatataagccgtaaatcacagtaaaaaaagacagagagagagagaaaagaatgaagaaggtaaggatttggcaaataaagcagataaattagagattacccgctcgagaaatgaagcagagaattcctccaggaggtcttcagaaattagtatagcactaggaaaatggagacagaaggcaggaaaatagtcagggatagcaagacgcagagctcgcacactggcaggttaagcggcggagctcaagagtcaccactcaccggaggccaatcaaagaactcagctcaagcagccagctaacgatagaattcaatggatttggcttatatc

SEQ ID NO: 22104 - DNA, 1465 bp, Zea Mays
catcaaagcagtagcagttgtcatcagtcactttttttaatccataaattgcctatcgagcagatttggaaggctgcagggagtgaagtgtgcgattgcaggaaggaacttgtacatgaggttcagctgcagcacaggggatgccatggggatgaacatggtctccaagggtgtgcagaacgtgctggactacctccaggccgacttccctgacatggatgtcatcagcatatcaggtaacttctgttctgacaagaagtcagctgctgtgaactggattgatggccgtgggaagtcggtggtttgtgaggcagtaatcaaggaagaagttgtgaaaaaggttctcaaaacaaatgttcaggctcttgtagaattgaacgtgatcaagaacctcgctggttcagctgttgctggcgctcttgggggtttcaatgcccatgcaagtaacattgtggcggccatcttcattgccactggtcaggaccctgcacagaacgtggagagttcccagtgtatcaccatgttggaagctataaatgatggcaaagatctgcacgtctccgttactatgccatctattgaggttggcacagttggtggaggcacgcagctggcctcacaatctgcctgcttggacctgcttggcgtcaaaggtgctaacagggaatccccagggtccaacgcgcggctcttggccacggtggttgccggtgcggtcctagccgcggagctgtccctcatctctgcgcaggccgctggccatctggtccagagccacatgaaatacaacaggtccagcaaggcccttgcagaggaaacagacaaacccaagaaatgttgaataatatcaagttgttgttttataaccctttgggagaacggagcgaaaagggtcccacaggatgattccttgcggcatgctcgggtggaaagggaaaaaaacccttctggcgaaaagagagaattcagtcgactcgtcatatttaccaagcggtgagacctgttgtggatcctggagtatgacctatttaattcgttgatgttgtcgttatagttcctctacactacactcgttgaccccgcctgcatctagttttgcccgtccatgggcggagaatctgaccatgggtttgtcccaagcttgcatcacagtggcgcatccagtgacccacgtgatctctgctttgccgcagaaaatttttgcggagcaactgccgggtgctttgtatttcagctttgtaaatttacttttatccagtcgttctgagtccaagccgtcagtgcagtcggtggtgtagttgattaaagtacgaaatgtaaatggaataataaaaataaagagctgtgttttgcatttatctaagaaatatatgtagagctgtgttttgcatttatctaagaaatatatgtggtaaaatggtacggtacgatgagagtgttttgtcattcctattttctgtgtcaa

SEQ ID NO: 22105 - DNA, 4899 bp, Zea Mays
ttccgaaagcgcacacaacaacagaaaacacgcgcgacggccaggtagagacagatccatttctcaccttgccccacctccctcgccgatcggggtcccccgcgcccagatcgcttcttcgcttcggtgcggaggtggccgagggggaggaggagctcccggatccgccccgccgtcgtcggctggtcgtggcgcgatccgcgggagagcagcaatgacggcggaggggacggcgtgcaacggcgccggcgaggcgctgaaggcggaattcgcgccggagaaggtggtggccgtgtccctggaggagaagccggtcggggagcgcgagggcgaggacgtcggcgggccgttcttgatcgtgaacggcggcgattccgacgggcactccgagcctggctcagatctgggcaaggcgcccgacgaggaccctgcatccgaggaggacgacgtgcccaccttcaatgcagctccggacgcggccgtggccggagatcacgggaccgccgaagggcaagttggtgctcagggtgcggcactcggtgcttcgtcggcggacgggggtgatcgtgcttccgacgggtctgagggtagcgcggatgagagcagaggtgacccaagttccgattgtgttgccgaagtggcgcagcaggaggctgttggtgaagaggacagtggggcagctgctctggcgtcccgtgaatgcgaacctaccatcaccagtgctgactctgaggcacactatgtggattctgaggttgaagacaaggagggcacagtggatggtagtgctgttgttgatgccgttgaagcggtggtgcatcaggaagctagtacagagcaggatgaagatgctgctgtgatgtcctctggccatgatgatgccctaacgtctcccaagtcttgttctgctgccgtggagtccgaggttattagagaggatagcaaagaacagagtatcactgatggtgtggagccacagcagcagggtacagttggggcaagtactttggtggagaatgagcatctttgtgccgacatgatggctgattcatttgtagctgccaatgagcctgacagtcaagaggatgctgctgtgatgtcctctggccatgatgatgccctaacgtctcccaagtcttgttctgctgccgtggagtccgaggttattagagaggatagcaaagaacagagtatcactgatggtgtggagccacagcagcagggtacagttggggcaagtgctttggtggagaatgagcatctttgtgtcgacatggcggctgattcatttgtagctgctactgagcctgacagtcaagaggatgctgctgtggagtcctgcgggcacgatgatctgctaacttttactgagtctggttctgctgacattgagtctgaggtttatggagaggatagcgaacaaaaagagagcaacactgttgttgtggagatcgtggtgcagggcgtaggtagggcagatgtgctgatggcaaatgggcatctttgtgccgacacccaagctggttcttctgaagctactactgagcctgagaatcatgctaatggcagcaaactgactgatgttgcagaatcagtggagggggatgccggcagtggagaacaggatacaatggattcgtcgcaaaccaatgggcatatttatgttgccttgagtgctgattcttgtatagttccttctgagtccaaggcccattcctttgagacagatgggcaacgaactgatcagctacaagaggaagctccaaaacttgaagctgaagtattggagggagtgctaaaaccaactgaaaggaactgtgcaggtagtgttgagaaactcataggagaggaagttggcacagatgggcatgcaagcataggaggtacagctgatgcttatggggagcaagaagccaagcctatgcaggtagaaggtgaagtcacttgcggtattctcgaatttgaaaaagtggataaggatggtgaagagggtttgtgtgatgactacacggttggtgttgtttcttctaatgaggaaacagagcttcctatgaaggaaaaagtagatgaagctgtccccagtgttaatgttggtgggccagagaaagtaactgacaatacaagccaagataccaagacagttgattttattgatgaaatcacagcagagtcaaactttaaagctgaaaatatggttgaagtgaaaagtgcagctcgtgaagttgacaaaacagaggtaaaagatcttgcttttgctgatgaggctaatgtagctcctttacaccttcaacgtgactgtgaatctgttatggaaactatagagcatgagaaggtagaattaccaggtggttgtcaagctcatgaaattgtgtattcttcagaactagaaccgaagaaagagtttgagatgggggttgatggtgctgttccattgcaaggagctgcagcttctgttgcctctgttttccaccatgagccaatgtccattgatttgtctgagaatgatagcggtaaccattctggcccaactactgcgttggaatcctgtgaccatgtgcaaaatgaagagagcatatcccaagaaatttccatgaccactattgagcaacctatagctattgatcaagttgaacctgtcaacctgaatgtagatgaacttgtggttgatgatgatcaacctggttttgctccaaggtgtgaatctgctaggctggataaacctggatgtacttccaaaaaggatgattcaaatgagattgttgaagatagcaaatcactggaaaatcagttagaaatttgcaatgcagctactatgtctgatgagtgttcctccagaaatgcaaatgaagatccctctccaattaatatgtctgctgagtgttcctccagaactgcaaatgaaggtttctctccaattaatgaggcttctcatctagctgaggagtcttgcctttcagacaagtcatacaatgctatcagttatgaaaatggaaatgggcctgctaaatcttctgaggagcctgacaagtcatgcaatgctatcatttgtgaaaatgaaaatgagcctgctaaatcttctgatgtggttgaaaccagatgcgtggaagcattagcgccttcatctgttggcacggttgtcacggcagaacagaaggacaatggacaccgtgcttctggtgagtggcatggagataatgtgcaagtcattggacaacaacagaagatctacataattaaagttccaaagtttgccggtgatgatctctggaataagatccaggctgcacaggctcacttagaccacctgacccaggaaagagatgcaattaaccgtcgtaggcaaaagcaaaaggctgtatgtgatcaatacagggagaagcttgaggcagcacgtagagaagagcgggaagctaggactgcacatggagataagaagaatgatttaaataatgtacgttcggtactagggaaattgcaccaagcaaattcagctgaagaacttgatgagctgattgcgaagaaagagaggactatgcaacatgagaccatttctttgaaagaagaaaaacttttaattaaagagattaatgaattaaaagcccaacggaagcagctatccaccactatgggctcaaaggctgaaatcaatgaggcatttgaccaaaaagatcacattcatgaaaggcataaggtgttaaagaaggattctgatgttttattgaccaacctgaaattcctagaggaaaacacaagaaagattcaaaagtctttcgaagatgaaagaacaggtctcagaaaattaacagaggaacaccgagcagctaatgaaatacgtcaaaaggcctacattgaatggactgagcttagatcagagccctccaagaagaatgaatacttcttcaggtacagggatgaccggaatgcagcagaaattttcagagctaatggcgatataaatggacttaaatcacactgtaatagtcagattgagggagtcatggaaatgtggaacaaaaacgaggaattccgcaagcagtatgttgagtcaaacaaggttagcacactaaagagattagggacccatgatggacggaaacttggccctgatgaggaccctccagtcatatcaagcagaagaccaagcagcatctatccattgtctgcctcaagcccgggagtggccactttagcttcaataccagcacctgtggtagctgctccagctgcagtctctgccaaagaggactcatttcctgttttggaagccccccagaccagcaagcgcaccaagtcaaaagcatctgatatctgtgcccagaccgagaacaactctgttatagtatcggaggcagaggctttggaacagactttgaaagagaaagctaaggccaaggaggccgaggagaggaagaggcggaaagccgagaaggacaaggagaaagccgagttcaaagcgcgcaaggaagctgaggagagggagaagaagaaagccaagaaagacaaaaggagaggcacggcaccagcagattctagcctcactggtgacgggcacgccgcggccttggccacagcagacactgacagcaacgcatcggacaacccgagggaagctgaggctcctcaaccggcggcggctcccaagaggctgtctaggcccgcagcggcaatcaagcagctgaacagggtgcagcccatgccggcgccgctacgtaacaggggcagaaggagactgcggcagtacatcctgatcgcggcggccgtgctatcggggcttgcgttgttcgtggcaggcaactatattcccaggctcaagtcggttcactcctaagtttatctgtaggaaaggggtgctaatctgtcgcggtgaacctgggtgtgattcaaaaaaaaaaaaaaaaa

SEQ ID NO: 22106 - DNA, 5966 bp, Zea Mays
atgacggcggaggggacggcgtgcaacggcgccggcgaggcgctgaaggcggaattcgcgccggagaaggtggtggccgtgtccctggaggagaagccggtcggggagcgcgagggcgaggacgtcggcgggccgttcttgatcgtgaacggcggcgattccgacgggcactccgagcctggctcagatctgggcaaggcgcccgacgaggaccctgcatccgaggaggacgacgtgcccaccttcaatgcagctccggacgcggccgtggccggagatcacgggaccgccgaagggcaagttggtgctcagggtgcggcactcggtgcttcgtcggcggacgggggtgatcgtgcttccgacgggtctgagggtagcgcggatgagagcagaggtgacccaagttccgattgtgttgccgaagtggcgcagcaggaggctgttggtgaagaggacagtggggcagctgctctggcgtcccgtgaatgcgaacctaccatcaccagtgctgactctgaggcacactatgtggattctgaggttgaagacaaggagggcacagtggatggtagtgctgttgttgatgccgttgaagcggtggtgcatcaggaagctagtacagagcaggatgaagatgctgctgtgatgtcctctggccatgatgatgccctaacgtctcccaagtcttgttctgctgccgtggagtccgaggttattagagaggatagcaaagaacagagtatcactgatggtgtggagccacagcagcagggtacagttggggcaagtactttggtggagaatgagcatctttgtgccgacatgatggctgattcatttgtagctgccaatgagcctgacagtcaagaggatgctgctgtgatgtcctctggccatgatgatgccctaacgtctcccaagtcttgttctgctgccgtggagtccgaggttattagagaggatagcaaagaacagagtatcactgatggtgtggagccacagcagcagggtacagttggggcaagtgctttggtggagaatgagcatctttgtgtcgacatggcggctgattcatttgtagctgctactgagcctgacagtcaagaggatgctgctgtggagtcctgcgggcacgatgatctgctaacttttactgagtctggttctgctgacattgagtctgaggtttatggagaggatagcgaacaaaaagagagcaacactgttgttgtggagatcgtggtgcagggcgtaggtagggcagatgtgctgatggcaaatgggcatctttgtgccgacacccaagctggttcttctgaagctactactgagcctgagaatcatgctaatggcagcaaactgactgatgttgcagaatcagtggagggggatgccggcagtggagaacaggatacaatggattcgtcgcaaaccaatgggcatatttatgttgccttgagtgctgattcttgtatagttccttctgagtccaaggcccattcctttgagacagatgggcaacgaactgatcagctacaagaggaagctccaaaacttgaagctgaagtattggagggagtgctaaaaccaactgaaaggaactgtgcaggtagtgttgagaaactcataggagaggaagttggcacagatgggcatgcaagcataggaggtacagctgatgcttatggggagcaagaagccaagcctatgcaggtagaaggtgaagtcacttgcggtattctcgaatttgaaaaagtggataaggatggtgaagagggtttgtgtgatgactacacggttggtgttgtttcttctaatgaggaaacagagcttcctatgaaggaaaaagtagatgaagctgtccccagtgttaatgttggtgggccagagaaagtaactgacaatacaagccaagataccaagacagttgattttattgatgaaatcacagcagagtcaaactttaaagctgaaaatatggttgaagtgaaaagtgcagctcgtgaagttgacaaaacagaggtaaaagatcttgcttttgctgatgaggctaatgtagctcctttacaccttcaacgtgactgtgaatctgttatggaaactatagagcatgagaaggtagaattaccaggtggttgtcaagctcatgaaattgtgtattcttcagaactagaaccgaagaaagagtttgagatgggggttgatggtgctgttccattgcaaggagctgcagcttctgttgcctctgttttccaccatgagccaatgtccattgatttgtctgagaatgatagcggtaaccattctggcccaactactgcgttggaatcctgtgaccatgtgcaaaatgaagagagcatatcccaagaaatttccatgaccactattgagcaacctatagctattgatcaagttgaacctgtcaacctgaatgtagatgaacttgtggttgatgatgatcaacctggttttgctccaaggtgtgaatctgctaggctggataaacctggatgtacttccaaaaaggatgattcaaatgagattgttgaagatagcaaatcactggaaaatcagttagaaatttgcaatgcagctactatgtctgatgagtgttcctccagaaatgcaaatgaagatccctctccaattaatatgtctgctgagtgttcctccagaactgcaaatgaaggtttctctccaattaatgaggcttctcatctagctgaggagtcttgcctttcagacaagtcatacaatgctatcagttatgaaaatggaaatgggcctgctaaatcttctgaggagcctgacaagtcatgcaatgctatcatttgtgaaaatgaaaatgagcctgctaaatcttctgatgtggttgaaaccagatgcgtggaagcattagcgccttcatctgttggcacggttgtcacggcagaacagaaggacaatggacaccgtgcttctggtgagtggcatggagataatgtgcaagtcattggacaacaacagaagatctacataattaaagttccaaagtttgccggtgatgatctctggaataagatccaggctgcacaggctcacttagaccacctgacccaggaaagagatgcaattaaccgtcgtaggcaaaagcaaaaggctgtatgtgatcaatacagggagaagcttgaggcagcacgtagagaagagcgggaagctaggactgcacatggagataagaagaatgatttaaataatgtacgttcggtactagggaaattgcaccaagcaaattcagctgaagaacttgatgagctgattgcgaagaaagagaggactatgcaacatgagaccatttctttgaaagaagaaaaacttttaattaaagagattaatgaattaaaagcccaacggaagcagctatccaccactatgggctcaaaggctgaaatcaatgaggcatttgaccaaaaagatcacattcatgaaaggcataagaaggattctgatgttttattgaccaacctgaaattcctagaggaaaacacaagaaagattcaaaagtctttcgaagatgaaagaacaggtctcagaaaattaacagaggaacaccgagcagctaatgaaatacgtcaaaaggcctacattgaatggactgagcttagatcagagccctccaagaagaatgaatacttcttcaggtacagggatgaccggaatgcagcagaaattttcagagctaatggcgatataaatggacttaaatcacactgtaatagtcagattgagggagtcatggaaatgtggaacaaaaacgaggaattccgcaagcagtatgttgagtcaaacaaggttagcacactaaagagattagggacccatgatggacggaaacttggccctgatgaggaccctccagtcatatcaagcagaagaccaagcagcatctatccattgtctgcctcaagcccgggagtggccactttagcttcaataccagcacctgtggtagctgctccagctgcagtctctgccaaagaggactcatttcctgttttggaagccccccagaccagcaagcgcaccaagtcaaaagcatctgatatctgtgcccagaccgagaacaactctgttatagtatcggaggcagaggctttggaacagactttgaaagagaaagctcgtctattggaggaacaattggagttagctaggaaggcagaggagttggcacggaaggaggaggaattaagcaaagagagggctgccgctgagaaggagcggcttaggatggagcagaaggctaaggccaaggaggccgaggagaggaagaggcggaaagccgagaaggacaaggagaaagccgagttcaaagcgcgcaaggaagctgaggagagggagaagaagaaagccaagaaagacaaaaggagaggcacggcaccagcagattctagcctcactggtgacgggcacgccgcggccttggccacagcagacactgacagcaacgcatcggacaacccgagggaagctgaggctcctcaaccggcggcggctcccaagaggctgtctaggcccgcagcggcaatcaagcagctgaacagggtgcagcccatgccggcgccgctacgtaacaggggcagaaggagactgcggcagtacatcctgatcgcggcggccgtgctatcggggcttgcgttgttcgtggcaggcaactatattcccaggctcaagtcggttcactcctaagtttatctgtaggaaaggggtgctaatctgtcgcggtgaacctgggtgtgattcgtattatttcgattattctccggttggtttgtactattttttttttacctcatataggttggttgtgaaagatgggggtgcattgtgttaaaagttgttttacaggatggtggtgaaatcttcgttagaacatggataataattagtactatagattctttcttgtagtagccttagcgtatatgatatttactggatatgtcgttcgccctatcgctctgccttaaatatctacataaatacagacatacagtagaataaatagacacaaacactgtatgataaacttgaataaatatctgatcgcttttgctcaacatacgaattaagcttagattctcctgcttctgccaatgttctcgacgaaggcctccccaatgccctccccgatggcctcgatgaggccgccgatgaccccgaacagcgcgttgacggtgaccctggcggcggtggccagcgcgctcctcttctccggcggcacgacaccgtgcacgtagagcccgttcaccacgtccttggcgcacctggcgtggaggtagtagccgcagggcaggcactggtacgcgtgctgccccgcgcgcctcgtccgcctgcacgcctggcacacgaagctcgtctgctccgcgccgtcccgcgccaggagcagcagcgggtgctcgtgcacggccgggagctccatccgccgcgccatcgccgcgcagcacgggtgcatgtcgaagctgcacgacgcgcaccggaacgagaagcccctcacgggcttaccgcacacgtcgcacctgcagcggaggaagccgcccgacgccggcttcacgaagaagaggaggtgcgggtgcttggggtggaacgggtgctcgtgcagcgacggcggcgccagcgcgcaggactcgtgcagctggaagccgcaggcctggcacatgaaccgcttcccggcgccgtactccttgcaccccatgcacatgaacaggtgcgggaagtcgaaccgggccagccggtgctccgggtggctgaaatgcaccatctcggcctcagcctccggcccgtccacgacgcgatctctcgtctccggtgcatcgtcttcggacgacgacgatggcagccggtggccgctgagctcccttgagctcatagacacgcacctgctgttcacgctgttgcttttacctctacctgtaccattgccattt

SEQ ID NO: 22107 - DNA, 1267 bp, Zea Mays
ggaagaggctgtctcagacgaaaggctgctcgtctgagcaggggaggaaggaacagttggagctcttgctgccgactgagtgtggggagaggcgcgggaaggaaatgagcacgagatgtttaggctgcaggatagtttggctctgataccaattgtaagtagagggactctaactctcatcaagaggatgacactatgagttagggcaattttctgtttatttcctcaaacactacacaatgccatacccatctaagggttggagacccatatttatagccctagaggctgcactaccacaccttctcacacacactacacaacaggattgtcctctagatgctaaagagactacagaggacagtcaaaagcgactgttatcctctagatgctaaagcgactacagaggacagtcaaaaagcgactgctgtcctctagatgctaaagagactacagaggacagtcaagctgtcctctagatgctaaaggactacaaaggacagtcaaaagcgactgttgtcctctagatgctcaagacttattccatcagaggccacttaaaatatctctccagatatgcccaaatcctagcttatggagaacttccagaagtaaaggccaagaaatagagtcgaaggccttagtaatgtcgagtttcagcattatccttgcccctcgctgctgatggagcaatctggcagtttgttgcacaagcataaagttatcttgaatgaatgcactttgtcgaggtgagaccatatcctgcaactttggggctaatctgtttgcaagaacttttgtgactagcttggccatactgtgaactaaagtgatgggcctgaaatccttgacctcatcagctccctccttaggaataagggttatcaaggctgtattcaatttattaaagtgagcaagtttcctgctccaaattgcaaagaacactgccataacatcattttttatgatcagccagcacgctttgtaaaatctacctgtgaatccatcagggccaggcgccctatctgatggtaactgcttaatggaatcccagacctctttttcagtaaactgtgaatctagctcctccaaatcatgaggaggcaaccctaggtagtccaaaaccacagttttttatctgtccacgctgctgcccagaagtttgttgtagaagtcatccactaggttggcattctccccatggtcagtacatatgttactgccagaaagcagcctggcaataaaattctctttttctatatctagc

SEQ ID NO: 22108 - DNA, 2888 bp, Zea Mays
cacggccacagcgaccacgtgacacctctcacagtctcacctcgtcgtcctcgtcccttccgcggccagccaggcagtcaggccggctggccgaggcagccgtgcccacgtgcacgaagcagcgggccgtgacgtggtttggggcgagcaggtgaccggcgagtagaagtagaagtaggctagcaacctgcacgcctacccgtcccacgcacctcccgacttctccggttctcccttcttcatagcagccacccacgcatctcagcgccgaggcgagcgaggacctcgtggttcgtgccctgctcacctcgtgaggatgtggatcgcgagccggctcttcctcgcggcggcggcgctgctgatggctgtgcttctgctcgtcgcggggccggtggcggcgcaggacgcggcggtggagggcgtggccccgcctgcggaggagatcgcggcgaacgcgagggccaaggaggcggcggttctggccgccgagctagtgcagctcagggcgaagatctccgcgttagagtctcgcattgcagagcagaacctggagttcaagaccaagaatgatgcaatcgaaacactgaatatgattgtcaaggaaaagtcacagaagattgctactatgcagaatgaagccaaagggtctttagctgcagaggagcaggcaagcaaggccaatgcactggctattgagctcaagaagcagaccgagaagctcaagaaggatattacagaacaaaaaattaaaaaagcagctctggaggctagggctggcaatgctgataagaaggtgcaagagctaaatatgaagctggagaagctccagaggacaagcagtgatcaaaagcgcaggattcagaagactgaacatgctcttaaagctgctgaggaggagctgatgaaggctcagttggaaacaacaacaaaagtaaaacagcttagagaggttcatggagcctggttgccaccatggttagcgacacatgcagcccgctctatggaggtgatgtcaaatcactggaatgaacatgggaaacctgcctttgacagcttcttgcagaaggcatctgaaaaaacagtgcagacaaagaaatgggctgagcctcatctggaaactgctaagacaaaatggatgcctgttgctaaagaaaaatgggttaccttgaagaaacatgcaaagccctatgtccaaatggtctcagagaaatcattggaggcttatcaaacatcaagtgactttgtcaggcctcatcttgtaaatgcacatcaagttgttgatccctatttccaggaagccaagaaattatccaagccatatgttgatcaaattgctacagctactaaaccacatgtcgagaaagttagaactgctctcaagccttatactgaaagagcacgacatgtatatggacagtttcttgagacagctactacatatcatcagcaggctcaggcaactatctcggattaccttcaccggcatgagtttacaaaacagtttgtaactaaagagttggtgtggtatctggcttctgctttattggttacacccttctttgttttgtacacactcctaactgaaacattctggtttgtgcttcatttttggtgtccagctagtattagatgcttgttacaaattgactttgttcgtcacctaatctgaatattttcattcgcatgaagtaccaagaagaagaagaaaacacctcggagcagtaataccaaccatggtcataggagacataagcgccggcatgctgacaaatcttggaagcttgaccatttacctttcactgtaaatggtatagacactatcatccgtcatcgccgaaccttgttgtgtatccacgaactagaatacacacaagaaatgtgtttctgccccccatcgtgttgggagagttgtgtttttcatcagagtagggaccgcgagcttaaatctgtgggtgtcatttcataggttatttgttgtagcattgtgcttgagcttgtgtaattcatgattattttgtctcgcgtttgtggatcacttcagccactacattattctacagcttccactcggtgtaaaagttttatcttccacgctgggatgctgtggtttggagaaattctagtaccaagaaaaaccttagttttatatacaagagacatggaaaaggaggtctagactctgttccatcgtaactgcgctgcgtaagcccctaatctaccgcgaatccgcttgatgtttctaaggggaaatccaaatcgaagcaatcggcatgtcccgggcgcttgtcggagaaatttttggcaccattcgtccatcacgtaaccacatatagctcaaaattcaaaggtcgggtttgaagaaaacatacacgtttatcagaaactatcacacggacgagtacaccccatactcttatctagatccctgtatgagctcgatcagtaccaagcctgtttttgttgcacatgacatgcatgctgtcaacctatgctgctccgatctctacaagccaagagcccccaacaaaaaactgaaaaaaaagagaggataatttccagctactgatacaaacaacggactaaattgacacatcaaatcctaccgacctacatgatccatacaccaacattacgtcgttgttacgtttgtcggctgcatgcatgccattgccaagccacgccactactccgatccacagctactagctagacttggtacccgccggcaggccagtacctctccaccagctgctccacgtccaagccctggtaccgggccccggccgccgagtccgcgccgaaccctccgtccgcgccgggcacgatcacgcagccgccgagccccgccgcagccgccgtcgccatctgcttctgctggtggtgttcac

SEQ ID NO: 22109 - DNA, 2828 bp, Zea Mays
cacggccacagcgaccacgtgacacctctcacagtctcacctcgtcgtcctcgtcccttccgcggccagccaggcagtcaggccggctggccgaggcagccgtgcccacgtgcacgaagcagcgggccgtgacgtggtttggggcgagcaggtgaccggcgagtagaagtagaagtaggctagcaacctgcacgcctacccgtcccacgcacctcccgacttctccggttctcccttcttcatagcagccacccacgcatctcagcgccgaggcgagcgaggacctcgtggttcgtgccctgctcacctcgtgaggatgtggatcgcgagccggctcttcctcgcggcggcggcgctgctgatggctgtgcttctgctcgtcgcggggccggtggcggcgcaggacgcggcggtggagggcgtggccccgcctgcggaggagatcgcggcgaacgcgagggccaaggaggcggcggttctggccgccgagctagtgcagctcagggcgaagatctccgcgttagagtctcgcattgcagagcagaacctggagttcaagaccaagaatgatgcaatcgaaacactgaatatgattgtcaaggaaaagtcacagaagattgctactatgcagaatgaagccaaagggtctttagctgcagaggagcaggcaagcaaggccaatgcactggctattgagctcaagaagcagaccgagaagctcaagaaggatattacagaacaaaaaattaaaaaagcagctctggaggctagggctggcaatgctgataagaaggtgcaagagctaaatatgaagctggagaagaggacaagcagtgatcaaaagcgcaggattcagaagactgaacatgctcttaaagctgctgaggaggagctgatgaaggctcagttggaaacaacaacaaaagtaaaacagcttagagaggttcatggagcctggttgccaccatggttagcgacacatgcagcccgctctatggaggtgatgtcaaatcactggaatgaacatgggaaacctgcctttgacagcttcttgcagaaggcatctgaaaaaacagtgcagacaaagaaatgggctgagcctcatctggaaactgctaagacaaaatggatgcctgttgctaaagaaaaatgggttaccttgaagaaacatgcaaagccctatgtccaaatggtctcagagaaatcattggaggcttatcaaacatcaagtgactttgtcaggcctcatcttgtaaatgcacatcaagttgttgatccctatttccaggaagccaagaaattatccaagccatatgttgatcaaattgctacagctactaaaccacatgtcgagaaagttagaactgctctcaagccttatactgaaagagcacgacatgtatatggacagtttcttgagacagctactacatatcatcagcaggctcaggcaactatctcggattaccttcaccggcatgagtttacaaaacagtttgtaactaaagagttggtgtggtatctggcttctgctttattggttacacccttctttgttttgtacacactcctaactgaaacattctgtaccaagaagaagaagaaaacacctcggagcagtaataccaaccatggtcataggagacataagcgccggcatgctgacaagtaaaacattgatcaaccatggtcattactttttttataacgatcttggaagcttgaccatttacctttcactgtaaatggtatagacactatcatccgtcatcgccgaaccttgttgtgtatccacgaactagaatacacacaagaaatgtgtttctgccccccatcgtgttgggagagttgtgtttttcatcagagtagggaccgcgagcttaaatctgtgggtgtcatttcataggttatttgttgtagcattgtgcttgagcttgtgtaattcatgattattttgtctcgcgtttgtggatcacttcagccactacattattctacagcttccactcggtgtaaaagttttatcttccacgctgggatgctgtggtttggagaaattctagtaccaagaaaaaccttagttttatatacaagagacatggaaaaggaggtctagactctgttccatcgtaactgcgctgcgtaagcccctaatctaccgcgaatccgcttgatgtttctaaggggaaatccaaatcgaagcaatcggcatgtcccgggcgcttgtcggagaaatttttggcaccattcgtccatcacgtaaccacatatagctcaaaattcaaaggtcgggtttgaagaaaacatacacgtttatcagaaactatcacacggacgagtacaccccatactcttatctagatccctgtatgagctcgatcagtaccaagcctgtttttgttgcacatgacatgcatgctgtcaacctatgctgctccgatctctacaagccaagagcccccaacaaaaaactgaaaaaaaagagaggataatttccagctactgatacaaacaacggactaaattgacacatcaaatcctaccgacctacatgatccatacaccaacattacgtcgttgttacgtttgtcggctgcatgcatgccattgccaagccacgccactactccgatccacagctactagctagacttggtacccgccggcaggccagtacctctccaccagctgctccacgtccaagccctggtaccgggccccggccgccgagtccgcgccgaaccctccgtccgcgccgggcacgatcacgcagccgccgagccccgccgcagccgccgtcgccatctgcttctgctggtggtgttcac

SEQ ID NO: 22110 - DNA, 2807 bp, Zea Mays
cacggccacagcgaccacgtgacacctctcacagtctcacctcgtcgtcctcgtcccttccgcggccagccaggcagtcaggccggctggccgaggcagccgtgcccacgtgcacgaagcagcgggccgtgacgtggtttggggcgagcaggtgaccggcgagtagaagtagaagtaggctagcaacctgcacgcctacccgtcccacgcacctcccgacttctccggttctcccttcttcatagcagccacccacgcatctcagcgccgaggcgagcgaggacctcgtggttcgtgccctgctcacctcgtgaggatgtggatcgcgagccggctcttcctcgcggcggcggcgctgctgatggctgtgcttctgctcgtcgcggggccggtggcggcgcaggacgcggcggtggagggcgtggccccgcctgcggaggagatcgcggcgaacgcgagggccaaggaggcggcggttctggccgccgagctagtgcagctcagggcgaagatctccgcgttagagtctcgcattgcagagcagaacctggagttcaagaccaagaatgatgcaatcgaaacactgaatatgattgtcaaggaaaagtcacagaagattgctactatgcagaatgaagtaacttccctcgaggccaaagggtctttagctgcagaggagcaggcaagcaaggccaatgcactggctattgagctcaagaagcagaccgagaagctcaagaaggatattacagaacaaaaaattaaaaaagcagctctggaggctagggctggcaatgctgataagaaggtgcaagagctaaatatgaagctggagaagctccagaggacaagcagtgatcaaaagcgcaggattcagaagactgaacatgctcttaaagctgctgaggaggagctgatgaaggctcagttggaaacaacaacaaaagtaaaacagcttagagaggttcatggagcctggttgccaccatggttagcgacacatgcagcccgctctatggaggtgatgtcaaatcactggaatgaacatgggaaacctgcctttgacagcttcttgcagaaggcatctgaaaaaacagtgcagacaaagaaatgggctgagcctcatctggaaactgctaagacaaaatggatgcctgttgctaaagaaaaatgggttaccttgaagaaacatgcaaagccctatgtccaaatggtctcagagaaatcattggaggcttatcaaacatcaagtgactttgtcaggcctcatcttgtaaatgcacatcaagttgttgatccctatttccaggaagccaagaaattatccaagccatatgttgatcaaattgctacagctactaaaccacatgtcgagaaagttagaactgctctcaagccttatactgaaagagcacgacatgtatatggacagtttcttgagacagctactacatatcatcagcaggctcaggcaactatctcggattaccttcaccggcatgagtttacaaaacagtttgtaactaaagagttggtgtggtatctggcttctgctttattggttacacccttctttgttttgtacacactcctaactgaaacattctgtaccaagaagaagaagaaaacacctcggagcagtaataccaaccatggtcataggagacataagcgccggcatgctgacaaatcttggaagcttgaccatttacctttcactgtaaatggtatagacactatcatccgtcatcgccgaaccttgttgtgtatccacgaactagaatacacacaagaaatgtgtttctgccccccatcgtgttgggagagttgtgtttttcatcagagtagggaccgcgagcttaaatctgtgggtgtcatttcataggttatttgttgtagcattgtgcttgagcttgtgtaattcatgattattttgtctcgcgtttgtggatcacttcagccactacattattctacagcttccactcggtgtaaaagttttatcttccacgctgggatgctgtggtttggagaaattctagtaccaagaaaaaccttagttttatatacaagagacatggaaaaggaggtctagactctgttccatcgtaactgcgctgcgtaagcccctaatctaccgcgaatccgcttgatgtttctaaggggaaatccaaatcgaagcaatcggcatgtcccgggcgcttgtcggagaaatttttggcaccattcgtccatcacgtaaccacatatagctcaaaattcaaaggtcgggtttgaagaaaacatacacgtttatcagaaactatcacacggacgagtacaccccatactcttatctagatccctgtatgagctcgatcagtaccaagcctgtttttgttgcacatgacatgcatgctgtcaacctatgctgctccgatctctacaagccaagagcccccaacaaaaaactgaaaaaaaagagaggataatttccagctactgatacaaacaacggactaaattgacacatcaaatcctaccgacctacatgatccatacaccaacattacgtcgttgttacgtttgtcggctgcatgcatgccattgccaagccacgccactactccgatccacagctactagctagacttggtacccgccggcaggccagtacctctccaccagctgctccacgtccaagccctggtaccgggccccggccgccgagtccgcgccgaaccctccgtccgcgccgggcacgatcacgcagccgccgagccccgccgcagccgccgtcgccatctgcttctgctggtggtgttcac

SEQ ID NO: 22111 - DNA, 2843 bp, Zea Mays
cacggccacagcgaccacgtgacacctctcacagtctcacctcgtcgtcctcgtcccttccgcggccagccaggcagtcaggccggctggccgaggcagccgtgcccacgtgcacgaagcagcgggccgtgacgtggtttggggcgagcaggtgaccggcgagtagaagtagaagtaggctagcaacctgcacgcctacccgtcccacgcacctcccgacttctccggttctcccttcttcatagcagccacccacgcatctcagcgccgaggcgagcgaggacctcgtggttcgtgccctgctcacctcgtgaggatgtggatcgcgagccggctcttcctcgcggcggcggcgctgctgatggctgtgcttctgctcgtcgcggggccggtggcggcgcaggacgcggcggtggagggcgtggccccgcctgcggaggagatcgcggcgaacgcgagggccaaggaggcggcggttctggccgccgagctagtgcagctcagggcgaagatctccgcgttagagtctcgcattgcagagcagaacctggagttcaagaccaagaatgatgcaatcgaaacactgaatatgattgtcaaggaaaagtcacagaagattgctactatgcagaatgaagtaacttccctcgaggccaaagggtctttagctgcagaggagcaggcaagcaaggccaatgcactggctattgagctcaagaagcagaccgagaagctcaagaaggatattacagaacaaaaaattaaaaaagcagctctggaggctagggctggcaatgctgataagaaggtgcaagagctaaatatgaagctggagaagaggacaagcagtgatcaaaagcgcaggattcagaagactgaacatgctcttaaagctgctgaggaggagctgatgaaggctcagttggaaacaacaacaaaagtaaaacagcttagagaggttcatggagcctggttgccaccatggttagcgacacatgcagcccgctctatggaggtgatgtcaaatcactggaatgaacatgggaaacctgcctttgacagcttcttgcagaaggcatctgaaaaaacagtgcagacaaagaaatgggctgagcctcatctggaaactgctaagacaaaatggatgcctgttgctaaagaaaaatgggttaccttgaagaaacatgcaaagccctatgtccaaatggtctcagagaaatcattggaggcttatcaaacatcaagtgactttgtcaggcctcatcttgtaaatgcacatcaagttgttgatccctatttccaggaagccaagaaattatccaagccatatgttgatcaaattgctacagctactaaaccacatgtcgagaaagttagaactgctctcaagccttatactgaaagagcacgacatgtatatggacagtttcttgagacagctactacatatcatcagcaggctcaggcaactatctcggattaccttcaccggcatgagtttacaaaacagtttgtaactaaagagttggtgtggtatctggcttctgctttattggttacacccttctttgttttgtacacactcctaactgaaacattctgtaccaagaagaagaagaaaacacctcggagcagtaataccaaccatggtcataggagacataagcgccggcatgctgacaagtaaaacattgatcaaccatggtcattactttttttataacgatcttggaagcttgaccatttacctttcactgtaaatggtatagacactatcatccgtcatcgccgaaccttgttgtgtatccacgaactagaatacacacaagaaatgtgtttctgccccccatcgtgttgggagagttgtgtttttcatcagagtagggaccgcgagcttaaatctgtgggtgtcatttcataggttatttgttgtagcattgtgcttgagcttgtgtaattcatgattattttgtctcgcgtttgtggatcacttcagccactacattattctacagcttccactcggtgtaaaagttttatcttccacgctgggatgctgtggtttggagaaattctagtaccaagaaaaaccttagttttatatacaagagacatggaaaaggaggtctagactctgttccatcgtaactgcgctgcgtaagcccctaatctaccgcgaatccgcttgatgtttctaaggggaaatccaaatcgaagcaatcggcatgtcccgggcgcttgtcggagaaatttttggcaccattcgtccatcacgtaaccacatatagctcaaaattcaaaggtcgggtttgaagaaaacatacacgtttatcagaaactatcacacggacgagtacaccccatactcttatctagatccctgtatgagctcgatcagtaccaagcctgtttttgttgcacatgacatgcatgctgtcaacctatgctgctccgatctctacaagccaagagcccccaacaaaaaactgaaaaaaaagagaggataatttccagctactgatacaaacaacggactaaattgacacatcaaatcctaccgacctacatgatccatacaccaacattacgtcgttgttacgtttgtcggctgcatgcatgccattgccaagccacgccactactccgatccacagctactagctagacttggtacccgccggcaggccagtacctctccaccagctgctccacgtccaagccctggtaccgggccccggccgccgagtccgcgccgaaccctccgtccgcgccgggcacgatcacgcagccgccgagccccgccgcagccgccgtcgccatctgcttctgctggtggtgttcac

SEQ ID NO: 22112 - DNA, 2828 bp, Zea Mays
cacggccacagcgaccacgtgacacctctcacagtctcacctcgtcgtcctcgtcccttccgcggccagccaggcagtcaggccggctggccgaggcagccgtgcccacgtgcacgaagcagcgggccgtgacgtggtttggggcgagcaggtgaccggcgagtagaagtagaagtaggctagcaacctgcacgcctacccgtcccacgcacctcccgacttctccggttctcccttcttcatagcagccacccacgcatctcagcgccgaggcgagcgaggacctcgtggttcgtgccctgctcacctcgtgaggatgtggatcgcgagccggctcttcctcgcggcggcggcgctgctgatggctgtgcttctgctcgtcgcggggccggtggcggcgcaggacgcggcggtggagggcgtggccccgcctgcggaggagatcgcggcgaacgcgagggccaaggaggcggcggttctggccgccgagctagtgcagctcagggcgaagatctccgcgttagagtctcgcattgcagagcagaacctggagttcaagaccaagaatgatgcaatcgaaacactgaatatgattgtcaaggaaaagtcacagaagattgctactatgcagaatgaagccaaagggtctttagctgcagaggagcaggcaagcaaggccaatgcactggctattgagctcaagaagcagaccgagaagctcaagaaggatattacagaacaaaaaattaaaaaagcagctctggaggctagggctggcaatgctgataagaaggtgcaagagctaaatatgaagctggagaagctccagaggacaagcagtgatcaaaagcgcaggattcagaagactgaacatgctcttaaagctgctgaggaggagctgatgaaggctcagttggaaacaacaacaaaagtaaaacagcttagagaggttcatggagcctggttgccaccatggttagcgacacatgcagcccgctctatggaggtgatgtcaaatcactggaatgaacatgggaaacctgcctttgacagcttcttgcagaaggcatctgaaaaaacagtgcagacaaagaaatgggctgagcctcatctggaaactgctaagacaaaatggatgcctgttgctaaagaaaaatgggttaccttgaagaaacatgcaaagccctatgtccaaatggtctcagagaaatcattggaggcttatcaaacatcaagtgactttgtcaggcctcatcttgtaaatgcacatcaagttgttgatccctatttccaggaagccaagaaattatccaagccatatgttgatcaaattgctacagctactaaaccacatgtcgagaaagttagaactgctctcaagccttatactgaaagagcacgacatgtatatggacagtttcttgagacagctactacatatcatcagcaggcaactatctcggattaccttcaccggcatgagtttacaaaacagtttgtaactaaagagttggtgtggtatctggcttctgctttattggttacacccttctttgttttgtacacactcctaactgaaacattctgtaccaagaagaagaagaaaacacctcggagcagtaataccaaccatggtcataggagacataagcgccggcatgctgacaagtaaaacattgatcaaccatggtcattactttttttataacgatcttggaagcttgaccatttacctttcactgtaaatggtatagacactatcatccgtcatcgccgaaccttgttgtgtatccacgaactagaatacacacaagaaatgtgtttctgccccccatcgtgttgggagagttgtgtttttcatcagagtagggaccgcgagcttaaatctgtgggtgtcatttcataggttatttgttgtagcattgtgcttgagcttgtgtaattcatgattattttgtctcgcgtttgtggatcacttcagccactacattattctacagcttccactcggtgtaaaagttttatcttccacgctgggatgctgtggtttggagaaattctagtaccaagaaaaaccttagttttatatacaagagacatggaaaaggaggtctagactctgttccatcgtaactgcgctgcgtaagcccctaatctaccgcgaatccgcttgatgtttctaaggggaaatccaaatcgaagcaatcggcatgtcccgggcgcttgtcggagaaatttttggcaccattcgtccatcacgtaaccacatatagctcaaaattcaaaggtcgggtttgaagaaaacatacacgtttatcagaaactatcacacggacgagtacaccccatactcttatctagatccctgtatgagctcgatcagtaccaagcctgtttttgttgcacatgacatgcatgctgtcaacctatgctgctccgatctctacaagccaagagcccccaacaaaaaactgaaaaaaaagagaggataatttccagctactgatacaaacaacggactaaattgacacatcaaatcctaccgacctacatgatccatacaccaacattacgtcgttgttacgtttgtcggctgcatgcatgccattgccaagccacgccactactccgatccacagctactagctagacttggtacccgccggcaggccagtacctctccaccagctgctccacgtccaagccctggtaccgggccccggccgccgagtccgcgccgaaccctccgtccgcgccgggcacgatcacgcagccgccgagccccgccgcagccgccgtcgccatctgcttctgctggtggtgttcac

SEQ ID NO: 22113 - DNA, 2222 bp, Zea Mays
cttcaacctagtggtctcggcatacatccacatcctcaacctactgagctaggctccctttcctagagggtagagttccatggaatgacagcatggcacatgttagcattttcttatttatctcaagtataaatggggctcatgtcttgttgagttacaatcaagctgtaaagtaaaaaaagatggaggttaatttcccgttgagagaaagctccagaggacaagcagtgatcaaaagcgcaggattcagaagactgaacatgctcttaaagctgctgaggaggagctgatgaaggctcagttggaaacaacaacaaaagtaaaacagcttagagaggttcatggagcctggttgccaccatggttagcgacacatgcagcccgctctatggaggtgatgtcaaatcactggaatgaacatgggaaacctgcctttgacagcttcttgcagaaggcatctgaaaaaacagtgcagacaaagaaatgggctgagcctcatctggaaactgctaagacaaaatggatgcctgttgctaaagaaaaatgggttaccttgaagaaacatgcaaagccctatgtccaaatggtctcagagaaatcattggaggcttatcaaacatcaagtgactttgtcaggcctcatcttgtaaatgcacatcaagttgttgatccctatttccaggaagccaagaaattatccaagccatatgttgatcaaattgctacagctactaaaccacatgtcgagaaagttagaactgctctcaagccttatactgaaagagcacgacatgtatatggacagtttcttgagacagctactacatatcatcagcaggctcaggcaactatctcggattaccttcaccggcatgagtttacaaaacagtttgtaactaaagagttggtgtggtatctggcttctgctttattggttacacccttctttgttttgtacacactcctaactgaaacattctgtaccaagaagaagaagaaaacacctcggagcagtaataccaaccatggtcataggagacataagcgccggcatgctgacaagtaaaacattgatcaaccatggtcattactttttttataacgatcttggaagcttgaccatttacctttcactgtaaatggtatagacactatcatccgtcatcgccgaaccttgttgtgtatccacgaactagaatacacacaagaaatgtgtttctgccccccatcgtgttgggagagttgtgtttttcatcagagtagggaccgcgagcttaaatctgtgggtgtcatttcataggttatttgttgtagcattgtgcttgagcttgtgtaattcatgattattttgtctcgcgtttgtggatcacttcagccactacattattctacagcttccactcggtgtaaaagttttatcttccacgctgggatgctgtggtttggagaaattctagtaccaagaaaaaccttagttttatatacaagagacatggaaaaggaggtctagactctgttccatcgtaactgcgctgcgtaagcccctaatctaccgcgaatccgcttgatgtttctaaggggaaatccaaatcgaagcaatcggcatgtcccgggcgcttgtcggagaaatttttggcaccattcgtccatcacgtaaccacatatagctcaaaattcaaaggtcgggtttgaagaaaacatacacgtttatcagaaactatcacacggacgagtacaccccatactcttatctagatccctgtatgagctcgatcagtaccaagcctgtttttgttgcacatgacatgcatgctgtcaacctatgctgctccgatctctacaagccaagagcccccaacaaaaaactgaaaaaaaagagaggataatttccagctactgatacaaacaacggactaaattgacacatcaaatcctaccgacctacatgatccatacaccaacattacgtcgttgttacgtttgtcggctgcatgcatgccattgccaagccacgccactactccgatccacagctactagctagacttggtacccgccggcaggccagtacctctccaccagctgctccacgtccaagccctggtaccgggccccggccgccgagtccgcgccgaaccctccgtccgcgccgggcacgatcacgcagccgccgagccccgccgcagccgccgtcgccatctgcttctgctggtggtgttcac

SEQ ID NO: 22114 - DNA, 2130 bp, Zea Mays
gacagcatggcacatgttagcattttcttatttatctcaagtataaatggggctcatgtcttgttgagttacaatcaagctgtaaagtaaaaaaagatggaggttaatttcccgttgagagaaagaggacaagcagtgatcaaaagcgcaggattcagaagactgaacatgctcttaaagctgctgaggaggagctgatgaaggctcagttggaaacaacaacaaaagtaaaacagcttagagaggttcatggagcctggttgccaccatggttagcgacacatgcagcccgctctatggaggtgatgtcaaatcactggaatgaacatgggaaacctgcctttgacagcttcttgcagaaggcatctgaaaaaacagtgcagacaaagaaatgggctgagcctcatctggaaactgctaagacaaaatggatgcctgttgctaaagaaaaatgggttaccttgaagaaacatgcaaagccctatgtccaaatggtctcagagaaatcattggaggcttatcaaacatcaagtgactttgtcaggcctcatcttgtaaatgcacatcaagttgttgatccctatttccaggaagccaagaaattatccaagccatatgttgatcaaattgctacagctactaaaccacatgtcgagaaagttagaactgctctcaagccttatactgaaagagcacgacatgtatatggacagtttcttgagacagctactacatatcatcagcaggctcaggcaactatctcggattaccttcaccggcatgagtttacaaaacagtttgtaactaaagagttggtgtggtatctggcttctgctttattggttacacccttctttgttttgtacacactcctaactgaaacattctgtaccaagaagaagaagaaaacacctcggagcagtaataccaaccatggtcataggagacataagcgccggcatgctgacaagtaaaacattgatcaaccatggtcattactttttttataacgatcttggaagcttgaccatttacctttcactgtaaatggtatagacactatcatccgtcatcgccgaaccttgttgtgtatccacgaactagaatacacacaagaaatgtgtttctgccccccatcgtgttgggagagttgtgtttttcatcagagtagggaccgcgagcttaaatctgtgggtgtcatttcataggttatttgttgtagcattgtgcttgagcttgtgtaattcatgattattttgtctcgcgtttgtggatcacttcagccactacattattctacagcttccactcggtgtaaaagttttatcttccacgctgggatgctgtggtttggagaaattctagtaccaagaaaaaccttagttttatatacaagagacatggaaaaggaggtctagactctgttccatcgtaactgcgctgcgtaagcccctaatctaccgcgaatccgcttgatgtttctaaggggaaatccaaatcgaagcaatcggcatgtcccgggcgcttgtcggagaaatttttggcaccattcgtccatcacgtaaccacatatagctcaaaattcaaaggtcgggtttgaagaaaacatacacgtttatcagaaactatcacacggacgagtacaccccatactcttatctagatccctgtatgagctcgatcagtaccaagcctgtttttgttgcacatgacatgcatgctgtcaacctatgctgctccgatctctacaagccaagagcccccaacaaaaaactgaaaaaaaagagaggataatttccagctactgatacaaacaacggactaaattgacacatcaaatcctaccgacctacatgatccatacaccaacattacgtcgttgttacgtttgtcggctgcatgcatgccattgccaagccacgccactactccgatccacagctactagctagacttggtacccgccggcaggccagtacctctccaccagctgctccacgtccaagccctggtaccgggccccggccgccgagtccgcgccgaaccctccgtccgcgccgggcacgatcacgcagccgccgagccccgccgcagccgccgtcgccatctgcttctgctggtggtgttcac

SEQ ID NO: 22115 - DNA, 1934 bp, Zea Mays
cttgttgagttacaatcaagctgtaaagtaaaaaaagatggaggttaatttcccgttgagagaaagctccagaggacaagcagtgatcaaaagcgcaggattcagaagactgaacatgctcttaaagctgctgaggaggagctgatgaaggctcagttggaaacaacaacaaaagtaaaacagcttagagaggttcatggagcctggttgccaccatggttagcgacacatgcagcccgctctatggaggtgatgtcaaatcactggaatgaacatgggaaacctgcctttgacagcttcttgcagaaggcatctgaaaaaacagtgcagacaaagaaatgggctgagcctcatctggaaactgctaagacaaaatggatgcctgttgctaaagaaaaatgggttaccttgaagaaacatgcaaagccctatgtccaaatggtctcagagaaatcattggaggcttatcaaacatcaagtgactttgtcaggcctcatcttgtaaatgcacatcaagttgttgatccctatttccaggaagccaagaaattatccaagccatatgttgatcaaattgctacagctactaaaccacatgtcgagaaagttagaactgctctcaagccttatactgaaagagcacgacatgtatatggacagtttcttgagacagctactacatatcatcagcagtaccaagaagaagaagaaaacacctcggagcagtaataccaaccatggtcataggagacataagcgccggcatgctgacaagtaaaacattgatcaaccatggtcattactttttttataacgatcttggaagcttgaccatttacctttcactgtaaatggtatagacactatcatccgtcatcgccgaaccttgttgtgtatccacgaactagaatacacacaagaaatgtgtttctgccccccatcgtgttgggagagttgtgtttttcatcagagtagggaccgcgagcttaaatctgtgggtgtcatttcataggttatttgttgtagcattgtgcttgagcttgtgtaattcatgattattttgtctcgcgtttgtggatcacttcagccactacattattctacagcttccactcggtgtaaaagttttatcttccacgctgggatgctgtggtttggagaaattctagtaccaagaaaaaccttagttttatatacaagagacatggaaaaggaggtctagactctgttccatcgtaactgcgctgcgtaagcccctaatctaccgcgaatccgcttgatgtttctaaggggaaatccaaatcgaagcaatcggcatgtcccgggcgcttgtcggagaaatttttggcaccattcgtccatcacgtaaccacatatagctcaaaattcaaaggtcgggtttgaagaaaacatacacgtttatcagaaactatcacacggacgagtacaccccatactcttatctagatccctgtatgagctcgatcagtaccaagcctgtttttgttgcacatgacatgcatgctgtcaacctatgctgctccgatctctacaagccaagagcccccaacaaaaaactgaaaaaaaagagaggataatttccagctactgatacaaacaacggactaaattgacacatcaaatcctaccgacctacatgatccatacaccaacattacgtcgttgttacgtttgtcggctgcatgcatgccattgccaagccacgccactactccgatccacagctactagctagacttggtacccgccggcaggccagtacctctccaccagctgctccacgtccaagccctggtaccgggccccggccgccgagtccgcgccgaaccctccgtccgcgccgggcacgatcacgcagccgccgagccccgccgcagccgccgtcgccatctgcttctgctggtggtgttcac

SEQ ID NO: 22116 - DNA, 7179 bp, Zea Mays
ccgcaaccgaacttcacactccgacggaaccaattcgcatccgcacggacggaacgtctgaaccccaccgccgcaccgcgcgcgtccatcccccaatgcccccagcagcggcagttcgtcgggctccctcgccggacgcggcgggcggagcgaggctagccgcggagcaagcctctggcccgtgagaaacatgtctccacaggagacacggcaacgcgcccttgtagattgcaacggcggagaggaggttattgtgctgttccatttggctgaatacggaagttaatggtggttgagtgcaagaaaagaaatttaactaacactgtaaagatcgaggaatatagaaacagagctaattgacactagtgatgaaaacagtctcatgacttgtgaaagcttgatggtcactgcttgctgactggtgagcagcaatagggcttgtctagaaagtgaggtacagacataaggcaaccttgcattcctgatcaggtaatatatcagtcttttgcttccactagtgcagaggcggatccatagggggggcaaagtaggccatggccccccctcaattttgtacacccttttatgtatatgattatttagtattaagtgtagaaaaaaaatcaaagttttagatagtatagagtcttgttctaaatctctaaaactaatagctagttgctaaaattagtcgagaggtttagaatggatcaactaattgttagttatattcctcaaataaatattagttgttagatgccacaacccagctaaaaccagttaatagttagttataaaggtttagaacatgacataaaacaaccatgttatgagcctgctcgtctgatcctctcggtctagtccttgcatctacctgtctaactctaatcttttcgacaccacctaaaccagtctgctcgttgtcctgttttcgccgccgacccattcccgatgcgacgccacccgacttcgccccttcctgccgccttcgtcccttgttttgtttttacatgacgtcaatccgctcgacaagctagatctcgctcgtcgcaacgatatgacttgtcccatgcggttgacggacatggcgaactagaaaatcatgtctctcatgtggtctttttggccccccctgaattttcgtcctgcgtccgccactgcactagtggaattagtttgtatcatgtacgattgatttatgctaatgtcaaaagctcccgataacaatttaatgtcaatgtttttttaactaaatgtaattttttttttacaatgagttcgtaaaattaagatgaatagggtccttgctcgcgggcagaacttattcatatctgtttcgtgtagccacatcttaaacgaaggaaattctgatattaattaaactccaaaagaacaagtcaatgtgcttggatttcggaatcatcttgccagcttatgacaatagaatagttgcaattcgataattcaccaatatcttggattgatgccagcttgaatagttacactatggtacctttgctggacacatttttcagtggttttataatttaaactattcaatctcatgccttgattttatttttttttgctggaaaagatgaaatatcattgcaattttgcctgtaggagcagtttgtatttaatgcctgtcatggtgcaagcacattttctaatttatgtggttatttttaaggaacatgtgttaatttaaaatatttttgaagtaaaacaatgtgaactgtcaaccaagggattaaatgtagctactcagatagtcagaaaaaacacacagaagcctaagacctagccttgtggtggaggcacaacaaataactatctgtttctggaagttttaacaaacctgtaaaaatatcagaaaaaatgaatattcagattgttgacacttcaaaattgtaagtgattttcactgtttcattatcattttcttacctgttcaaattggaccaaaattttacatatgtaaaaaagaaatgagattatcttctggatttaaacatatgaaggtgttccccatccatctggacgcacatcagtggaaagtatggttagtttcttctgcactttaaacttacgtactttgtgccagtagacacactatacctgcgaatggttcaaaggcaatccaaccattttttctcaaggtaaccatgtgcacagaaaagtgtaatgactcatctattcttgaatcgacaagtatttttgggaagttgccccctgatctgcagcaataagatttagataagttataatatttagtgaaagatctttctgcaaaataaaaaaagtttacttgtgaagtacttcataatatgaaattgtgcagtgtcatgtttttgttcacatgattattaaactggatgctaaagacatcgcttgagtaaaccgcagagtaggaacgggccttagttgttctctttgaagttgaatagatcaatactgcgcccattgatacgtgagggagattgacccgtaactactcttggtgactgattgatggaaacacgtcaatttgggttgctgataaacctgtaatgtcattcaacgtcagtgtccaaacaacgactaaatcaattaatctattcacatcaaagttgtttgtaagaaacttaggcacacaatcgcttgttgttgacatccttactccgtggccaagatttgttagctaagcattcatatattattcatagcagaactaactggcctataaaattacacatttcacattggccatccacttggaaaattgcagtatgagtagctagaagctatatttcttctagatgaattcactccacactagtacagaccttccatgagaccatgattaagaaagatgggtgagaagtttgttttctcctcgtcactacaaaggaatgcatgtttcttttatgtaatactgttacttttatgctatcttgtttgatccacatgccatgattttgttcccactgcacttttcttggttaagctgcacttgcaacaaaaacaacatttcacagtcaacaagtagcattgttagttactataaatgttaatatcagttactagtgaaatatatgccctaagtaatacttgtaggtataatgcagctcagcgctgttgggaggggggagaggtcaatcatttctcttgttcaatggtacactcactgttgtgtagcgattgaagcattctggaactgtggacgctagtgtcttagacagttgacgtggaaactaggtgaggcgaaattgtcgcttcagaatatcatataattgaatcttctgctctgggtgtagtatctaggtgttctatttataaaccccttcaaacaggaagaaagaagaaactgaaagattatagtttatataatttttatcttcctgaattagaattgtacctataaactgaaagatgtttcttcatcaccttctgttaagaaattttcagttctcacaatcggtacaattggctaaaattttataatagaagcacagctgcctttgtaaatatccaaattgtttgtccggcctaggatctaattggtggtggtgttatattttttgtttggccctggtctggtttctttggacttcacctccctgatctgcaaatatcgatttatactgtggcctttgcatgcatacaacatgcatactatgcacagtttcttcataatgtgtttatcgattacagcctctttctgacttgatggaccttctgtgcggtctagacaattgtagttcaccgctacggttatctggggaagttagatgaaccaacacctcaagttttgctttgcaaagcatcctcttgaatctctcgattgctggggaaatattgttctgactttttttttctaggcaaacttatgtgatgagaggtatcactcgagtgtgtaggtttttccgggatgcagacagatcatgagagattagactgtcttcgaagccaatgctgctgggagtttctagtttatcaacagatttcctcttagttgttgatcgcagcaagaaacggctgtccttgctagcttgtcatttcgcttttaggtgttcgtaggtaagaaaaacatgcgacagaaccaggcatcgttgacacttgttagacagcaacgatgatgacatcgccattttctagagaacgacgtcaatgcggacaagaaagccaattgttttttgttcaatagttttttcatctcgtattcttggacaaaggttaacctgtatttgtgcttctgtctttcaggcaggaaaaacatgtatctgactctatccgatgtttctcacgggcaccatgggaatgggaattgctgttgccctcgttttaaactcatctagaggatattgcccacgcccagatcaatatgctgtctctccatctccatgcttcacctccggcattgatgcagccagctgtatcaattatgcaaaagaaaagttcctatctgattgctctctgctgagtaccgatcaccaaactgtttccgtgctccacacccttacctccagctcaagatcatgttcctgcatccaatttactgtgcaacagacagaggacatcaaggtggctcgaagccccccgggcgacttcctcgtcaccttcacacaccgccaccaccgggaggcggccgtcgctgcaagagacttcctacacagcaaccttgacttccgcatcaggccatggcagctggtcgccctcggggagcgccatgatctctacttccatgtcagactgtgcttggagggcatccctccccatgcctggaacgaaaacatcgccaagcgctcggtggctcgtgcctgcgtccttgactacgtcgaagaagattgtctctcctccaacaaggcggacgcgcgctgcctcaacctgtgggcgtggacgggaaatccgtctgacatccccaagatcgtctggctcaccatcacgggccgttcaatggtgatccatgacaacgccccccctccgccagggcagtgtggcctcaccttccgggtgctggtgcacattgatctggtggagagcccctcggggcagggtgggcggctggccactcgctcacttccgtggcgccatggtgtggtcgacggcgagcggggcccccgcgaccgacatgacccgcccccaacggatcactgtaatgggagtcgccgttgggacagagaagacgaagatgatgaggatggtaggcgtgggcgtcggcaacacaaggcgaggagctggagttcccgcctcttccgcagcgtctcccgcgcgccacgtgaccgtgaccgtgatcgctccgagcctagacgtgacgcccacgaccggggatccaacactggtggtcgacgccaccaccatgtccggggcccttgcaccgatggcctagcccatccccccgggcccgtgtctaccccccactccgggcctgcgtggcaggaccgtggacgcagtcgggagaggcattcgccccgtcgccatggacaccgcaacaggtcctccccccgtgggctccaccagcgccacgcgccctctccggccgtgctgttgggctgtagccccggatcccccgcgggcgctggggaagaccgctggccctccccacggccgccgctgcatcgcgtcggaggcgaccggtgcggagaggatgtgccacaggatgatcataaccactcaacaccgccgccacagacagtgacgtcgagcccaggtttgatgtctgtgcacgcagagcgacgctttctgcctggccgggtctaccgcaggcgcgcccgttctgccccaccagaaccggggcaacattcgcctgccaccatcatgatggatgcagcgccgggggtagctgtgggttcggagacagctcttgtcaccggcatggagaccgctcagcaggctacaactgttttcccagagctaggggagccggccactaccaccgtggcgtccttcatcagcaaccacacctgccctgttgcaccaccactgctccaggagctccatcaagcgccaccaaacctgaagacaaagaagaagcaagctgccagggcgacccgcaagagtatgcggctggcggcgatcgcatggccgcgtgggaacatccaggaacgcgcacgccaggtcctgctaaagcgcctgggcttgctgcctaaggaaggccagccgtctgatcaggctactgcaagtgccgcgctggagacctgcatcaacctcttcaagggtccactgtcgtccgtggtgctgcaatcgctgatggacctctgcggaatcattccgccacaggggcctgcggcgcagagctggacgacagaggatcatccttggaaagggtttgatgtgccttgtaaccttgcggacaggctcctctttagcgcctccaccatcgtcaccgttggagatggcaagacaaccaaattctggcacgacagttggcttgatggcatggcgccaagaaacctagcaccacacctcttcgagctagtctcaagaaagaacaagtcagttgccattgagatcaatgacgggaattggatcaggtcgttgagaggcaagattacctccacggtgcagattgaggaattcgtctccctctggtttagactccatgatttccacctccaaccacaggtgccggactccattgcctggaaatggaaccccgacggtgtcttcacggtaaaatcagcctacaatgcacaattcattgggtcgtacagccacattaattctgattttgtttggcgggcacgggcagagcaaaagtgcaagatttttgcttggattcttctacaggacaagctcctcactgctaacaatctggccactcggggttggccgcaccaaccaaactgctccctctgcaatggtcccttggagaccggcccccacctctgtttgcattgcccttttgcccgggcggtgtggcgtcagattctagtttgggagggcttgagcctcctggcccaggctgaccctactcacttctccagcataaaagactggtgggaagctacatcctccccgctcccaaagaaccaaaagcgtgacttcaacggcctcatgatatacaccctgtggaacatctggaaggagagaaaccggaggatattcgaaaacagcgccctcacccctatccaattagccttgaagattaaagaggacgtgtgcactttcaagagagccatgttcctccagtattag

SEQ ID NO: 22117 - DNA, 7030 bp, Zea Mays
cagattgcaattcgctgtagaaagggaggttattgtgctgttccatttggctgaatacggaagttaatggtggttgagtgcaagaaaagaaatttaactaacactgtaaagatcgaggaatatagaaacagagctaattgacactagtgatgaaaacagtctcatgacttgtgaaagcttgatggtcactgcttgctgactggtgagcagcaatagggcttgtctagaaagtgaggtacagacataaggcaaccttgcattcctgatcaggtaatatatcagtcttttgcttccactagtgcagaggcggatccatagggggggcaaagtaggccatggccccccctcaattttgtacacccttttatgtatatgattatttagtattaagtgtagaaaaaaaatcaaagttttagatagtatagagtcttgttctaaatctctaaaactaatagctagttgctaaaattagtcgagaggtttagaatggatcaactaattgttagttatattcctcaaataaatattagttgttagatgccacaacccagctaaaaccagttaatagttagttataaaggtttagaacatgacataaaacaaccatgttatgagcctgctcgtctgatcctctcggtctagtccttgcatctacctgtctaactctaatcttttcgacaccacctaaaccagtctgctcgttgtcctgttttcgccgccgacccattcccgatgcgacgccacccgacttcgccccttcctgccgccttcgtcccttgttttgtttttacatgacgtcaatccgctcgacaagctagatctcgctcgtcgcaacgatatgacttgtcccatgcggttgacggacatggcgaactagaaaatcatgtctctcatgtggtctttttggccccccctgaattttcgtcctgcgtccgccactgcactagtggaattagtttgtatcatgtacgattgatttatgctaatgtcaaaagctcccgataacaatttaatgtcaatgtttttttaactaaatgtaattttttttttacaatgagttcgtaaaattaagatgaatagggtccttgctcgcgggcagaacttattcatatctgtttcgtgtagccacatcttaaacgaaggaaattctgatattaattaaactccaaaagaacaagtcaatgtgcttggatttcggaatcatcttgccagcttatgacaatagaatagttgcaattcgataattcaccaatatcttggattgatgccagcttgaatagttacactatggtacctttgctggacacatttttcagtggttttataatttaaactattcaatctcatgccttgattttatttttttttgctggaaaagatgaaatatcattgcaattttgcctgtaggagcagtttgtatttaatgcctgtcatggtgcaagcacattttctaatttatgtggttatttttaaggaacatgtgttaatttaaaatatttttgaagtaaaacaatgtgaactgtcaaccaagggattaaatgtagctactcagatagtcagaaaaaacacacagaagcctaagacctagccttgtggtggaggcacaacaaataactatctgtttctggaagttttaacaaacctgtaaaaatatcagaaaaaatgaatattcagattgttgacacttcaaaattgtaagtgattttcactgtttcattatcattttcttacctgttcaaattggaccaaaattttacatatgtaaaaaagaaatgagattatcttctggatttaaacatatgaaggtgttccccatccatctggacgcacatcagtggaaagtatggttagtttcttctgcactttaaacttacgtactttgtgccagtagacacactatacctgcgaatggttcaaaggcaatccaaccattttttctcaaggtaaccatgtgcacagaaaagtgtaatgactcatctattcttgaatcgacaagtatttttgggaagttgccccctgatctgcagcaataagatttagataagttataatatttagtgaaagatctttctgcaaaataaaaaaagtttacttgtgaagtacttcataatatgaaattgtgcagtgtcatgtttttgttcacatgattattaaactggatgctaaagacatcgcttgagtaaaccgcagagtaggaacgggccttagttgttctctttgaagttgaatagatcaatactgcgcccattgatacgtgagggagattgacccgtaactactcttggtgactgattgatggaaacacgtcaatttgggttgctgataaacctgtaatgtcattcaacgtcagtgtccaaacaacgactaaatcaattaatctattcacatcaaagttgtttgtaagaaacttaggcacacaatcgcttgttgttgacatccttactccgtggccaagatttgttagctaagcattcatatattattcatagcagaactaactggcctataaaattacacatttcacattggccatccacttggaaaattgcagtatgagtagctagaagctatatttcttctagatgaattcactccacactagtacagaccttccatgagaccatgattaagaaagatgggtgagaagtttgttttctcctcgtcactacaaaggaatgcatgtttcttttatgtaatactgttacttttatgctatcttgtttgatccacatgccatgattttgttcccactgcacttttcttggttaagctgcacttgcaacaaaaacaacatttcacagtcaacaagtagcattgttagttactataaatgttaatatcagttactagtgaaatatatgccctaagtaatacttgtaggtataatgcagctcagcgctgttgggaggggggagaggtcaatcatttctcttgttcaatggtacactcactgttgtgtagcgattgaagcattctggaactgtggacgctagtgtcttagacagttgacgtggaaactaggtgaggcgaaattgtcgcttcagaatatcatataattgaatcttctgctctgggtgtagtatctaggtgttctatttataaaccccttcaaacaggaagaaagaagaaactgaaagattatagtttatataatttttatcttcctgaattagaattgtacctataaactgaaagatgtttcttcatcaccttctgttaagaaattttcagttctcacaatcggtacaattggctaaaattttataatagaagcacagctgcctttgtaaatatccaaattgtttgtccggcctaggatctaattggtggtggtgttatattttttgtttggccctggtctggtttctttggacttcacctccctgatctgcaaatatcgatttatactgtggcctttgcatgcatacaacatgcatactatgcacagtttcttcataatgtgtttatcgattacagcctctttctgacttgatggaccttctgtgcggtctagacaattgtagttcaccgctacggttatctggggaagttagatgaaccaacacctcaagttttgctttgcaaagcatcctcttgaatctctcgattgctggggaaatattgttctgactttttttttctaggcaaacttatgtgatgagaggttggttttgctgaagaattatacttttaatgaattcggatgactcaaatccatatttctcttctgacaggtatcactcgagtgtgtaggtttttccgggatgcagacagatcatgagagattagactgtcttcgaagccaatgctgctgggagtttctagtttatcaacagatttcctcttagttgttgatcgcagcaagaaacggctgtccttgctagcttgtcatttcgcttttaggtgttcgtaggtaagaaaaacatgcgacagaaccaggcatcgttgacacttgttagacagcaacgatgatgacatcgccattttctagagaacgacgtcaatgcggacaagaaagccaattgttttttgttcaatagttttttcatctcgtattcttggacaaaggttaacctgtatttgtgcttctgtctttcaggcaggaaaaacatgtatctgactctatccgatgtttctcacgggcaccatgggaatgggaattgctgttgccctcgttttaaactcatctagaggatattgcccacgcccagatcaatatgctgtctctccatctccatgcttcacctccggcattgatgcagccagctgtatcaattatgcaaaagaaaagttcctatctgattgctctctgctgagtaccgatcaccaaactgtttccgtgctccacacccttacctccagctcaagatcatgttcctgcatccaatttactgtgcaacagacagaggacatcaaggtggctcgaagccccccgggcgacttcctcgtcaccttcacacaccgccaccaccgggaggcggccgtcgctgcaagagacttcctacacagcaaccttgacttccgcatcaggccatggcagctggtcgccctcggggagcgccatgatctctacttccatgtcagactgtgcttggagggcatccctccccatgcctggaacgaaaacatcgccaagcgctcggtggctcgtgcctgcgtccttgactacgtcgaagaagattgtctctcctccaacaaggcggacgcgcgctgcctcaacctgtgggcgtggacgggaaatccgtctgacatccccaagatcgtctggctcaccatcacgggccgttcaatggtgatccatgacaacgccccccctccgccagggcagtgtggcctcaccttccgggtgctggtgcacattgatctggtggagagcccctcggggcagggtgggcggctggccactcgctcacttccgtggcgccatggtgtggtcgacggcgagcggggcccccgcgaccgacatgacccgcccccaacggatcactgtaatgggagtcgccgttgggacagagaagacgaagatgatgaggatggtaggcgtgggcgtcggcaacacaaggcgaggagctggagttcccgcctcttccgcagcgtctcccgcgcgccacgtgaccgtgaccgtgatcgctccgagcctagacgtgacgcccacgaccggggatccaacactggtggtcgacgccaccaccatgtccggggcccttgcaccgatggcctagcccatccccccgggcccgtgtctaccccccactccgggcctgcgtggcaggaccgtggacgcagtcgggagaggcattcgccccgtcgccatggacaccgcaacaggtcctccccccgtgggctccaccagcgccacgcgccctctccggccgtgctgttgggctgtagccccggatcccccgcgggcgctggggaagaccgctggccctccccacggccgccgctgcatcgcgtcggaggcgaccggtgcggagaggatgtgccacaggatgatcataaccactcaacaccgccgccacagacagtgacgtcgagcccaggtttgatgtctgtgcacgcagagcgacgctttctgcctggccgggtctaccgcaggcgcgcccgttctgccccaccagaaccggggcaacattcgcctgccaccatcatgatggatgcagcgccgggggtagctgtgggttcggagacagctcttgtcaccggcatggagaccgctcagcaggctacaactgttttcccagagctaggggagccggccactaccaccgtggcgtccttcatcagcaaccacacctgccctgttgcaccaccactgctccaggagctccatcaagcgccaccaaacctgaagacaaagaagaagcaagctgccagggcgacccgcaagagtatgcggctggcggcgatcgcatggccgcgtgggaacatccaggaacgcgcacgccaggtcctgctaaagcgcctgggcttgctgcctaaggaaggccagccgtctgatcaggctactgcaagtgccgcgctggagacctgcatcaacctcttcaagggtccactgtcgtccgtggtgctgcaatcgctgatggacctctgcggaatcattccgccacaggggcctgcggcgcagagctggacgacagaggatcatccttggaaagggtttgatgtgccttgtaaccttgcggacaggctcctctttagcgcctccaccatcgtcaccgttggagatggcaagacaaccaaattctggcacgacagttggcttgatggcatggcgccaagaaacctagcaccacacctcttcgagctagtctcaagaaagaacaagtcagttgccattgagatcaatgacgggaattggatcaggtcgttgagaggcaagattacctccacggtgcagattgaggaattcgtctccctctggtttagactccatgatttccacctccaaccacaggtgccggactccattgcctggaaatggaaccccgacggtgtcttcacggtaaaatcagcctacaatgcacaattcattgggtcgtacagccacattaattctgattttgtttggcgggcacgggcagagcaaaagtgcaagatttttgcttggattcttctacaggacaagctcctcactgctaacaatctggccactcggggttggccgcaccaaccaaactgctccctctgcaatggtcccttggagaccggcccccacctctgtttgcattgcccttttgcccgggcggtgtggcgtcagattctagtttgggagggcttgagcctcctggcccaggctgaccctactcacttctccagcataaaagactggtgggaagctacatcctccccgctcccaaagaaccaaaagcgtgacttcaacggcctcatgatatacaccctgtggaacatctggaaggagagaaaccggaggatattcgaaaacagcgccctcacccctatccaattagccttgaagattaaagaggacgtgtgcactttcaagagagccatgttcctccagtattag

SEQ ID NO: 22118 - DNA, 2047 bp, Zea Mays
atcttgatcatgtgatccatttcccctttatatatgttctcctcttctttcttcctccttaaacctaacctcattgcggcggcggccgccgcctaccctacaagccacttgacctatacctctatacaatctctccttgtcgttgtattgccttgtttgtgtcgcctaccaccccgcgcttcattttgctctcattatcgacgactacattttattgtttgcaatcaagatggtcagatatggctaggtatacatttgagaccatggagcatcatcgtagacgtggaacattcaaccgtccgcccatgcacggaatttgggctcacaggataagtgggagcttttctcaagtacggaaagcactgttagcagtttcaacctgcctccaagataatcctaggccagacacacataatattccgattggaagaccatttgggcttccaggtagtggtactggatgtccccctggcatggatcctcattctcaaagaagttatttaccaccacacatacctgattaccacacaaggaattatccaagtaatgctggcccccctggtcctagattcttttttgaacaagagatagtgttcaggatgataattctgaatgagatggtgggaagcataattggaaaaggtggttccactattcgggcattgcaaagtgaaactggtgcttgtataaagatcttagagccagttgctgattcagatgagcgtgttgttgcgataactgcacgtgagaattctgacatgctgcattctccagcgcaagatgcagttgttcgggtgtactctaggatctcagaggcatctattgatagaagttctcatacacctgcaaggcttctcgttccatcacaacatattggttgcctgctaggaaaaggtggatccattatttcagagatgagaaagattacaggagctaacattcgaattttcgggaatgaacaaattccaagatgcgcacagcgaaatgatgagatggttcaggtcactggtagcttccaatccattcaggatgcattacttcatattactggaaggattagggatgtcatccttcccaagccacaccccagtggaggcatgcctccatatcctcctgttggaaacatcccagttcaccaatcaagacaagaacaacctcctccgcacctccatcccagtgggggtatgccaccataccctatgcatcctttcagacctgatgctcctatgggccactttgaaatgggtgatcatcggccacctcctgtacattcgatggaatatatgggtgctgatagaatgccatacttgtatggtgttgaacaaggaggtcctcgcccttttctagaacagccttcgccaagaacctgccctcctgaggcaccaaggacaaacagtgaagttcccagaaacatgtctgatgcagtgccagctacagatttcagaaagggaccagtggcaattgaaaaccaagtggctacaccaacaggcacaactgaagttatcattccttgcaattatataggctttgtctgtggaaacaatggcagtgaaattgaagaaatagagaagatgtcaggtgcttcaattacagttcatgatcctaaagctggcgacgcaaactcaaaagttgttatatgcggggatccccgaagaaacaaagaaggcacagagcctgattcatgccttcatattctgtggtctgtatcaaacataattgatgacttgatcactgtgcagtaccatcgtcgtttatgttcttgaatctagagtagttcccatgggcagatttcagcccttgattggatgtacatgtaccgtcgctaccggggtggatgtaggtagggctgatgcatgccttgtacaaacaacgccgatgtacatttctgtagtcctgtgttttagtttgggggaatggcaccatggaatgtgatgggttggctgcacggacctctgtggaatgtttaaccccatgccatcattggttttcatgatttcatctcttgtttgggaggcagccctgtgtgattgagattcgtaatttccag

SEQ ID NO: 22119 - DNA, 1613 bp, Zea Mays
atccatttcccctttatatatgttctcctcttctttcttcctccttaaacctaacctcattgcggcggcggccgccgcctaccctacaagccacttgacctatacctctatacaatctctccttgtcgttgtattgccttgtttgtgtcgcctaccaccccgcgcttcattttgctctcattatcgacgactacattttattgtttgcaatcaagatggtcagatatggctaggtatacatttgagaccatggagcatcatcgtagacgtggaacattcaaccgtccgcccatgcacggaatttgggctcacaggaattctgacatgctgcattctccagcgcaagatgcagttgttcgggtgtactctaggatctcagaggcatctattgatagaagttctcatacacctgcaaggcttctcgttccatcacaacatattggttgcctgctaggaaaaggtggatccattatttcagagatgagaaagattacaggagctaacattcgaattttcgggaatgaacaaattccaagatgcgcacagcgaaatgatgagatggttcaggtcactggtagcttccaatccattcaggatgcattacttcatattactggaaggattagggatgtcatccttcccaagccacaccccagtggaggcatgcctccatatcctcctgttggaaacatcccagttcaccaatcaagacaagaacaacctcctccgcacctccatcccagtgggggtatgccaccataccctatgcatcctttcagacctgatgctcctatgggccactttgaaatgggtgatcatcggccacctcctgtacattcgatggaatatatgggtgctgatagaatgccatacttgtatggtgttgaacaaggaggtcctcgcccttttctagaacagccttcgccaagaacctgccctcctgaggcaccaaggacaaacagtgaagttcccagaaacatgtctgatgcagtgccagctacagatttcagaaagggaccagtggcaattgaaaaccaagtggctacaccaacaggcacaactgaagttatcattccttgcaattatataggctttgtctgtggaaacaatggcagtgaaattgaagaaatagagaagatgtcaggtgcttcaattacagttcatgatcctaaagctggcgacgcaaactcaaaagttgttatatgcggggatccccgaagaaacaaagaaggcacagagcctgattcatgccttcatattctgtggtctgtatcaaacataattgatgacttgatcactgtgcagtaccatcgtcgtttatgttcttgaatctagagtagttcccatgggcagatttcagcccttgattggatgtacatgtaccgtcgctaccggggtggatgtaggtagggctgatgcatgccttgtacaaacaacgccgatgtacatttctgtagtcctgtgttttagtttgggggaatggcaccatggaatgtgatgggttggctgcacggacctctgtggaatgtttaaccccatgccatcattggttttcatgatttcatctcttgtttgggaggcagccctgtgtgattgagattcgtaatttccag

SEQ ID NO: 22120 - DNA, 1973 bp, Zea Mays
ctcattgcggcggcggccgccgcctaccctacaagccacttgacctatacctctatacaatctctccttgtcgttgtattgccttgtttgtgtcgcctaccaccccgcgcttcattttgctctcattatcgacgactacattttattgtttgcaatcaagatggtcagatatggctaggtatacatttgagaccatggagcatcatcgtagacgtggaacattcaaccgtccgcccatgcacggaatttgggctcacaggtgggagcttttctcaagtacggaaagcactgttagcagtttcaacctgcctccaagataatcctaggccagacacacataatattccgattggaagaccatttgggcttccaggtagtggtactggatgtccccctggcatggatcctcattctcaaagaagttatttaccaccacacatacctgattaccacacaaggaattatccaagtaatgctggcccccctggtcctagattcttttttgaacaagagatagtgttcaggatgataattctgaatgagatggtgggaagcataattggaaaaggtggttccactattcgggcattgcaaagtgaaactggtgcttgtataaagatcttagagccagttgctgattcagatgagcgtgttgttgcgataactgcacgtgagaattctgacatgctgcattctccagcgcaagatgcagttgttcgggtgtactctaggatctcagaggcatctattgatagaagttctcatacacctgcaaggcttctcgttccatcacaacatattggttgcctgctaggaaaaggtggatccattatttcagagatgagaaagattacaggagctaacattcgaattttcgggaatgaacaaattccaagatgcgcacagcgaaatgatgagatggttcaggtcactggtagcttccaatccattcaggatgcattacttcatattactggaaggattagggatgtcatccttcccaagccacaccccagtggaggcatgcctccatatcctcctgttggaaacatcccagttcaccaatcaagacaagaacaacctcctccgcacctccatcccagtgggggtatgccaccataccctatgcatcctttcagacctgatgctcctatgggccactttgaaatgggtgatcatcggccacctcctgtacattcgatggaatatatgggtgctgatagaatgccatacttgtatggtgttgaacaaggaggtcctcgcccttttctagaacagccttcgccaagaacctgccctcctgaggcaccaaggacaaacagtgaagttcccagaaacatgtctgatgcagtgccagctacagatttcagaaagggaccagtggcaattgaaaaccaagtggctacaccaacaggcacaactgaagttatcattccttgcaattatataggctttgtctgtggaaacaatggcagtgaaattgaagaaatagagaagatgtcaggtgcttcaattacagttcatgatcctaaagctggcgacgcaaactcaaaagttgttatatgcggggatccccgaagaaacaaagaaggcacagagcctgattcatgccttcatattctgtggtctgtatcaaacataattgatgacttgatcactgtgcagtaccatcgtcgtttatgttcttgaatctagagtagttcccatgggcagatttcagcccttgattggatgtacatgtaccgtcgctaccggggtggatgtaggtagggctgatgcatgccttgtacaaacaacgccgatgtacatttctgtagtcctgtgttttagtttgggggaatggcaccatggaatgtgatgggttggctgcacggacctctgtggaatgtttaaccccatgccatcattggttttcatgatttcatctcttgtttgggaggcagccctgtgtgattgagattcgtaatttccag

SEQ ID NO: 22121 - DNA, 1936 bp, Zea Mays
cgccgcctaccctacaagccacttgacctatacctctatacaatctctccttgtcgttgtattgccttgtttgtgtcgcctaccaccccgcgcttcattttgctctcattatcgacgactacattttattgtttgcaatcaagatggtcagatatggctaggtatacatttgagaccatggagcatcatcgtagacgtggaacattcaaccgtccgcccatgcacggaatttgggctcacaggataagtgggagcttttctcaagtacggaaagcactgttagcagtttcaacctgcctccaagataatcctaggccagacacacataatattccgattggaagaccatttgggcttccaggtagtggtactggatgtccccctggcatggatcctcattctcaaagaagttatttaccaccacacatacctgattaccacacaaggaattatccaagtaatgctggcccccctggtcctagattcttttttgaacaagagatagtgttcaggatgataattctgaatgagatggtgggaagcataattggaaaaggtggttccactattcgggcattgcaaagtgaaactggtgcttgtataaagatcttagagccagttgctgattcagatgagcgtgttgttgcgataactgcacgtgagcgcaagatgcagttgttcgggtgtactctaggatctcagaggcatctattgatagaagttctcatacacctgcaaggcttctcgttccatcacaacatattggttgcctgctaggaaaaggtggatccattatttcagagatgagaaagattacaggagctaacattcgaattttcgggaatgaacaaattccaagatgcgcacagcgaaatgatgagatggttcaggtcactggtagcttccaatccattcaggatgcattacttcatattactggaaggattagggatgtcatccttcccaagccacaccccagtggaggcatgcctccatatcctcctgttggaaacatcccagttcaccaatcaagacaagaacaacctcctccgcacctccatcccagtgggggtatgccaccataccctatgcatcctttcagacctgatgctcctatgggccactttgaaatgggtgatcatcggccacctcctgtacattcgatggaatatatgggtgctgatagaatgccatacttgtatggtgttgaacaaggaggtcctcgcccttttctagaacagccttcgccaagaacctgccctcctgaggcaccaaggacaaacagtgaagttcccagaaacatgtctgatgcagtgccagctacagatttcagaaagggaccagtggcaattgaaaaccaagtggctacaccaacaggcacaactgaagttatcattccttgcaattatataggctttgtctgtggaaacaatggcagtgaaattgaagaaatagagaagatgtcaggtgcttcaattacagttcatgatcctaaagctggcgacgcaaactcaaaagttgttatatgcggggatccccgaagaaacaaagaaggcacagagcctgattcatgccttcatattctgtggtctgtatcaaacataattgatgacttgatcactgtgcagtaccatcgtcgtttatgttcttgaatctagagtagttcccatgggcagatttcagcccttgattggatgtacatgtaccgtcgctaccggggtggatgtaggtagggctgatgcatgccttgtacaaacaacgccgatgtacatttctgtagtcctgtgttttagtttgggggaatggcaccatggaatgtgatgggttggctgcacggacctctgtggaatgtttaaccccatgccatcattggttttcatgatttcatctcttgtttgggaggcagccctgtgtgattgagattcgtaatttccag

SEQ ID NO: 22122 - DNA, 1830 bp, Zea Mays
ctaccagttgcagtagggttttagcttaaccgtccaatcccccatggaagtcgtctccaccccggccggcgccggcgccgccgcttcctcgtcctcttcctcctcctcctctaccccttccccctccaccaggcgccctaccaccacgctccgcttgctctgcccctccagccgcgtcgccacactccgcccctcacgggacctccacgtcgaccatccccccgtgggggatgaggccgtgctcgtcatctccgggccggacacccccgccgcggcggtcagggcatgggagcacgtggtgggccacagagtcgagggggacgaggcgatgggaggggaagaggaggagagggaggtgacgggcgccgtgggctgccggatgctggccgctggctggcaggtgggatgcgtcctggggaagggcgggaagacggtagagcggatgaggcaggagtgtggcgcccagatcagggtgttccggaatagggagcagctgcccccatgggcgccgccgggggatgagcttatccataattctgacatgctgcattctccagcgcaagatgcagttgttcgggtgtactctaggatctcagaggcatctattgatagaagttctcatacacctgcaaggcttctcgttccatcacaacatattggttgcctgctaggaaaaggtggatccattatttcagagatgagaaagattacaggagctaacattcgaattttcgggaatgaacaaattccaagatgcgcacagcgaaatgatgagatggttcaggtcactggtagcttccaatccattcaggatgcattacttcatattactggaaggattagggatgtcatccttcccaagccacaccccagtggaggcatgcctccatatcctcctgttggaaacatcccagttcaccaatcaagacaagaacaacctcctccgcacctccatcccagtgggggtatgccaccataccctatgcatcctttcagacctgatgctcctatgggccactttgaaatgggtgatcatcggccacctcctgtacattcgatggaatatatgggtgctgatagaatgccatacttgtatggtgttgaacaaggaggtcctcgcccttttctagaacagccttcgccaagaacctgccctcctgaggcaccaaggacaaacagtgaagttcccagaaacatgtctgatgcagtgccagctacagatttcagaaagggaccagtggcaattgaaaaccaagtggctacaccaacaggcacaactgaagttatcattccttgcaattatataggctttgtctgtggaaacaatggcagtgaaattgaagaaatagagaagatgtcaggtgcttcaattacagttcatgatcctaaagctggcgacgcaaactcaaaagttgttatatgcggggatccccgaagaaacaaagaaggcacagagcctgattcatgccttcatattctgtggtctgtatcaaacataattgatgacttgatcactgtgcagtaccatcgtcgtttatgttcttgaatctagagtagttcccatgggcagatttcagcccttgattggatgtacatgtaccgtcgctaccggggtggatgtaggtagggctgatgcatgccttgtacaaacaacgccgatgtacatttctgtagtcctgtgttttagtttgggggaatggcaccatggaatgtgatgggttggctgcacggacctctgtggaatgtttaaccccatgccatcattggttttcatgatttcatctcttgtttgggaggcagccctgtgtgattgagattcgtaatttccag

SEQ ID NO: 22123 - DNA, 2245 bp, Zea Mays
ctaccagttgcagtagggttttagcttaaccgtccaatcccccatggaagtcgtctccaccccggccggcgccggcgccgccgcttcctcgtcctcttcctcctcctcctctaccccttccccctccaccaggcgccctaccaccacgctccgcttgctctgcccctccagccgcgtcgccacactccgcccctcacgggacctccacgtcgaccatccccccgtgggggatgaggccgtgctcgtcatctccgggccggacacccccgccgcggcggtcagggcatgggagcacgtggtgggccacagagtcgagggggacgaggcgatgggaggggaagaggaggagagggaggtgacgggcgccgtgggctgccggatgctggccgctggctggcaggtgggatgcgtcctggggaagggcgggaagacggtagagcggatgaggcaggagtgtggcgcccagatcagggtgttccggaatagggagcagctgcccccatgggcgccgccgggggatgagcttatccattgggagcttttctcaagtacggaaagcactgttagcagtttcaacctgcctccaagataatcctaggccagacacacataatattccgattggaagaccatttgggcttccaggtagtggtactggatgtccccctggcatggatcctcattctcaaagaagttatttaccaccacacatacctgattaccacacaaggaattatccaagtaatgctggcccccctggtcctagattcttttttgaacaagagatagtgttcaggatgataattctgaatgagatggtgggaagcataattggaaaaggtggttccactattcgggcattgcaaagtgaaactggtgcttgtataaagatcttagagccagttgctgattcagatgagcgtgttgttgcgataactgcacgtgagaattctgacatgctgcattctccagcgcaagatgcagttgttcgggtgtactctaggatctcagaggcatctattgatagaagttctcatacacctgcaaggcttctcgttccatcacaacatattggttgcctgctaggaaaaggtggatccattatttcagagatgagaaagattacaggagctaacattcgaattttcgggaatgaacaaattccaagatgcgcacagcgaaatgatgagatggttcaggtcactggtagcttccaatccattcaggatgcattacttcatattactggaaggattagggatgtcatccttcccaagccacaccccagtggaggcatgcctccatatcctcctgttggaaacatcccagttcaccaatcaagacaagaacaacctcctccgcacctccatcccagtgggggtatgccaccataccctatgcatcctttcagacctgatgctcctatgggccactttgaaatgggtgatcatcggccacctcctgtacattcgatggaatatatgggtgctgatagaatgccatacttgtatggtgttgaacaaggaggtcctcgcccttttctagaacagccttcgccaagaacctgccctcctgaggcaccaaggacaaacagtgaagttcccagaaacatgtctgatgcagtgccagctacagatttcagaaagggaccagtggcaattgaaaaccaagtggctacaccaacaggcacaactgaagttatcattccttgcaattatataggctttgtctgtggaaacaatggcagtgaaattgaagaaatagagaagatgtcaggtgcttcaattacagttcatgatcctaaagctggcgacgcaaactcaaaagttgttatatgcggggatccccgaagaaacaaagaaggcacagagcctgattcatgccttcatattctgtggtctgtatcaaacataattgatgacttgatcactgtgcagtaccatcgtcgtttatgttcttgaatctagagtagttcccatgggcagatttcagcccttgattggatgtacatgtaccgtcgctaccggggtggatgtaggtagggctgatgcatgccttgtacaaacaacgccgatgtacatttctgtagtcctgtgttttagtttgggggaatggcaccatggaatgtgatgggttggctgcacggacctctgtggaatgtttaaccccatgccatcattggttttcatgatttcatctcttgtttgggaggcagccctgtgtgattgagattcgtaatttccag

SEQ ID NO: 22124 - DNA, 2497 bp, Zea Mays
ctaccagttgcagtagggttttagcttaaccgtccaatcccccatggaagtcgtctccaccccggccggcgccggcgccgccgcttcctcgtcctcttcctcctcctcctctaccccttccccctccaccaggcgccctaccaccacgctccgcttgctctgcccctccagccgcgtcgccacactccgcccctcacgggacctccacgtcgaccatccccccgtgggggatgaggccgtgctcgtcatctccgggccggacacccccgccgcggcggtcagggcatgggagcacgtggtgggccacagagtcgagggggacgaggcgatgggaggggaagaggaggagagggaggtgacgggcgccgtgggctgccggatgctggccgctggctggcaggtgggatgcgtcctggggaagggcgggaagacggtagagcggatgaggcaggagtgtggcgcccagatcagggtgttccggaatagggagcagctgcccccatgggcgccgccgggggatgagcttatccatataagtgggagcttttctcaagtacggaaagcactgttagcagtttcaacctgcctccaagataatcctaggccagacacacataatattccgattggaagaccatttgggcttccaggtagtggtactggatgtccccctggcatggatcctcattctcaaagaagttatttaccaccacacatacctgattaccacacaaggaattatccaagtaatgctggcccccctggtcctagattcttttttgaacaagagatagtgttcaggatgataattctgaatgagatggtgggaagcataattggaaaaggtggttccactattcgggcattgcaaagtgaaactggtgcttgtataaagatcttagagccagttgctgattcagatgagcgtgttgttgcgataactgcacgtgagaattctgacatgctgcattctccagcgcaagatgcagttgttcgggtgtactctaggatctcagaggcatctattgatagaagttctcatacacctgcaaggcttctcgttccatcacaacatattggttgcctgctaggaaaaggtggatccattatttcagagatgagaaagattacaggagctaacattcgaattttcgggaatgaacaaattccaagatgcgcacagcgaaatgatgagatggttcaggtcactggtagcttccaatccattcaggatgcattacttcatattactggaaggattagggatgtcatccttcccaagccacaccccagtggaggcatgcctccatatcctcctgttggaaacatcccagttcaccaatcaagacaagaacaacctcctccgcacctccatcccagtgggggtatgccaccataccctatgcatcctttcagacctgatgctcctatgggccactttgaaatgggtgatcatcggccacctcctgtacattcgatggaatatatgggtgctgatagaatgccatacttgtatggtgttgaacaaggaggtcctcgcccttttctagaacagccttcgccaagaacctgccctcctgaggtaagctgcatgcatttatttttggacaaattaataaggtggggtattacagggggactgatgtttaccacttatttttagctttagtgttcacaaatgtattctttatgagtttttgacatgtgcagcctaatatggaacggctattttcagagtttatagaatcctgtacttggctgttaccattcccacatagcatttcattccgatttaggggctgtagtggttgaattactttcatggacaggcaccaaggacaaacagtgaagttcccagaaacatgtctgatgcagtgccagctacagatttcagaaagggaccagtggcaattgaaaaccaagtggctacaccaacaggcacaactgaagttatcattccttgcaattatataggctttgtctgtggaaacaatggcagtgaaattgaagaaatagagaagatgtcaggtgcttcaattacagttcatgatcctaaagctggcgacgcaaactcaaaagttgttatatgcggggatccccgaagaaacaaagaaggcacagagcctgattcatgccttcatattctgtggtctgtatcaaacataattgatgacttgatcactgtgcagtaccatcgtcgtttatgttcttgaatctagagtagttcccatgggcagatttcagcccttgattggatgtacatgtaccgtcgctaccggggtggatgtaggtagggctgatgcatgccttgtacaaacaacgccgatgtacatttctgtagtcctgtgttttagtttgggggaatggcaccatggaatgtgatgggttggctgcacggacctctgtggaatgtttaaccccatgccatcattggttttcatgatttcatctcttgtttgggaggcagccctgtgtgattgagattcgtaatttccag

SEQ ID NO: 22125 - DNA, 1790 bp, Zea Mays
cccttcttgatttaacaaagatgtcaattgtacttgggtggaaattagaccacctttcctcatcgcttaatgataagtgggagcttttctcaagtacggaaagcactgttagcagtttcaacctgcctccaagataatcctaggccagacacacataatattccgattggaagaccatttgggcttccaggtagtggtactggatgtccccctggcatggatcctcattctcaaagaagttatttaccaccacacatacctgattaccacacaaggaattatccaagtaatgctggcccccctggtcctagattcttttttgaacaagagatagtgttcaggatgataattctgaatgagatggtgggaagcataattggaaaaggtggttccactattcgggcattgcaaagtgaaactggtgcttgtataaagatcttagagccagttgctgattcagatgagcgtgttgttgcgataactgcacgtgagaattctgacatgctgcattctccagcgcaagatgcagttgttcgggtgtactctaggatctcagaggcatctattgatagaagttctcatacacctgcaaggcttctcgttccatcacaacatattggttgcctgctaggaaaaggtggatccattatttcagagatgagaaagattacaggagctaacattcgaattttcgggaatgaacaaattccaagatgcgcacagcgaaatgatgagatggttcaggtcactggtagcttccaatccattcaggatgcattacttcatattactggaaggattagggatgtcatccttcccaagccacaccccagtggaggcatgcctccatatcctcctgttggaaacatcccagttcaccaatcaagacaagaacaacctcctccgcacctccatcccagtgggggtatgccaccataccctatgcatcctttcagacctgatgctcctatgggccactttgaaatgggtgatcatcggccacctcctgtacattcgatggaatatatgggtgctgatagaatgccatacttgtatggtgttgaacaaggaggtcctcgcccttttctagaacagccttcgccaagaacctgccctcctgaggcaccaaggacaaacagtgaagttcccagaaacatgtctgatgcagtgccagctacagatttcagaaagggaccagtggcaattgaaaaccaagtggctacaccaacaggcacaactgaagttatcattccttgcaattatataggctttgtctgtggaaacaatggcagtgaaattgaagaaatagagaagatgtcaggtgcttcaattacagttcatgatcctaaagctggcgacgcaaactcaaaagttgttatatgcggggatccccgaagaaacaaagaaggcacagagcctgattcatgccttcatattctgtggtctgtatcaaacataattgatgacttgatcactgtgcagtaccatcgtcgtttatgttcttgaatctagagtagttcccatgggcagatttcagcccttgattggatgtacatgtaccgtcgctaccggggtggatgtaggtagggctgatgcatgccttgtacaaacaacgccgatgtacatttctgtagtcctgtgttttagtttgggggaatggcaccatggaatgtgatgggttggctgcacggacctctgtggaatgtttaaccccatgccatcattggttttcatgatttcatctcttgtttgggaggcagccctgtgtgattgagattcgtaatttccag

SEQ ID NO: 22126 - DNA, 1750 bp, Zea Mays
caaagatgtcaattgtacttgggtggaaattagaccacctttcctcatcgcttaatgataagtgggagcttttctcaagtacggaaagcactgttagcagtttcaacctgcctccaagataatcctaggccagacacacataatattccgattggaagaccatttgggcttccaggtagtggtactggatgtccccctggcatggatcctcattctcaaagaagttatttaccaccacacatacctgattaccacacaaggaattatccaagtaatgctggcccccctggtcctagattcttttttgaacaagagatagtgttcaggatgataattctgaatgagatggtgggaagcataattggaaaaggtggttccactattcgggcattgcaaagtgaaactggtgcttgtataaagatcttagagccagttgctgattcagatgagcgtgttgttgcgataactgcacgtgagcgcaagatgcagttgttcgggtgtactctaggatctcagaggcatctattgatagaagttctcatacacctgcaaggcttctcgttccatcacaacatattggttgcctgctaggaaaaggtggatccattatttcagagatgagaaagattacaggagctaacattcgaattttcgggaatgaacaaattccaagatgcgcacagcgaaatgatgagatggttcaggtcactggtagcttccaatccattcaggatgcattacttcatattactggaaggattagggatgtcatccttcccaagccacaccccagtggaggcatgcctccatatcctcctgttggaaacatcccagttcaccaatcaagacaagaacaacctcctccgcacctccatcccagtgggggtatgccaccataccctatgcatcctttcagacctgatgctcctatgggccactttgaaatgggtgatcatcggccacctcctgtacattcgatggaatatatgggtgctgatagaatgccatacttgtatggtgttgaacaaggaggtcctcgcccttttctagaacagccttcgccaagaacctgccctcctgaggcaccaaggacaaacagtgaagttcccagaaacatgtctgatgcagtgccagctacagatttcagaaagggaccagtggcaattgaaaaccaagtggctacaccaacaggcacaactgaagttatcattccttgcaattatataggctttgtctgtggaaacaatggcagtgaaattgaagaaatagagaagatgtcaggtgcttcaattacagttcatgatcctaaagctggcgacgcaaactcaaaagttgttatatgcggggatccccgaagaaacaaagaaggcacagagcctgattcatgccttcatattctgtggtctgtatcaaacataattgatgacttgatcactgtgcagtaccatcgtcgtttatgttcttgaatctagagtagttcccatgggcagatttcagcccttgattggatgtacatgtaccgtcgctaccggggtggatgtaggtagggctgatgcatgccttgtacaaacaacgccgatgtacatttctgtagtcctgtgttttagtttgggggaatggcaccatggaatgtgatgggttggctgcacggacctctgtggaatgtttaaccccatgccatcattggttttcatgatttcatctcttgtttgggaggcagccctgtgtgattgagattcgtaatttccag

SEQ ID NO: 22127 - DNA, 1046 bp, Zea Mays
ccacacccaggttgcgtcgtggtccttgctcttatcctatcctgcctactgcctgcgtttatcttcttctctctttcccctctctggccctctctctcattttctcatcatacaagttgttgagttcctgtccctgttcttggacggacacatatccaatccacccgagatttgctcaatttactccagacacactggcaacgaccggaccgtcgaacctcgcgtctctggcgacatgtcgacggcggtggcggaggcgcggccgcgctacgggttccccggatccgggaaggggggcagcggcggcggcggcggcgggcatgggaaggaggcggacatggcggcggtcgggaagaggaggagcgacggcttcttcatagaggaggtggcggaggaagaggtgctgaccgatacctcctcggtcggggcgccgtcgccgtcgggctcgtcgatcggtgagaactcgtcgtcggaggccggcggtgacgacgtggacgaggaggtcgagagcaagctcaaggaagatgacgcgctggattgcttggacgcgctcgaggactccttgcccgtgaaggcctctcgagcttctactccggcaagtccaggtcgttcaccagcctcgccgagggggacgagggcgaggaggacgactccgactccgacgacgtggagtgcagccagctgccgccgccgcaccgcggaaagaacgtccgggacgcgcgggcactgccaccccttagactcggcggtgctgggatgcggcggaggaacgggccgaatggcggcctcgggagcttcagatccccgaggtccttctcgctgtccgatctccacagcagcgctgagggggagtagtgattagcagccgcagatctgcttccagctctggcctcctctcttggccaccaccagtagagatgtagtagtagccacttactatatggttccggtgtataagatccaagtctgttgtgttcatcctcctggcttccgtttctttgacctcacaagtcacaagaagtgcatcgactgacctaacaaatact

SEQ ID NO: 22128 - DNA, 3989 bp, Zea Mays
atggagccggacgacgaggcgctgaaggtggcgcgcggcccgccgcaccagcgccgcgggatctcctacagccagccactgacgcgggacgccgcgtccgcgcgccgcgccgcgctgcgcaagcacagcctcgacgacgagcacattctgcctgcctcccactccctcaactacccgctccaccacgatccctcgggcatggtgcccatggtctaccaccctccgctcccgccccaccagcaccaccccagcgcttcctactcctccaatacccgacgctcggccggcggcctcagcgagggctccatgacgctcgagcgcgccatgtcagagtacggcggtggccatggctccctcccggagttcgtcggcgcggggggcggcaagggcatcttccgtgtgccgcttcgcgccgccatgcacccgggccgtccgcccccgcttgaggtacggccccacccgctccgcgagacgcaggcgggctccttcctccgctcgctagccgccgagccgcagcgccgccagctctgggccggggccgagtccgggattagggtgtggtcgctcgacgaggttttcgccgagtggggcgccggcgcgcgccgcggcgacgaggagagtgcgcccttccgcgagggcatgcccgcgccgcccgcgctgtgcgtcgtcgtagacagggccaaccgcctgctgtggacagggcataaggacgggaggatccgatcgtggcgcatggacctcgacgcggccgccacggctcctgcgcccccggccgctggtgccggcgacggcggcgggagcgttggagggagtagtcacggcggggcaagcaataatgcgccagtgttcagggaagccctcacgtggcaggcctatggccggacgcccgtgctctccatggtcgtcacttcgtatggtgagatatggtcgggttccgagggtggaatgataaaggtgtggccttacgatgccattgccaagtccctgtcattgtcaccagaagagaaacatatggcggctttgttggttgagagagcctacatcgacctgaggaaccattgcacagttggtaatgtttgctcattgcccgcttctgatgttaagtacatgctagcggatcattcccgggcgaaagtttggaccgtgactagcatgacatttgcactctgggatgctcgtacaagggagttgctgaaagtatttgggatggatggccaagttgactcagcaaagctagagacacctgtcatgccagagcaacctatggaggaagagatcaatcctaatcctaaagcaaaaccttcgaagaaggacaagtcacaaggttctttgaacttcttccaaaaatctaggaatgctttaataggagcagccgatgcggtgcgcagggttgcaacaaaggggacatttgtcgaagataaccgcagaacaggagcggtggctcaagcaatggatggaacaatctggtcaggatgcacgaatggcgccattattctgtgggatggaaatgggaatagagtgcaagaattccatcatcatacttcttctgtgcagtgcataaaggcacttggagaaagggtgtgggtgggatatgccagtggcatgattcaagtcatggatgctgaaggtaactttattgcaggatggactggacatagctgtccagttataaggatggcaattggtggttcttacatttacacactggctcatcatggtggtattcggggatggccactaacttctccgggaccccttgacgatattatccgaactgaattgtctaacaaagagctgtcatacactagaatggagaagataaacataatggtagggagttggaatgtagcacaagggaaagcatctgctgagtcactaagatcatggttgggtagtgtagcatctgatgttgggttggttgttgttggattacaagaggttgagatgggtgcagggtttcttgccatttctgctgcaaaagaaacagtagggcttgagggcagcgcgaatgggcaatggtggatagacaatattggcaaagcgcttgatgagggaacatcattccaccgagttggttctaggcagttggctgcattgcttattgctgcatgggcaagaaagagcctaaaaccatatgttggagatgttgaagctgctgcagtgccgtgtggtcttggacgtgctattggcaataaggattgagaataagggtatatgatcgtaaaatgtgttttgtgagtaatcactttgctgcacatctggaagctgtgagcagacgcaatgctgactttgaccacatttatcggacaatggctttcaacaaacctcatggatcgacagcttctgctacatctgtccaattgcacagaacagtgaatgtcaatggaaatcaggttgaagaagtgaggcctgacctagcagaagctgatatgattgtatttcttggtgatttcaactaccgtctttatggtatcacatatgatgaagcaagggacatggtttcacaaagaagcttcgattggctaagagagaaggatcagcttcgagcagaaatgaaagctggaaaggtattccaaggaatgcgtgaaggtataatcaaatttcctccaacatacaaatttcaaaagcaccaaccaggtcttggaggttatgattcgggtgagaagaagcggatacctgcttggtgcgatagggtactatatcgtgatagccgttctgtatcagtagctgaatgctcgttagagtgccctgtagttgcttcaatcacatcgtatgtggcatgcatggatgtcacagagagtgaccataaacctgtgaggtgtacattcagtgttgatattgctagagttgacgagttaataagaaggcaagagtatggagaaataattgaatcgaatggaaaagtacgctctttgttccatgatgcttgttttgttccagacactacagttagcataagcgaaatcacactggaaaatcaagagaatattgtattccaaattacgaataaatgcgaaacaagcaaagcagctttcgagatcctatgtgacgggcagtcaaccaagaaggaggatggaactaaatcagagcttcttcctagggcatcctttggcttcccactttggctcgaggtccaaccagccgtcggtctgataaaaccaggtgaaacggtggaaattacactacatcatgaagatttttacacgcaggaagaattcgtagacggaataccacagaactggtggtgcgaagacaccagggacaaggaagctgttctcagaataaatataacaggcagcagctcaaccgaaaccaagacgcacaccatcaacgtccaacatcgctgcccaccatcatcggcgccaccgccgatgatgaaccaaccggtagccaccgtgcctccgagcaatgtccttgccagcgaggggcactcgaagcgctcctccaagaagagccagtccaagcaccgggaacagcaacaacagcagcaggattacccgcagtttgggagctcggaggtacatgacctgtgccgcatgcggtgcccttgagacctgtacaagctactcctacatcacttcaaaggagtatggatactgaagttgtgtctatgaggtgggaattacgagttttaggtttctcacatcgaatccaagtcccggagggccccgcagaagggagagagaagcctgggagaggagttgctccggctctgtacatatgcttcactcgatcagctgcctctcatgtagcccaagcaaagagtctagagtcctgagatgacagtgctaataacttgttgttttattcttgttccttgttaagggctgttgtctagatagttgaagccaaggatatttgaacaatgcttgatgtaatatgttccatagaattaccttaggtttgttctctcttcacgcagcagttctaatgatcttgtacttcttgactgttgccattcttaataagaaaccgtccagtcatttgat

SEQ ID NO: 22129 - DNA, 391 bp, Zea Mays
accaaccctagggttctcacggcgccataagagcctctcctctctccccggccgcccgctgccgctgcttgcgcctctctcgcccgcatcgccgcagggttcgcaaagatggcagtgccgctgctgacgcagaagatcgtgaagaagcgggtcaagcagttcaagaggccacacctcgaccgctacaagtgcctcaagccaagctggcgtaggcccaagggtatcgactcccgcgtcaggcggaagttcaagggatgcaccttgatgcccaacattggatacggctctgacaagaagacgaggcactaccttcccaacaagttcaagaagtttgtcgttcacaacgtctctgagctggagctgctgttgatgcacaacaggacgaccctat

SEQ ID NO: 22130 - DNA, 1445 bp, Zea Mays
accaaccctagggttctcacggcgccataagagcctctcctctctccccggccgcccgctgccgctgcttgcgcctctctcgcccgcatcgccgcagggttcgcaaagatggcagtgccgctgctgacgcagaagatcgtgaagaagcgggtcaagcagttcaagaggccacacctcgaccgctacaagtgcctcaagctggcgtaggcccaagggtatcgactcccgcgtcaggcggaagttcaagggatgcaccttgatgcccaacattggatacggctctgacaagaagacgaggcactaccttcccaacaagttcaagaagtttgtcgttcacaacgtctctgagctggagctgctgttgatgcacaacaggacatactgtgccgagattgcccacaacgtgtccacccggaagcgcaaggagatcgtcgaacgtgctgcgcaactggacatcgtggtcaccaacaagcttgccaggctccgcagccaggaggacgagtgaaatggccattatttccggttgtgatccgctggtgtgcaagatgttgctgagatccgagattcattctctgccatttttttatgcttatgttagacttttccaatggacaaaattctgttataagcggaagagtgatggcgaggaccatctagtttttgaccggacatcatgaagtatatgcagccttgtgcatgtaatggatctgatggtaatgaatctgtggctccgaagctacatgcatttttctgaggcgcaaatgttggcctgttcaaatgtagcctaatttattagttttcactaaccctagattctttctcttgatcaaaaagaaattctgtcctctcgagctccatcttagtgatcggtccgctagttcacgcaaattcgaagaagttatcacggacgagccacatgcagagaaacttgcacgtgtggttctggccgggctttccttcggtatctaataaccttgcagaatcggtatctaataaccttttctgctcgccgctggcgcatctctcctaactcttgcccttgcccatttattctggaataattttttaggagtactatttactttacttacaaacaatccagcgaaaattcagtttgggacgaatagaacagactatatcgagccaagagtattttcattactattgaaaatgatggataggtaaatccacaatcaatcatgtcctttaagtcgcatgttgctttctaccacatcgttttaaacgaagttttaccataacattcctctaatttcattgcaaaatggtatcaagaattgatccaatatggatggaatcatgaatagtcattgcttttgtatactaattcaaacctgttatctatggagaaaattggataaaagaaataagtatttatcggggaacactatgcaaagatacaatttatttaaacccatattctataa

SEQ ID NO: 22131 - DNA, 108 bp, Zea Mays
aaagtagtgttaataaacagcaaaagaaaaaaaaaacgattggaatctcgagctatgactgtgttattatgtaaccaaatgtaagtggaaccctcgcctcacctcaac

SEQ ID NO: 22132 - DNA, 612 bp, Zea Mays
caaacggtaggtagaaatggaattgcagtgtcttaccctctctgcaaggctgtggctgtcagtcgcctgcccccgccgcgcccggacatggacgtagtctttgggcggttcgactgccggcttcgagctcttccccttgcccttcttctgcgctttgacttcaaccaaggcgtcgctcgccgccgcctcctcctcctcttccttcggcttcaccggactgtcgctggcacccactactctgcacctcttcccgtccggacccttggcctccgcaacctgcaaaccaatatcgagaatggcggcaccggcacgtcaagaaccagcaagctaaattcaaagcacagtccactgcgcacagtcgtttcgtttccgcaccttgctcaagcaggcctccttgccaccggcggaccccgtgggcggcgccttgcgtttcctggcattgccgtagtccctagcgcgcgcccacgctgggtcggacaccgacgacccctccggagacccgccgccacaccctgcctccgcgggcaccccgaagaggcccccgccgccgccgccgcgtagcgtgtcgaggaacccggcgtccagcgcggcgaagctgagtgcaggggcgga

SEQ ID NO: 22133 - DNA, 1061 bp, Zea Mays
gcagccgagcaagcaagcccacttcaggcgagtccatgaggaccatgaccacgaggcggaccagcccaagcccatgaacgcgaaaacaaaccctagccacgaggtcggcagtcggctcctcgaccggacgacgtggctgcgaatctgcaggaggaggaagaggtgaaatggtgaaggccgcgacgtggctcctcgatcggctcctctacgtactcaagcaggacaagggcaacgacgccaacaccgcgcgtgaccgacggcgaaggaggcgtgctccggccggtggcgccgccaacgccgttggaaacgatgatggcgaggagcagcacctcaacacctttctcgacgctgcgaatgcgtcgtccgcctcctcaagggtgcagttcaggtgcgtgcttcgtttctcttgcagatgctttgctttttttctgtccgtgttggctcgtcctggtgggattgtgaccacgctgggttctgcggatctcggaacaggaatatggcgtcgcgcgcgcggtgggtggaggaagccggcgctgcggaggtggtggagaacaggggcaagctgtggctgaccaccggtgtcactcgggccggcaagctgtactacaacgttgaggagaccgggttcttggccgaaatgggtgccttgattcttctcaatgataaggatgagacgataggaattgaagatatctatgggaagcttgctggaggaaattatgggtgctcctgggataccttccaggcatataagcacttgaaatcacttggatatattgttggaagatttggtgttccctggacaatgaagcatggtggtactcatcacaccattgctccccagatcaatatacttgagactgatcagagcttaaatagagttgacggagcctccaatgacataaccaaattgctcaaggaaatacagattgacgggatatgtccatcttttgaagtttatctgccaaatagcaagttcaaaaagtcatccccagggtgccctagtttcctcttatgtctattaagttaaaaacggaccggaatcttttcctcgactagta

SEQ ID NO: 22134 - DNA, 1000 bp, Zea Mays
ctaccatcaaattatatgaaaaaaaattctgctaagagataaactgcaaagaataatgtcatgtaattcaagggtcacagcttatgaataaaacgaacatcataggaatcaaggggtaaaccgccctcaagggttgaattggaagcagtggaaaataatttcagaggcattcctctgaagtatgctcatgtggataatggacgggtcagctttctctcctttgatgaagttacactccccagcttgccctgatgggtagcagcagaacatgtgaagtgataaatagtgtgtttggtttgaggaatgaagtgatccatcttcttctcactcctcacttttttatttggtttgtggaatagaatgggttgatctatcatcactccatttctcataagctaataattagtatatacatgatgagtgggttgattccaccaaaattgatggaatgaacttatgatgcatcatctcatgaaacatagagtgactccataaaccaaacgcaccaaaagggtctgagcttcagaacaatcttgtcagaaatgataaagggtctcagcttcagaacagtgtcttgagatgcattcgccgcaagcgcagggggggcaaagtatttcagtactaacttttgaacatactaaagtatggaattccctggagtctcacaatccagcgatctgttgtacactccagattgtatgttggaaggagaaatcatgtctagtcttcttgttcgtctctgatgattttgtttctgaggctgcacctgtgactttcggatttccaactgcaacaaatgctactctcttcctagttcctagcctcaggcttcaggtgctcgcgagtactgagggtgtcaggcactgaacaaacaccgctttcactttctagttgcctccccgtctgagaatctccggcatcattgcagtagatcattttatctggttgctccgctagagcaacgtctggttggcgagttcgctccttttagacttttcat

SEQ ID NO: 22135 - DNA, 555 bp, Zea Mays
acgctgttatctacgctgtctgacaagtcatctggccactcccttactgaccaattaactcgcatggctgagaatgactatctacttagcggtggccttgaaggtattggttctactggaaagaagtgtgaagtcgctcgccgaagaaatggtttagataccaacaagcgaaagaaagcaaaaaaagatggtgggccaacaggaagagagttgaatatcggacaagcaagtttccattcagaaccgagcaacgcttcaaaccagttcatcccagaccaattgatgcagggacattatgtgcttgaccacaatttcgggccaggtagctcgcagaaccttcacgacaatctgaaccaattcgatcaggcttcctcggctcctaccttgcaacagcagccgtttaccgggaatggtcaactgacccagggatatcctggtgatatgcatgcgttgcagtttgtggagccaaccccccagattgaccatcagaatggcgatgagggtcagtcgtcaataccagtgtgggattttctttgagctgcctgcctctagcac

SEQ ID NO: 22136 - DNA, 1120 bp, Zea Mays
cgatttgtcacttagcaacacactaacaataccgggacagttagcattttaatccaccaaacacgaactaagctacacggcaccctagctctaacttaagcaaagggcatggcacacaattgtggagtaacaacactcctctttcacaattaaaacctagcacagaagaggagctccgattgtaccacaagtttggagcgttctaaattcagttccagtcatccgatctcttgaatccaggcataacccgaatccaataaagaagtttcacgctacaaatctggcatccggagagcacaaatccgggtcaagaagcagagccccccacggcgcgagctcgcaagcatacctggaggagattggcgattgtctcgacggtggccgtcttgttgatacccacctcgtagcagcgcacgatgaaactctccttgtaagagagcccgtcctccaggaggctccccagtcgcagccgctcggccaggctgggccgcgcgtcacccccttccgccttagccgccaccgccgtggcagctgcgtggtccggcgacgccgcctcgatcccggatacctgcggcgcaccccgcgtgcaccgcaccaccaccccgggtgcgggagacgactcccaccttccgtggtggcggagcggcgcgcggccgcattgcggtggcgcgtgacagcgcagcatgtgggagagcgggcgcgtcgtttcgaggaggctcgttgcccggccgccgccgcagccgacgacgacgacgatgcgcggttggagttttacacgggcggagcggactggggttggcggcttggcgcggcgggcaggcgggcactaccaagtcgatatgaagaggggccagggacggtagcgggcaggcgggcactgccaagtcgatatgaagaggggccagggacggtagcgggcggtggaccgggcgcacggggcgataggaacgaggacaggctgaacgacctgctggcggtggagagcaggatggaacggggaagtctctggacccgatgcatgcgccggtggtggtccacgactcgacgacggtggtgatggaaggagatggagatggaaatcaactcattttctctctaatcatcttcaattccgaagaaa

SEQ ID NO: 22137 - DNA, 3139 bp, Zea Mays
atggcggtgcggatccatggcgcccaccggagacctctcccttggcccttcaacactggatccctcggtatggcgccggagacggcgcccttcccaccttccccaccggatccggcgcccgctctatctcgaatgaaggcagtgatggagaccttcccaccttccccaccaggatgcgcgcacggaaacaagcaggtgaagggtttcatgtttgaaaaaccggttgatctgaaagtaggtgtgaaccatgtcgtattgttgtcatcaactatgggaatgaaggatagtggtggtgaacttgctgaagtaaagggcggcattcaggagtgcctaatccaaggtctcaacactgaaagcggtgttgatcagcttgttgaaatcatcaaggttctgggcacacccacacgtgaagaaattaagtgcatgaatccaaattataccgagtttaaattcccgcaaatcaaagctcacccgtggcataagatattccataaaaggatgcctgctgaagcagtagatcttgtgtccaggcttctgcagtactcaccaaaacttcgatcgactgctgcacacatctttgagttgcctgaagaaaagctatgcctctctttcctttccaacaataacacgggcgaagacggaacagtgatcttccgaggggataagcactatgtgcctagccgttctgtctccattatttggggttacctaggagggggtgaaccaaacacaaaaacatcagctcatgctcgtgtggtgatggctcagaagacgaaggaggcggagatcaccgagcaggattcgctgcttctaacaaggaatttgctccggattgccatatacaacatcagctacatcagaggcctattccatgagaagtacttcagtgataagtcggttccagcactagagatgaagattaagaagctgatgccaatggatgctgagtcaaggagactaattgattggatggagaaaggtgtctatgatgctttgcaaaagaaatatctcaagaccctcctcttctgtatctgcgagaaggaggagggcccaatgattgaggagtatgccttctcatttagctaccccaacaccagtaccgaggaagttgcgatgaacatgagccgtacggggagcaaaaagggcagtactacattcacttcaaatgcttcagaagtaactcctgatcagatgagaatgttcggaccaggagtgaaagcagattgaaacgggccaatgatttcctttgacacatttggcatcctatttaaggagatcacctttatgaaaataagcgaacagagccatgagatcgggttttaacgaggaccaaaaggtatgacaattttaatatgtgatgatcatatcctgacatatagttttcttttagaagctctgcttgtaagatgatcagaacgctggtttcacttatgagaaccttggacccaatgcctgaggagcgaaccattctaatgaagcttctatactatgatgatgtcacacccgaggattatgagcctcctttcttcaagtgttgtgctgataatgaggccataagtatatggaacaagaaccccttgaagatggaagtgggcaatgtcaatagcaagcaccttgtgttagctttgaaggtcaagagtgtccttgatccatgcgatgatgacaatgttaacagcgaaggtgatggcatgactgtggataatgagtctgatcatgatgatgacttttctgacactgaggttcatccaccaaaggcggatcattacatcatagctcctaatgaaggaaaagacaaagatcaggacactggtactatttcagaagatgatactcaagatactgctcatgaggaagagctaacttcccaagtgaaggagtggatatgctcaagggacagcggaacaattaatgtttcagatgtcctttctaacttccctgacatatcaatggaattggttgaagatataatggacaggctacttaaagatggtatactatccagggcaagcaaagatggttatacggttaaccagaaggctgatccaaaaacaccacatataaagaaggaggccatcatgccagatgtatcaccaactaatgtaaccaaacacaacaatggggatctgctatatatgaaggcattatatcatgcacttcccatggattatgtgacaatagccaaacttcaaggaaagctggatggggaagccagccaaaatacagtccgaaagttgattgacaagatggtgcaagatggatatgtgaagaattcagccaaccgaagactgggcaaagctgtcattcattctgaatctaccaacaaaaggctccttgagataaaaaagatactggaagtcaatgaaggcgaaaagatggccattgacaccaatacagagcatcctgagcctgagcacaaagaccttctgagagtctatgaagtgggagatggctccactatgggttgcctccactcaattggatctgatcttactcgtactcgggagctgccagagctgcaacagaatgtgtccatgcagagcgggcaagaagcttccacagtgggtaaggattccagcaggactccaacaagtgtgcgtgagctggctgtacctgtttgttccctggaaagtggagtgcttggaaagagaatcaaaaggtctctaactggtggaaatgagatgcagtctacccaggacaagcgatccaggaaggctagcatggtgaaggaagcaatactccaacatgtcaagtgccaaaaccctcaggctcagtgaggtggggtgacaggagtagctaaccatagttcaggtccttgtgcaggcagacaaataaacaagtacaacagtcaccgcagaagtagcttccactccctatgttttgcaaggtagagagttccacaatgtagattgcagtcccaatgttttgcaaggtagtaaaagttatacgcatctgttagcctatcgatctggtgatgaacattttcttctacaaagtcaaaagatgttttattgacacggaaattggacatataaagcttctgttgaatgcatgatagttcaatagattatggataatatattccacttattttctactttcatattgctactgttatctacaaaacctacgcaggtttatg

SEQ ID NO: 22138 - DNA, 2342 bp, Zea Mays
caaccggcaaccccactctttacaaagtagggtaccctacaaagtatcaccaaatcccacaccattgccagtttggcaccctcctcaccccactacctcttcttcctccgcacagcgcacaagccgcggaagcagcgcagacccggcaaaatagtgatggctcagaagacgaaggaggcggagatcaccgagcaggattcgctgcttctaacaaggaatttgctccggattgccatatacaacatcagctacatcagaggcctattccatgagaagtacttcagtgataagtcggttccagcactagagatgaagattaagaagctgatgccaatggatgctgagtcaaggagactaattgattggatggagaaaggtgtctatgatgctttgcaaaagaaatatctcaagaccctcctcttctgtatctgcgagaaggaggagggcccaatgattgaggagtatgccttctcatttagctaccccaacaccagtaccgaggaagttgcgatgaacatgagccgtacggggagcaaaaagggcagtactacattcacttcaaatgcttcagaagtaactcctgatcagatgagaagctctgcttgtaagatgatcagaacgctggtttcacttatgagaaccttggacccaatgcctgaggagcgaaccattctaatgaagcttctatactatgatgatgtcacacccgaggattatgagcctcctttcttcaagtgttgtgctgataatgaggccataagtatatggaacaagaaccccttgaagatggaagtgggcaatgtcaatagcaagcaccttgtgttagctttgaaggtcaagagtgtccttgatccatgcgatgatgacaatgttaacagcgaaggtgatggcatgactgtggataatgagtctgatcatgatgatgacttttctgacactgaggttcatccaccaaaggcggatcattacatcatagctcctaatgaaggaaaagacaaagatcaggacactggtactatttcagaagatgatactcaagatactgctcatgaggaagagctaacttcccaagtgaaggagtggatatgctcaagggacagcggaacaattaatgtttcagatgtcctttctaacttccctgacatatcaatggaattggttgaagatataatggacaggctacttaaagatggtatactatccagggcaagcaaagatggttatacggttaaccagaaggctgatccaaaaacaccacatataaagaaggaggccatcatgccagatgtatcaccaactaatgtaaccaaacacaacaatggggatctgctatatatgaaggcattatatcatgcacttcccatggattatgtgacaatagccaaacttcaaggaaagctggatggggaagccagccaaaatacagtccgaaagttgattgacaagatggtgcaagatggatatgtgaagaattcagccaaccgaagactgggcaaagctgtcattcattctgaatctaccaacaaaaggctccttgagataaaaaagatactggaagtcaatgaaggcgaaaagatggccattgacaccaatacagagcatcctgagcctgagcacaaagaccttctgagagtctatgaagtgggagatggctccactatgggttgcctccactcaattggatctgatcttactcgtactcgggagctgccagagctgcaacagaatgtgtccatgcagagcgggcaagaagcttccacagtgggtaaggattccagcaggactccaacaagtgtgcgtgagctggctgtacctgtttgttccctggaaagtggagtgcttggaaagagaatcaaaaggtctctaactggtggaaatgagatgcagtctacccaggacaagcgatccaggaaggctagcatggtgaaggaagcaatactccaacatgtcaagtgccaaaaccctcaggctcagtgaggtggggtgacaggagtagctaaccatagttcaggtccttgtgcaggcagacaaataaacaagtacaacagtcaccgcagaagtagcttccactccctatgttttgcaaggtagagagttccacaatgtagattgcagtcccaatgttttgcaaggtagtaaaagttatacgcatctgttagcctatcgatctggtgatgaacattttcttctacaaagtcaaaagatgttttattgacacggaaattggacatataaagcttctgttgaatgcatgatagttcaatagattatggataatatattccacttattttctactttcatattgctactgttatctacaaaacctacgcaggtttatg

SEQ ID NO: 22139 - DNA, 2337 bp, Zea Mays
ctttacaaagtagggtaccctacaaagtatcaccaaatcccacaccattgccagtttggcaccctcctcaccccactacctcttcttcctccgcacagcgcacaagccgcggaagcagcgcagacccggcaaaatagtgatggctcagaagacgaaggaggcggagatcaccgagcaggattcgctgcttctaacaaggaatttgctccggattgccatatacaacatcagctacatcagaggcctattccatgagaagtacttcagtgataagtcggttccagcactagagatgaagattaagaagctgatgccaatggatgctgagtcaaggagactaattgattggatggagaaaggtgtctatgatgctttgcaaaagaaatatctcaagaccctcctcttctgtatctgcgagaaggaggagggcccaatgattgaggagtatgccttctcatttagctaccccaacaccagtaccgaggaagttgcgatgaacatgagccgtacggggagcaaaaagggcagtactacattcacttcaaatgcttcagaagtaactcctgatcagatgagaagctctgcttgtaagatgatcagaacgctggtttcacttatgagaaccttggacccaatgcctgaggagcgaaccattctaatgaagcttctatactatgatgatgtcacacccgaggattatgagcctcctttcttcaagtgttgtgctgataatgaggccataagtatatggaacaagaaccccttgaagatggaagtgggcaatgtcaatagcaagcaccttgtgttagctttgaaggtcaagagtgtccttgatccatgcgatgatgacaatgttaacagcgaaggtgatggcatgactgtggataatgagtctgatcatgatgatgacttttctgacactgaggttcatccaccaaaggcggatcattacatcatagctcctaatgaaggaaaagacaaagatcaggacactggtactatttcagaagatgatactcaagatactgctcatgaggaagagctaacttcccaagtgaaggagtggatatgctcaagggacagcggaacaattaatgtttcagatgtcctttctaacttccctgacatatcaatggaattggttgaagatataatggacaggctacttaaagatggtatactatccagggcaagcaaagatggttatacggttaaccagaaggctgatccaaaaacaccacatataaagaaggaggccatcatgccagatgtatcaccaactaatgtaaccaaacacaacaatggggatctgctatatatgaaggcattatatcatgcacttcccatggattatgtgacaatagccaaacttcaaggaaagctggatggggaagccagccaaaatacagtccgaaagttgattgacaagatggtgcaagatggatatgtgaagaattcagccaaccgaagactgggcaaagctgtcattcattctgaatctaccaacaaaaggctccttgagataaaaaagatactggaagtcaatgaaggcgaaaagatggtaacatatcatgccattgacaccaatacagagcatcctgagcctgagcacaaagaccttctgagagtctatgaagtgggagatggctccactatgggttgcctccactcaattggatctgatcttactcgtactcgggagctgccagagctgcaacagaatgtgtccatgcagagcgggcaagaagcttccacagtgggtaaggattccagcaggactccaacaagtgtgcgtgagctggctgtacctgtttgttccctggaaagtggagtgcttggaaagagaatcaaaaggtctctaactggtggaaatgagatgcagtctacccaggacaagcgatccaggaaggctagcatggtgaaggaagcaatactccaacatgtcaagtgccaaaaccctcaggctcagtgaggtggggtgacaggagtagctaaccatagttcaggtccttgtgcaggcagacaaataaacaagtacaacagtcaccgcagaagtagcttccactccctatgttttgcaaggtagagagttccacaatgtagattgcagtcccaatgttttgcaaggtagtaaaagttatacgcatctgttagcctatcgatctggtgatgaacattttcttctacaaagtcaaaagatgttttattgacacggaaattggacatataaagcttctgttgaatgcatgatagttcaatagattatggataatatattccacttattttctactttcatattgctactgttatctacaaaacctacgcaggtttatg

SEQ ID NO: 22140 - DNA, 2406 bp, Zea Mays
ctacaaagtatcaccaaatcccacaccattgccagtttggcaccctcctcaccccactacctcttcttcctccgcacagcgcacaagccgcggaagcagcgcagacccggcaaaatagtgatggctcagaagacgaaggaggcggagatcaccgagcaggattcgctgcttctaacaaggaatttgctccggattgccatatacaacatcagctacatcagaggcctattccatgagaagtacttcagtgataagtcggttccagcactagagatgaagattaagaagctgatgccaatggatgctgagtcaaggagactaattgattggatggagaaaggtgtctatgatgctttgcaaaagaaatatctcaagaccctcctcttctgtatctgcgagaaggaggagggcccaatgattgaggagtatgccttctcatttagctaccccaacaccagtaccgaggaagttgcgatgaacatgagccgtacggggagcaaaaagggcagtactacattcacttcaaatgcttcagaagtaactcctgatcagatgagaagctctgcttgtaagatgatcagaacgctggtttcacttatgagaaccttggacccaatgcctgaggagcgaaccattctaatgaagcttctatactatgatgatgtcacacccgaggattatgagcctcctttcttcaagtgttgtgctgataatgaggccataagtatatggaacaagaaccccttgaagatggaagtgggcaatgtcaatagcaagcaccttgtgttagctttgaagagtgtccttgatccatgcgatgatgacaatgttaacagcgaaggtgatggcatgactgtggataatgagtctgatcatgatgatgacttttctgacactgaggttcatccaccaaaggcggatcattacatcatagctcctaatgaaggaaaagacaaagatcaggacactggtactatttcagaagatgatactcaagatactgctcatgaggaagagctaacttcccaagtgaaggagtggatatgctcaagggacagcggaacaattaatgtttcagatgtcctttctaacttccctgacatatcaatggaattggttgaaggtaatgcaggaaagggttctgtttgctggaatcagcccttcttttctcgctcctgttgaagtcttaaattagtagccgatggttggtttttcagatataatggacaggctacttaaagatggtatactatccagggcaagcaaagatggttatacggttaaccagaaggctgatccaaaaacaccacatataaagaaggaggccatcatgccagatgtatcaccaactaatgtaaccaaacacaacaatggggatctgctatatatgaaggcattatatcatgcacttcccatggattatgtgacaatagccaaacttcaaggaaagctggatggggaagccagccaaaatacagtccgaaagttgattgacaagatggtgcaagatggatatgtgaagaattcagccaaccgaagactgggcaaagctgtcattcattctgaatctaccaacaaaaggctccttgagataaaaaagatactggaagtcaatgaaggcgaaaagatggtaacatatcatgccattgacaccaatacagagcatcctgagcctgagcacaaagaccttctgagagtctatgaagtgggagatggctccactatgggttgcctccactcaattggatctgatcttactcgtactcgggagctgccagagctgcaacagaatgtgtccatgcagagcgggcaagaagcttccacagtgggtaaggattccagcaggactccaacaagtgtgcgtgagctggctgtacctgtttgttccctggaaagtggagtgcttggaaagagaatcaaaaggtctctaactggtggaaatgagatgcagtctacccaggacaagcgatccaggaaggctagcatggtgaaggaagcaatactccaacatgtcaagtgccaaaaccctcaggctcagtgaggtggggtgacaggagtagctaaccatagttcaggtccttgtgcaggcagacaaataaacaagtacaacagtcaccgcagaagtagcttccactccctatgttttgcaaggtagagagttccacaatgtagattgcagtcccaatgttttgcaaggtagtaaaagttatacgcatctgttagcctatcgatctggtgatgaacattttcttctacaaagtcaaaagatgttttattgacacggaaattggacatataaagcttctgttgaatgcatgatagttcaatagattatggataatatattccacttattttctactttcatattgctactgttatctacaaaacctacgcaggtttatg

SEQ ID NO: 22141 - DNA, 2307 bp, Zea Mays
ctacaaagtatcaccaaatcccacaccattgccagtttggcaccctcctcaccccactacctcttcttcctccgcacagcgcacaagccgcggaagcagcgcagacccggcaaaatagtgatggctcagaagacgaaggaggcggagatcaccgagcaggattcgctgcttctaacaaggaatttgctccggattgccatatacaacatcagctacatcagaggcctattccatgagaagtacttcagtgataagtcggttccagcactagagatgaagattaagaagctgatgccaatggatgctgagtcaaggagactaattgattggatggagaaaggtgtctatgatgctttgcaaaagaaatatctcaagaccctcctcttctgtatctgcgagaaggaggagggcccaatgattgaggagtatgccttctcatttagctaccccaacaccagtaccgaggaagttgcgatgaacatgagccgtacggggagcaaaaagggcagtactacattcacttcaaatgcttcagaagtaactcctgatcagatgagaagctctgcttgtaagatgatcagaacgctggtttcacttatgagaaccttggacccaatgcctgaggagcgaaccattctaatgaagcttctatactatgatgatgtcacacccgaggattatgagcctcctttcttcaagtgttgtgctgataatgaggccataagtatatggaacaagaaccccttgaagatggaagtgggcaatgtcaatagcaagcaccttgtgttagctttgaaggtcaagagtgtccttgatccatgcgatgatgacaatgttaacagcgaaggtgatggcatgactgtggataatgagtctgatcatgatgatgacttttctgacactgaggttcatccaccaaaggcggatcattacatcatagctcctaatggaaggaaaagacaaagatcaggacactggtactatttcagaagatgatactcaagatactgctcatgaggaagagctaacttcccaagtgaaggagtggatatgctcaagggacagcggaacaattaatgtttcagatgtcctttctaacttccctgacatatcaatggaattggttgaagatataatggacaggctacttaaagatggtatactatccagggcaagcaaagatggttatacggttaaccagaaggctgatccaaaaacaccacatataaagaaggaggccatcatgccagatgtatcaccaactaatgtaaccaaacacaacaatggggatctgctatatatgaaggcattatatcatgcacttcccatggattatgtgacaatagccaaacttcaaggaaagctggatggggaagccagccaaaatacagtccgaaagttgattgacaagatggtgcaagatggatatgtgaagaattcagccaaccgaagactgggcaaagctgtcattcattctgaatctaccaacaaaaggctccttgagataaaaaagatactggaagtcaatgaaggcgaaaagatggccattgacaccaatacagagcatcctgagcctgagcacaaagaccttctgagagtctatgaagtgggagatggctccactatgggttgcctccactcaattggatctgatcttactcgtactcgggagctgccagagctgcaacagaatgtgtccatgcagagcgggcaagaagcttccacagtgggtaaggattccagcaggactccaacaagtgtgcgtgagctggctgtacctgtttgttccctggaaagtggagtgcttggaaagagaatcaaaaggtctctaactggtggaaatgagatgcagtctacccaggacaagcgatccaggaaggctagcatggtgaaggaagcaatactccaacatgtcaagtgccaaaaccctcaggctcagtgaggtggggtgacaggagtagctaaccatagttcaggtccttgtgcaggcagacaaataaacaagtacaacagtcaccgcagaagtagcttccactccctatgttttgcaaggtagagagttccacaatgtagattgcagtcccaatgttttgcaaggtagtaaaagttatacgcatctgttagcctatcgatctggtgatgaacattttcttctacaaagtcaaaagatgttttattgacacggaaattggacatataaagcttctgttgaatgcatgatagttcaatagattatggataatatattccacttattttctactttcatattgctactgttatctacaaaacctacgcaggtttatg

SEQ ID NO: 22142 - DNA, 2009 bp, Zea Mays
ctcgatccacgtccgcactctccatggaagacgaatcaaacgccccggatcgccgcaatccctgctctctcccccagaatcccatccgcgtccgcgctctccatggcgagtcctccgcctggatcgccgcaatccctgctctctccccagaatcccatccgcgctctccatggaaggcgaggagtccgccccggatcgctgcaccggctctcgatccgtccgcgctctccagggaaggggagtcctcctcccctcccccccaataaccttgccccatatctcccttgccaccaaccagcctcgccccaccatcggcaacacccaccccttcaatcggcccaaatctagaaagcaataaccttccatggagatcacgggtgagaagtttccatcgacgacatcatcgactacaaagcatgcaatgtaacaatgccatttaccatatggcaagcagtgagcacctgaagggtgtgaaggatttcctgtggaagcacgggggacggatggatcaggtggtctcgcttaggatttcagaggatgtgcttgccaagtgggagaaaggccctgaatgcttgagcacaggaacgaagaaggggactgaagagctgattggaccatctctgaagcagataaaagcaatggggcatatggctctattagtacagcgtgtcatggagcttccagttctggaagtgcttcacattctgctccatatggaactgtcggcctgcccatcacaccttggggatcggccgaaacacataagctgcagggtgcactgtctacaaactggtttcacagcagtggtactgaaacaaaaggccatcagtctactgtctttgtgaatggcgcaagccaatcactttcttgttctgatcatatgttacctttgcgggttcaacaaagtcacactggaggaaatttgagcaatggctcaaaagcaaatgtgcatacgggtgctcctcctccctggttaaaagctaacgaacacgatccaaagaatttgtcactcaaaagctgtggtctttcttcccggaaagggaaattgaggaaactcaatccaaacagggttggtgctgcatgggcagaaagaagaagagctgagatggaaatggagaagcaaggtgaaattgttccagcaacatctgattctagttggctgcctaattttggtagtgtctggcaatctggcacaaggaaggaatcaaggaaagaatttgagaaaagccacaagattcatgacacgaagagcgaccatgacttatccttggagataaaaccatatatcagcaaacggatgcgtgtaggtgctgagaaagcttctgacaaagctgaagagcttggcagccacctaccgcagtaaacagatgtacaacccggtggatgtcgtcgcgtgggcgtctctgcggaaaaagccgccagggcgcgcggcttgattagcgattggtttggtttccatgtcaggtcgcgcctgggaagcccgccgcgagtacggaatgccaagccagtagtagtttttgttctcggcacgaagccatttgatgttcgttttgtgcgacggtttgcggcttgatcgcgattggcctcgtagcctttttgaccgaacgagagaagcagcagctctgcaaagctacctccaggttcattcgagacggtaggctgggagggatagcgtcattgcggccaatggttttcggttcttttccacttgtgcacgacgtcataaacccgagaaaatgtttacagcctcacagggcacctctcagagaaccagagactccggttccttgggggtaaaaccgtaaaatggccgccgcttgtcttgttgcttgtagtgtgttgttgttgctttgcgccattgccactgcctgtagcacgcacaaggcgcgcgcagcgagtcactagtcagcgtgcgaggacccgcgctacaggaaagcaatcaggaaaccttttttccctggaaaaaaaaagaggaccagaaaaggtgggatcgaatttatcaaccatgg

SEQ ID NO: 22143 - DNA, 1599 bp, Zea Mays
agaagtttccatcgacgacatcatcgactacaaagcatgcaatgtgagcacctgaagggtgtgaaggatttcctgtggaagcacgggggacggatggatcaggtggtctcgcttaggatttcagaggatgtgcttgccaagtgggagaaaggccctgaatgcttgagcacaggaacgaagaaggggactgaagagctgattggaccatctctgaagcagataaaagcaatggggcatatggctctattagtacagcgtgtcatggagcttccagttctggaagtgcttcacattctgctccatatggaactgtcggcctgcccatcacaccttggggatcggccgaaacacataagctgcagggtgcactgtctacaaactggtttcacagcagtggtactgaaacaaaaggccatcagtctactgtctttgtgaatggcgcaagccaatcactttcttgttctgatcatatgttacctttgcgggttcaacaaagtcacactggaggaaatttgagcaatggctcaaaagcaaatgtgcatacgggtgctcctcctccctggttaaaagctaacgaacacgatccaaagaatttgtcactcaaaagctgtggtctttcttcccggaaagggaaattgaggaaactcaatccaaacagggttggtgctgcatgggcagaaagaagaagagctgagatggaaatggagaagcaaggtgaaattgttccagcaacatctgattctagttggctgcctaattttggtagtgtctggcaatctggcacaaggaaggaatcaaggaaagaatttgagaaaagccacaagattcatgacacgaagagcgaccatgacttatccttggagataaaaccatatatcagcaaacggatgcgtgtaggtgctgagaaagcttctgacaaagctgaagagcttggcagccacctaccgcagtaaacagatgtacaacccggtggatgtcgtcgcgtgggcgtctctgcggaaaaagccgccagggcgcgcggcttgattagcgattggtttggtttccatgtcaggtcgcgcctgggaagcccgccgcgagtacggaatgccaagccagtagtagtttttgttctcggcacgaagccatttgatgttcgttttgtgcgacggtttgcggcttgatcgcgattggcctcgtagcctttttgaccgaacgagagaagcagcagctctgcaaagctacctccaggttcattcgagacggtaggctgggagggatagcgtcattgcggccaatggttttcggttcttttccacttgtgcacgacgtcataaacccgagaaaatgtttacagcctcacagggcacctctcagagaaccagagactccggttccttgggggtaaaaccgtaaaatggccgccgcttgtcttgttgcttgtagtgtgttgttgttgctttgcgccattgccactgcctgtagcacgcacaaggcgcgcgcagcgagtcactagtcagcgtgcgaggacccgcgctacaggaaagcaatcaggaaaccttttttccctggaaaaaaaaagaggaccagaaaaggtgggatcgaatttatcaaccatgg

SEQ ID NO: 22144 - DNA, 1987 bp, Zea Mays
cccaatcgttcacacgcgcaaacgccgggagccaccgcgatgtcgcccaagccggcgaagccgacacccgccaccgagttcgagtactgcgagctgtgccgccatcaccacgaccatggccggcgccatcgctacatcgtcaagcacaggagaaatctcgacgccgcgctcacctgcttccgctccaagctctccgacctccgccgcgccttcctccccggctccccctcttcccagccgccgcggacccgtctctggtgccccttctgctccattgacctcgtcgacctcgacagccgctccgctggtaacaatgccatttaccatatggcaagcagtgagcacctgaagggtgtgaaggatttcctgtggaagcacgggggacggatggatcaggtggtctcgcttaggatttcagaggatgtgcttgccaagtgggagaaaggccctgaatgcttgagcacaggaacgaagaaggggactgaagagctgattggaccatctctgaagcagataaaagatatccaaaatgaatatgcatgtgacagtttggatagttttgcacaaaacaatatcccatcttttagtaacactgcatcatatgttgttatgcctttacaaaattctaccaatggggcatatggctctattagtacagcgtgtcatggagcttccagttctggaagtgcttcacattctgctccatatggaactgtcggcctgcccatcacaccttggggatcggccgaaacacataagctgcagggtgcactgtctacaaactggtttcacagcagtggccatcagtctactgtctttgtgaatggcgcaagccaatcactttcttgttctgatcatatgttacctttgcgggttcaacaaagtcacactggaggaaatttgagcaatggctcaaaagcaaatgtgcatacgggtgctcctcctccctggttaaaagctaacgaacacgatccaaagaatttgtcactcaaaagctgtggtctttcttcccggaaagggaaattgaggaaactcaatccaaacagggttggtgctgcatgggcagaaagaagaagagctgagatggaaatggagaagcaaggtgaaattgttccagcaacatctgattctagttggctgcctaattttggtagtgtctggcaatctggcacaaggaaggaatcaaggaaagaatttgagaaaagccacaagattcatgacacgaagagcgaccatgacttatccttggagataaaaccatatatcagcaaacggatgcgtgtaggtgctgagaaagcttctgacaaagctgaagagcttggcagccacctaccgcagtaaacagatgtacaacccggtggatgtcgtcgcgtgggcgtctctgcggaaaaagccgccagggcgcgcggcttgattagcgattggtttggtttccatgtcaggtcgcgcctgggaagcccgccgcgagtacggaatgccaagccagtagtagtttttgttctcggcacgaagccatttgatgttcgttttgtgcgacggtttgcggcttgatcgcgattggcctcgtagcctttttgaccgaacgagagaagcagcagctctgcaaagctacctccaggttcattcgagacggtaggctgggagggatagcgtcattgcggccaatggttttcggttcttttccacttgtgcacgacgtcataaacccgagaaaatgtttacagcctcacagggcacctctcagagaaccagagactccggttccttgggggtaaaaccgtaaaatggccgccgcttgtcttgttgcttgtagtgtgttgttgttgctttgcgccattgccactgcctgtagcacgcacaaggcgcgcgcagcgagtcactagtcagcgtgcgaggacccgcgctacaggaaagcaatcaggaaaccttttttccctggaaaaaaaaagaggaccagaaaaggtgggatcgaatttatcaaccatgg

SEQ ID NO: 22145 - DNA, 1881 bp, Zea Mays
atcgttcacacgcgcaaacgccgggagccaccgcgatgtcgcccaagccggcgaagccgacacccgccaccgagttcgagtactgcgagctgtgccgccatcaccacgaccatggccggcgccatcgctacatcgtcaagcacaggagaaatctcgacgccgcgctcacctgcttccgctccaagctctccgacctccgccgcgccttcctccccggctccccctcttcccagccgccgcggacccgtctctggtgccccttctgctccattgacctcgtcgacctcgacagccgctccgctggtaacaatgccatttaccatatggcaagcagtgagcacctgaagggtgtgaaggatttcctgtggaagcacgggggacggatggatcaggtggtctcgcttaggatttcagaggatgtgcttgccaagtgggagaaaggccctgaatgcttgagcacaggaacgaagaaggggactgaagagctgattggaccatctctgaagcagataaaagcaatggggcatatggctctattagtacagcgtgtcatggagcttccagttctggaagtgcttcacattctgctccatatggaactgtcggcctgcccatcacaccttggggatcggccgaaacacataagctgcagggtgcactgtctacaaactggtttcacagcagtggtactgaaacaaaagtctactgtctttgtgaatggcgcaagccaatcactttcttgttctgatcatatgttacctttgcgggttcaacaaagtcacactggaggaaatttgagcaatggctcaaaagcaaatgtgcatacgggtgctcctcctccctggttaaaagctaacgaacacgatccaaagaatttgtcactcaaaagctgtggtctttcttcccggaaagggaaattgaggaaactcaatccaaacagggttggtgctgcatgggcagaaagaagaagagctgagatggaaatggagaagcaaggtgaaattgttccagcaacatctgattctagttggctgcctaattttggtagtgtctggcaatctggcacaaggaaggaatcaaggaaagaatttgagaaaagccacaagattcatgacacgaagagcgaccatgacttatccttggagataaaaccatatatcagcaaacggatgcgtgtaggtgctgagaaagcttctgacaaagctgaagagcttggcagccacctaccgcagtaaacagatgtacaacccggtggatgtcgtcgcgtgggcgtctctgcggaaaaagccgccagggcgcgcggcttgattagcgattggtttggtttccatgtcaggtcgcgcctgggaagcccgccgcgagtacggaatgccaagccagtagtagtttttgttctcggcacgaagccatttgatgttcgttttgtgcgacggtttgcggcttgatcgcgattggcctcgtagcctttttgaccgaacgagagaagcagcagctctgcaaagctacctccaggttcattcgagacggtaggctgggagggatagcgtcattgcggccaatggttttcggttcttttccacttgtgcacgacgtcataaacccgagaaaatgtttacagcctcacagggcacctctcagagaaccagagactccggttccttgggggtaaaaccgtaaaatggccgccgcttgtcttgttgcttgtagtgtgttgttgttgctttgcgccattgccactgcctgtagcacgcacaaggcgcgcgcagcgagtcactagtcagcgtgcgaggacccgcgctacaggaaagcaatcaggaaaccttttttccctggaaaaaaaaagaggaccagaaaaggtgggatcgaatttatcaaccatgg

SEQ ID NO: 22146 - DNA, 1968 bp, Zea Mays
atcgttcacacgcgcaaacgccgggagccaccgcgatgtcgcccaagccggcgaagccgacacccgccaccgagttcgagtactgcgagctgtgccgccatcaccacgaccatggccggcgccatcgctacatcgtcaagcacaggagaaatctcgacgccgcgctcacctgcttccgctccaagctctccgacctccgccgcgccttcctccccggctccccctcttcccagccgccgcggacccgtctctggtgccccttctgctccattgacctcgtcgacctcgacagccgctccgctggtgagcacctgaagggtgtgaaggatttcctgtggaagcacgggggacggatggatcaggtggtctcgcttaggatttcagaggatgtgcttgccaagtgggagaaaggccctgaatgcttgagcacaggaacgaagaaggggactgaagagctgattggaccatctctgaagcagataaaagatatccaaaatgaatatgcatgtgacagtttggatagttttgcacaaaacaatatcccatcttttagtaacactgcatcatatgttgttatgcctttacaaaattctaccaatggggcatatggctctattagtacagcgtgtcatggagcttccagttctggaagtgcttcacattctgctccatatggaactgtcggcctgcccatcacaccttggggatcggccgaaacacataagctgcagggtgcactgtctacaaactggtttcacagcagtggtactgaaacaaaaggccatcagtctactgtctttgtgaatggcgcaagccaatcactttcttgttctgatcatatgttacctttgcgggttcaacaaagtcacactggaggaaatttgagcaatggctcaaaagcaaatgtgcatacgggtgctcctcctccctggttaaaagctaacgaacacgatccaaagaatttgtcactcaaaagctgtggtctttcttcccggaaagggaaattgaggaaactcaatccaaacagggttggtgctgcatgggcagaaagaagaagagctgagatggaaatggagaagcaaggtgaaattgttccagcaacatctgattctagttggctgcctaattttggtagtgtctggcaatctggcacaaggaaggaatcaaggaaagaatttgagaaaagccacaagattcatgacacgaagagcgaccatgacttatccttggagataaaaccatatatcagcaaacggatgcgtgtaggtgctgagaaagcttctgacaaagctgaagagcttggcagccacctaccgcagtaaacagatgtacaacccggtggatgtcgtcgcgtgggcgtctctgcggaaaaagccgccagggcgcgcggcttgattagcgattggtttggtttccatgtcaggtcgcgcctgggaagcccgccgcgagtacggaatgccaagccagtagtagtttttgttctcggcacgaagccatttgatgttcgttttgtgcgacggtttgcggcttgatcgcgattggcctcgtagcctttttgaccgaacgagagaagcagcagctctgcaaagctacctccaggttcattcgagacggtaggctgggagggatagcgtcattgcggccaatggttttcggttcttttccacttgtgcacgacgtcataaacccgagaaaatgtttacagcctcacagggcacctctcagagaaccagagactccggttccttgggggtaaaaccgtaaaatggccgccgcttgtcttgttgcttgtagtgtgttgttgttgctttgcgccattgccactgcctgtagcacgcacaaggcgcgcgcagcgagtcactagtcagcgtgcgaggacccgcgctacaggaaagcaatcaggaaaccttttttccctggaaaaaaaaagaggaccagaaaaggtgggatcgaatttatcaaccatgg

SEQ ID NO: 22147 - DNA, 2004 bp, Zea Mays
atcgttcacacgcgcaaacgccgggagccaccgcgatgtcgcccaagccggcgaagccgacacccgccaccgagttcgagtactgcgagctgtgccgccatcaccacgaccatggccggcgccatcgctacatcgtcaagcacaggagaaatctcgacgccgcgctcacctgcttccgctccaagctctccgacctccgccgcgccttcctccccggctccccctcttcccagccgccgcggacccgtctctggtgccccttctgctccattgacctcgtcgacctcgacagccgctccgctggtaacaatgccatttaccatatggcaagcagtgagcacctgaagggtgtgaaggatttcctgtggaagcacgggggacggatggatcaggtggtctcgcttaggatttcagaggatgtgcttgccaagtttcagtgggagaaaggccctgaatgcttgagcacaggaacgaagaaggggactgaagagctgattggaccatctctgaagcagataaaagatatccaaaatgaatatgcatgtgacagtttggatagttttgcacaaaacaatatcccatcttttagtaacactgcatcatatgttgttatgcctttacaaaattctaccaatggggcatatggctctattagtacagcgtgtcatggagcttccagttctggaagtgcttcacattctgctccatatggaactgtcggcctgcccatcacaccttggggatcggccgaaacacataagctgcagggtgcactgtctacaaactggtttcacagcagtggtactgaaacaaaaggccatcagtctactgtctttgtgaatggcgcaagccaatcactttcttgttctgatcatatgttacctttgcgggttcaacaaagtcacactggaggaaatttgagcaatggctcaaaagcaaatgtgcatacgggtgctcctcctccctggttaaaagctaacgaacacgatccaaagaatttgtcactcaaaagctgtggtctttcttcccggaaagggaaattgaggaaactcaatccaaacagggttggtgctgcatgggcagaaagaagaagagctgagatggaaatggagaagcaaggtgaaattgttccagcaacatctgattctagttggctgcctaattttggtagtgtctggcaatctggcacaaggaaggaatcaaggaaagaatttgagaaaagccacaagattcatgacacgaagagcgaccatgacttatccttggagataaaaccatatatcagcaaacggatgcgtgtaggtgctgagaaagcttctgacaaagctgaagagcttggcagccacctaccgcagtaaacagatgtacaacccggtggatgtcgtcgcgtgggcgtctctgcggaaaaagccgccagggcgcgcggcttgattagcgattggtttggtttccatgtcaggtcgcgcctgggaagcccgccgcgagtacggaatgccaagccagtagtagtttttgttctcggcacgaagccatttgatgttcgttttgtgcgacggtttgcggcttgatcgcgattggcctcgtagcctttttgaccgaacgagagaagcagcagctctgcaaagctacctccaggttcattcgagacggtaggctgggagggatagcgtcattgcggccaatggttttcggttcttttccacttgtgcacgacgtcataaacccgagaaaatgtttacagcctcacagggcacctctcagagaaccagagactccggttccttgggggtaaaaccgtaaaatggccgccgcttgtcttgttgcttgtagtgtgttgttgttgctttgcgccattgccactgcctgtagcacgcacaaggcgcgcgcagcgagtcactagtcagcgtgcgaggacccgcgctacaggaaagcaatcaggaaaccttttttccctggaaaaaaaaagaggaccagaaaaggtgggatcgaatttatcaaccatgg

SEQ ID NO: 22148 - DNA, 2554 bp, Zea Mays
aaaaactgctgtataaaaagcaaataacttagtcaaaaggataaatgggagcttaataaagaaatggtcggagagtaggagaaaaataatcgaggaggaataatttaaatataaatagaagttacgaacgaggatttgagagtgagaattgttggagagagtaatgtgatctcccccaccattgctgagccgagagcttaggtgatatagctagccgcctagcccctccacaccactcgctatcctgatatcctcacactgcggcactgcactcgcctctgtgggcaggtaccgactgcccagcgccccagttcctggctggccggctggctgtggcctgtggctgtgcctggtctcctcttcctcggtggtggcggtggcggtggacggtggtgctgctggtggtgttgcgctgcttgttcggttgttcctcactttcacttcctttttcctccacggctcccgtcacctaagcagcagctgcagcagcatatcccccgcacaccactcgcttcttcgccatcacccggtggctagctcttgcagcagctcatctcatctctacctctggctggcagtttatttctctcctccctatcagcataagctcagctcagctcagctcagcccagctccctgctgatctgcggcatttgacctgcctcccgtgcttgaaagcttgattggttcgttctgtgcgcggtggtggcccggggcaaataactccccttggtgcctggttggctcgttgccaccctccccgcggcagaagcggcctataggatgagagggacgggggaggaacccaacaaaaccggccgcgacactgtcctgaccgtggaagacacgcacacagagctccagctctgcactgcactggccgacggggaaacggtggagctcgcgcggtgttccattcatggattgggatctcaagatgccggtctcctgggacctgcccgacctggagcacgacgccatgccgccgccgccgcccgtctccgcggcttccaccgcggcggcgtcgggcattgccgccgcagctgccgcgccttcctccgcgacggcgccgagccgggcggagtgctccgtcgacctcaagctcggcgggctaggcgagttcggggcggcggacggcacggccacgaaggagccggcggctgcaaccgcagctccgtccgccagcccgatgaagcgcccgcgcttggggcccggcggcgccggcggggcgcagtgcccgtcgtgcgcggtggacggctgcaaggccgacctgagcaagtgccgcgactaccaccgccgccacaaggtctgcgaggcgcactccaagacgcccgtcgtcgtcgtcgccggccgcgagatgcgcttctgccagcagtgcagcaggtttcacttgctcctagagtttgatgaggccaagcgcagttgtagaaagaggcttgacgggcacaaccggcgccgcaggaagccgcagccagataccatgaactctgggagctttatgacaagtcaacaagggacaaggttctcgtcgttcccggctccaaggccggagccaagctggtctggagtcatcaaatccgaggacagctcatactacacacaccacccggtgctcagcaacaggccgcacgtcgccggcacctccacgtcgccggcctactccaaggaaggccggcgcttcccgttcctccaggacggcgaccaagtcagcttcagcgcatcaggcgccgggacgctcgaggtctccacggtgtgccagcccctcctcaagacgaccgccgccgtggccccgccgccgcccgagagcagcaagatgctcgcccccgtgctggactcggattgtgctctctctcttctgtcatcccccgccaactcttccagcgtcgacgtgagccggatggtccagcccgcggagcgcatccccatggcgcagcccctcgtccccggcctccagcaccaccagttcggcggctccccggtgccggactggttcgccggctccggcgccgtccctgccgcgggcaccggcgggttcgcctgcccccacagcgtggagagcgagcagttcaacacagtcctagtgccgagctccgacggcggccacgagatgaactaccacggcatattccacgtcggcggcgagggctcctccgacgggacgtccccttcgctcccgttctcgtggcagtagcttaccgttgaagcgggcagtgttatgatcggtcagctgtatagcggtggtcatcacaccagttccctcttctttccgtgtttatttattctctgctccctcacgcactcccccgtgtcacttgctagtttcttagttttgcatgcctgatgcatgtagcctgaaaaaactctatcaaattagtgccagatttcctagttcccgtttgtttcattttattttgagaattggaatcttactaatgatttcctagttcccgtttgtttcattttattttgagaattggaatcttattaatgtaataggctattttttagaatgtgacattccaccactttacaaagttattgtataagcctatct

SEQ ID NO: 22149 - DNA, 2140 bp, Zea Mays
ccaccattgctgagccgagagcttaggtgatatagctagccgcctagcccctccacaccactcgctatcctgatatcctcacactgcggcactgcactcgcctctgtgggcaggtaccgactgcccagcgccccagttcctggctggccggctggctgtggcctgtggctgtgcctggtctcctcttcctcggtggtggcggtggcggtggacggtggtgctgctggtggtgttgcgctgcttgttcggttgttcctcactttcacttcctttttcctccacggctcccgtcacctaagcagcagctgcagcagcatatcccccgcacaccactcgcttcttcgccatcacccggtggctagctcttgcagcagctcatctcatctctacctctggctggcagtttatttctctcctccctatcagcataagctcagctcagctcagctcagcccagctccctgctgatctgcggcatttgacctgcctcccgtgcttgaaagcttgattggttcgttctgtgcgcggtggtggcccggggcaaataactccccttggtgcctggttggctcgttgccaccctccccgcggcagaagcggcctataggatgagagggacgggggaggaacccaacaaaaccggccgcgacactgtcctgaccgtggaagacacgcacacagagctccagctctgcactgcactggccgacggggaaacggtggagctcgcgcggtgttccattcatggattgggatctcaagatgccggtctcctgggacctgcccgacctggagcacgacgccatgccgccgccgccgcccgtctccgcggcttccaccgcggcggcgtcgggcattgccgccgcagctgccgcgccttcctccgcgacggcgccgagccgggcggagtgctccgtcgacctcaagctcggcgggctaggcgagttcggggcggcggacggcacggccacgaaggagccggcggctgcaaccgcagctccgtccgccagcccgatgaagcgcccgcgcttggggcccggcggcgccggcggggcgcagtgcccgtcgtgcgcggtggacggctgcaaggccgacctgagcaagtgccgcgactaccaccgccgccacaaggtctgcgaggcgcactccaagacgcccgtcgtcgtcgtcgccggccgcgagatgcgcttctgccagcagtgcagcaggtttcacttgctcctagagtttgatgaggccaagcgcagttgtagaaagaggcttgacgggcacaaccggcgccgcaggaagccgcagccagataccatgaactctgggagctttatgacaagtcaacaagggacaaggttctcgtcgttcccggctccaaggccggagccaagctggtctggagtcatcaaatccgaggacagctcatactacacacaccacccggtgctcagcaacaggccgcacgtcgccggcacctccacgtcgccggcctactccaaggaaggccggcgcttcccgttcctccaggacggcgaccaagtcagcttcagcgcatcagttcggcggctccccggtgccggactggttcgccggctccggcgccgtccctgccgcgggcaccggcgggttcgcctgcccccacagcgtggagagcgagcagttcaacacagtcctagtgccgagctccgacggcggccacgagatgaactaccacggcatattccacgtcggcggcgagggctcctccgacgggacgtccccttcgctcccgttctcgtggcagtagcttaccgttgaagcgggcagtgttatgatcggtcagctgtatagcggtggtcatcacaccagttccctcttctttccgtgtttatttattctctgctccctcacgcactcccccgtgtcacttgctagtttcttagttttgcatgcctgatgcatgtagcctgaaaaaactctatcaaattagtgccagatttcctagttcccgtttgtttcattttattttgagaattggaatcttactaatgatttcctagttcccgtttgtttcattttattttgagaattggaatcttattaatgtaataggctattttttagaatgtgacattccaccactttacaaagttattgtataagcctatct

SEQ ID NO: 22150 - DNA, 2040 bp, Zea Mays
gactgcccagcgccccagttcctggctggccggctggctgtggcctgtggctgtgcctggtctcctcttcctcggtggtggcggtggcggtggacggtggtgctgctggtggtgttgcgctgcttgttcggttgttcctcactttcacttcctttttcctccacggctcccgtcacctaagcagcagctgcagcagcatatcccccgcacaccactcgcttcttcgccatcacccggtggctagctcttgcagcagctcatctcatctctacctctggctggcagtttatttctctcctccctatcagcataagctcagctcagctcagctcagcccagctccctgctgatctgcggcatttgacctgcctcccgtgcttgaaagcttgattggttcgttctgtgcgcggtggtggcccggggcaaataactccccttggtgcctggttggctcgttgccaccctccccgcggcagaagcggcctataggatgagagggacgggggaggaacccaacaaaaccggccgcgacactgtcctgaccgtggaagacacgcacacagagctccagctctgcactgcactggccgacggggaaacggtggagctcgcgcggtgttccattcatggattgggatctcaagatgccggtctcctgggacctgcccgacctggagcacgacgccatgccgccgccgccgcccgtctccgcggcttccaccgcggcggcgtcgggcattgccgccgcagctgccgcgccttcctccgcgacggcgccgagccgggcggagtgctccgtcgacctcaagctcggcgggctaggcgagttcggggcggcggacggcacggccacgaaggagccggcggctgcaaccgcagctccgtccgccagcccgatgaagcgcccgcgcttggggcccggcggcgccggcggggcgcagtgcccgtcgtgcgcggtggacggctgcaaggccgacctgagcaagtgccgcgactaccaccgccgccacaaggtctgcgaggcgcactccaagacgcccgtcgtcgtcgtcgccggccgcgagatgcgcttctgccagcagtgcagcaggtttcacttgctcctagagtttgatgaggccaagcgcagttgtagaaagaggcttgacgggcacaaccggcgccgcaggaagccgcagccagataccatgaactctgggagctttatgacaagtcaacaaggcttgttttcgagtgcagggacaaggttctcgtcgttcccggctccaaggccggagccaagctggtctggagtcatcaaatccgaggacagctcatactacacacaccacccggtgctcagcaacaggccgcacgtcgccggcacctccacgtcgccggcctactccaaggaaggccggcgcttcccgttcctccaggacggcgaccaagtcagcttcagcgcatcagttcggcggctccccggtgccggactggttcgccggctccggcgccgtccctgccgcgggcaccggcgggttcgcctgcccccacagcgtggagagcgagcagttcaacacagtcctagtgccgagctccgacggcggccacgagatgaactaccacggcatattccacgtcggcggcgagggctcctccgacgggacgtccccttcgctcccgttctcgtggcagtagcttaccgttgaagcgggcagtgttatgatcggtcagctgtatagcggtggtcatcacaccagttccctcttctttccgtgtttatttattctctgctccctcacgcactcccccgtgtcacttgctagtttcttagttttgcatgcctgatgcatgtagcctgaaaaaactctatcaaattagtgccagatttcctagttcccgtttgtttcattttattttgagaattggaatcttactaatgatttcctagttcccgtttgtttcattttattttgagaattggaatcttattaatgtaataggctattttttagaatgtgacattccaccactttacaaagttattgtataagcctatct

SEQ ID NO: 22151 - DNA, 1322 bp, Zea Mays
actttgaatttgaattgtttattacgggcattacgcattaccctggagtgtggactttaatttgttcataagatcatcccggctcctgagagattcgttctatctgattttccttggaattttcgtgatcttggtttcacttgctcctagagtttgatgaggccaagcgcagttgtagaaagaggcttgacgggcacaaccggcgccgcaggaagccgcagccagataccatgaactctgggagctttatgacaagtcaacaaggcttgttttcgagtgcagggacaaggttctcgtcgttcccggctccaaggccggagccaagctggtctggagtcatcaaatccgaggacagctcatactacacacaccacccggtgctcagcaacaggccgcacgtcgccggcacctccacgtcgccggcctactccaaggaaggccggcgcttcccgttcctccaggacggcgaccaagtcagcttcagcgcatcaggcgccgggacgctcgaggtctccacggtgtgccagcccctcctcaagacgaccgccgccgtggccccgccgccgcccgagagcagcaagatgctcgcccccgtgctggactcggattgtgctctctctcttctgtcatcccccgccaactcttccagcgtcgacgtgagccggatggtccagcccgcggagcgcatccccatggcgcagcccctcgtccccggcctccagcaccaccagttcggcggctccccggtgccggactggttcgccggctccggcgccgtccctgccgcgggcaccggcgggttcgcctgcccccacagcgtggagagcgagcagttcaacacagtcctagtgccgagctccgacggcggccacgagatgaactaccacggcatattccacgtcggcggcgagggctcctccgacgggacgtccccttcgctcccgttctcgtggcagtagcttaccgttgaagcgggcagtgttatgatcggtcagctgtatagcggtggtcatcacaccagttccctcttctttccgtgtttatttattctctgctccctcacgcactcccccgtgtcacttgctagtttcttagttttgcatgcctgatgcatgtagcctgaaaaaactctatcaaattagtgccagatttcctagttcccgtttgtttcattttattttgagaattggaatcttactaatgatttcctagttcccgtttgtttcattttattttgagaattggaatcttattaatgtaataggctattttttagaatgtgacattccaccactttacaaagttattgtataagcctatct

SEQ ID NO: 22152 - DNA, 1083 bp, Zea Mays
actttgaatttgaattgtttattacgggcattacgcattaccctggagtgtggactttaatttgttcataagatcatcccggctcctgagagattcgttctatctgattttccttggaattttcgtgatcttggtttcacttgctcctagagtttgatgaggccaagcgcagttgtagaaagaggcttgacgggcacaaccggcgccgcaggaagccgcagccagataccatgaactctgggagctttatgacaagtcaacaaggcttgttttcgagtgcagggacaaggttctcgtcgttcccggctccaaggccggagccaagctggtctggagtcatcaaatccgaggacagctcatactacacacaccacccggtgctcagcaacaggccgcacgtcgccggcacctccacgtcgccggcctactccaaggaaggccggcgcttcccgttcctccaggacggcgaccaagtcagcttcagcgcatcagttcggcggctccccggtgccggactggttcgccggctccggcgccgtccctgccgcgggcaccggcgggttcgcctgcccccacagcgtggagagcgagcagttcaacacagtcctagtgccgagctccgacggcggccacgagatgaactaccacggcatattccacgtcggcggcgagggctcctccgacgggacgtccccttcgctcccgttctcgtggcagtagcttaccgttgaagcgggcagtgttatgatcggtcagctgtatagcggtggtcatcacaccagttccctcttctttccgtgtttatttattctctgctccctcacgcactcccccgtgtcacttgctagtttcttagttttgcatgcctgatgcatgtagcctgaaaaaactctatcaaattagtgccagatttcctagttcccgtttgtttcattttattttgagaattggaatcttactaatgatttcctagttcccgtttgtttcattttattttgagaattggaatcttattaatgtaataggctattttttagaatgtgacattccaccactttacaaagttattgtataagcctatct

SEQ ID NO: 22153 - DNA, 1304 bp, Zea Mays
actttgaatttgaattgtttattacgggcattacgcattaccctggagtgtggactttaatttgttcataagatcatcccggctcctgagagattcgttctatctgattttccttggaattttcgtgatcttggtttcacttgctcctagagtttgatgaggccaagcgcagttgtagaaagaggcttgacgggcacaaccggcgccgcaggaagccgcagccagataccatgaactctgggagctttatgacaagtcaacaagggacaaggttctcgtcgttcccggctccaaggccggagccaagctggtctggagtcatcaaatccgaggacagctcatactacacacaccacccggtgctcagcaacaggccgcacgtcgccggcacctccacgtcgccggcctactccaaggaaggccggcgcttcccgttcctccaggacggcgaccaagtcagcttcagcgcatcaggcgccgggacgctcgaggtctccacggtgtgccagcccctcctcaagacgaccgccgccgtggccccgccgccgcccgagagcagcaagatgctcgcccccgtgctggactcggattgtgctctctctcttctgtcatcccccgccaactcttccagcgtcgacgtgagccggatggtccagcccgcggagcgcatccccatggcgcagcccctcgtccccggcctccagcaccaccagttcggcggctccccggtgccggactggttcgccggctccggcgccgtccctgccgcgggcaccggcgggttcgcctgcccccacagcgtggagagcgagcagttcaacacagtcctagtgccgagctccgacggcggccacgagatgaactaccacggcatattccacgtcggcggcgagggctcctccgacgggacgtccccttcgctcccgttctcgtggcagtagcttaccgttgaagcgggcagtgttatgatcggtcagctgtatagcggtggtcatcacaccagttccctcttctttccgtgtttatttattctctgctccctcacgcactcccccgtgtcacttgctagtttcttagttttgcatgcctgatgcatgtagcctgaaaaaactctatcaaattagtgccagatttcctagttcccgtttgtttcattttattttgagaattggaatcttactaatgatttcctagttcccgtttgtttcattttattttgagaattggaatcttattaatgtaataggctattttttagaatgtgacattccaccactttacaaagttattgtataagcctatct

SEQ ID NO: 22154 - DNA, 852 bp, Zea Mays
accccatctaaaaaaggccgcaaggcaaagagaaaacgaaacgcgaagcaaacccttttcggcgtccggcgtccccatccccaccccaccaggccaccacggcgggatgaggccggcgtcggacgcgcaccagtcgcggctgctctacgagctctgcgcgctcctgctgaccgtcctccgggcgtcgcctgacgacggggcggtggcgcggccgctgctgccgcgacatgtgacgcccgccggggtggcgtccatgctgctgggggcgtccatggcgctgatgctctgcggctcggtcaccttcatgctcggcttcttcctcatgccctgggttgtcgggctcggtttcctcttcctcttcgtcggcttcatcaccaacctctccgggatctggagggacatcatcctctggccctccgtcgcgtgctccgcatcggactcacccaaggaggcaccctccccataacaagagttttcctggacacgtagcaaaagagcagaaagacgtcagacaaggcatatgttttccaagccttcatccatgtcgacgtgaagccaagtacaaagtaaggctcccacggaggtccacagaagcagggagttgttggagcagcagccattgccaacctatattttccttcctggacaacccttcttttacatgtgacaccgcagcaagttgccaagttttaaatggttttgtactgtgtctaggaggatacgggatacttgcttgtacatacggaaaagaaggtcgcgtctaaacatcacgtgcagcttataattgtttcagaaatgctgttctttgggctgaacatgaagaaatcccatatgttgtgtgccatcgcgcca

SEQ ID NO: 22155 - DNA, 411 bp, Zea Mays
ccttacctcgtatcattgggtgcccgatatccggattcggtgtgaattcgacgtgattggtgatgaatacaagaggcatatgttttccaagccttcatccatgtcgacgtgaagccaagtacaaagtaaggctcccacggaggtccacagaagcagggagttgttggagcagcagccattgccaacctatattttccttcctggacaacccttcttttacatgtgacaccgcagcaagttgccaagttttaaatggttttgtactgtgtctaggaggatacgggatacttgcttgtacatacggaaaagaaggtcgcgtctaaacatcacgtgcagcttataattgtttcagaaatgctgttctttgggctgaacatgaagaaatcccatatgttgtgtgccatcgcgcca

SEQ ID NO: 22156 - DNA, 3434 bp, Zea Mays
cggaccccgacgaggaggagaaccggcggcggtgcgaggtggacagacagatccggggcggcggagaacggatcgcgaccggggtgagaacaagccaggccacaaccgcccgcaaaggaacgaacaatccggcgtcgaaggcagagcgatcaatggcttctgctgagggtgacatgacaggtaacatacccaaacatgctggagtggtttgaagggctcggtgtagagatggagatatccgacatgtccttctcagtgagcacggaattgggggccagcggcagcagatgcgagtggggcagccgcaatggcatctcaggactcttggcacagaaaagcaatgcactcagccctagtttctggcgcatgattcgggagatactcaagttcaagaacgatgctctcaggtacttggaggaccatgaaaacaaccctgatatggaccggaatgagactctcgggcaattcattcggtctcatggatattcacagttcttccaagaggcttaccttaccccgatctgtgcgtgtatatggtcatgcccatcgcaaggagtgttgggattctctgctttctttgtgctctctttctgccgtaaccatcatcttcttcagttgttcggtcgcccccagtggctcaccgtgaagggtcgttcgcactcctatgtacacaaggtaagggaggagttggaaagtatgggttgccaaattaaaaccagctgtgaaatcaaatctgtttcaagttctgagggaggtttcagggttacagtgtttgatggttcagaggagacgtatgacagaatcatatttggtgtccatgcacctgatgctctaaagattctaggagctgaagcaacacatgaagaattgaggatcctaggagcttttcagtacgtctacagtgatatatacctccactccgataaaagtttgatgccacggagtttgtctgcttggagttcctggaacttcctggggacgacaagcaagggggtttgtgtaacctactggctaaatctgcttcagaacatagaatctacaagcagaccttttctggtgacgctgaatcctcctcatgtcccagaccacgtctttcttaaatggtacactagccaccctgtcccatctgtggctgccgcaaaggcttctcttgagcttcatcacattcaaggaaacagaggaatttggttttgtggggcataccaaggttatggtttccatgaagatggactcaaggctgggaaagctgcagctcaagatttgcttggtaaggagagtgaccttttggtgaacccaaaacagatgatcccatcgtggtctgaggctggggcgcgtcttctggtaacaagatttcttggtcaatatgtgtctgtcggcaacttggtcttgcttgaagaaggaggcactatgttcagttttggtgaagtaggcaaaaaatgccatgtgaaatctgtcctgcgagtacatgaccccatgttttactggaaggttgcaactgaagcagaccttggcttggcagatgcctacattaacggttatttctcatttgtagacaagagagaaggtcttctaaatcttttcctgattctcattgcgaacagggacgcaaacaagagtagtagcagcgctgctggtaaaaggggttggtggacacccctgctattgacagctggggttgcctccgctaaatacttcctgcgtcacatagcaaggaggaattctgtctcacaaacacgtcaaaacatctctcaacactatgatctgagtaatgaattcttctctcttttcctggatccatcgatgacttactcttgtgccatcttcaagacggaggatcaaagcttagaggcagcccagctacagaaagtttgcctcctaatcgataaggctaaagtggagcgagatcaccatgttcttgagattggctgtggttggggcagcttagcaatccaattggtgaagcaaactggttgcaaatacactgggatcacattatcagtggagcaattgaaatatgcacagagaaaggtgaaagaagctggattagaggaccacataagcttcatgttgtgtgattaccgtcaaataccaactcagcgcaaatacgacaggatcatctcttgcgagatgatcgaaggtgttgggcacgaatacatggacgatttcttcggctgctgcgagtcccttttggctcaagacggcatatttgtcctgcagttcatctcaatcccagaagaacggtatgaggaatacaggcgcagctcagacttcatcaaggaatacatcttccctgggggttgcctgccttcgttagcccggatcacgtctgccatgtctgcagcatcaaggctctgcatcgagcaccttgagaatattgggtaccattactacccaacgctgatacagtggagggacaacttcatggccaataaggatgcaattttggccctgggcttcgatgagaaattcatccgtatatgggaatactacttcatatactgcgccgctggtttcaagtcacggacacttgggaactaccagattgtgttttctcgccctggcaacgacaaattaggtgacagcggtatacactccttaagcaagctttctggcagctaataatgcgaggatctatatatatgtggtggtagctggatcagtcggagcctacacacctgaacttgagcctttttatttgtgatcgaattggacacgcagtgctgtgtacacgtcgctaactaactgtacttgcagcggcggatcattccattgcttcgatccaatttgacgtttcatcactttctgtttctgttggcgcaacgtaactccaatgattaaccttggcacatggccggctgggacgcaggagagactcgagcattcactttcgctggatatacatttgtgtattgtgtccagtctccagactccagcgctgtatgatgagctcaagaacgtagatatattgtcgtcagagtaagacaccacggtaccaaagtgctaggaaaaatcagagatatagaaagatagaggagcgcagacctaaaaccgctggatcagagtatcgatatagctgtatgcacacgtacaatataaagaggtttggactcttaagcataataccctacgtcatctatgtggtgattggttaggtgcaaatgtggatacagcttagactcagatgatatctgagctacccagtgagaacggccctaactaccacttagaatctgaatgtctacccctagagagaatgatattgaaccctttttacgttgctctacatattccttttatagcacaagagatgagagagtcattcatacatagagaagatagcgggctctgctcaatagaggtccatctaattttgatttgtcttagttgtcccaccatacatggagcacacatctgacgtgtcacaagagtgagtg

SEQ ID NO: 22157 - DNA, 3329 bp, Zea Mays
ccgcaaaggaacgaacaatccggcgtcgaaggcagagcgatcaatggcttctgctgagggtgacatgacaggtaacatacccaaacatgctggagtggtttgaagggctcggtgtagagatggagatatccgacatgtccttctcagtgagcacggaattgggggccagcggcagcagatgcgagtggggcagccgcaatggcatctcaggactcttggcacagaaaagcaatgcactcagccctagtttctggcgcatgattcgggagatactcaagttcaagaacgatgctctcaggtacttggaggaccatgaaaacaaccctgatatggaccggaatgagactctcgggcaattcattcggtctcatggatattcacagttcttccaagaggcttaccttaccccgatctgtgcgtgtatatggtcatgcccatcgcaaggagtgttgggattctctgctttctttgtgctctctttctgccgtaaccatcatcttcttcagttgttcggtcgcccccagtggctcaccgtgaagggtcgttcgcactcctatgtacacaaggtaagggaggagttggaaagtatgggttgccaaattaaaaccagctgtgaaatcaaatctgtttcaagttctgagggaggtttcagggttacagtgtttgatggttcagaggagacgtatgacagaatcatatttggtgtccatgcacctgatgctctaaagattctaggagctgaagcaacacatgaagaattgaggatcctaggagcttttcagtacgtctacagtgatatatacctccactccgataaaagtttgatgccacggagtttgtctgcttggagttcctggaacttcctggggacgacaagcaagggggtttgtgtaacctactggctaaatctgcttcagaccacgtctttcttaaatggtacactagccaccctgtcccatctgtggctgccgcaaaggcttctcttgagcttcatcacattcaaggaaacagaggaatttggttttgtggggcataccaaggttatggtttccatgaagatggactcaaggctgggaaagctgcagctcaagatttgcttggtaaggagagtgaccttttggtgaacccaaaacagatgatcccatcgtggtctgaggctggggcgcgtcttctggtaacaagatttcttggtcaatatgtgtctgtcggcaacttggtcttgcttgaagaaggaggcactatgttcagttttggtgaagtaggcaaaaaatgccatgtgaaatctgtcctgcgagtacatgaccccatgttttactggaaggttgcaactgaagcagaccttggcttggcagatgcctacattaacggttatttctcatttgtagacaagagagaaggtcttctaaatcttttcctgattctcattgcgaacagggacgcaaacaagagtagtagcagcgctgctggtaaaaggggttggtggacacccctgctattgacagctggggttgcctccgctaaatacttcctgcgtcacatagcaaggaggaattctgtctcacaaacacgtcaaaacatctctcaacactatgatctgagtaatgaattcttctctcttttcctggatccatcgatgacttactcttgtgccatcttcaaggtttgtgttgtgaacctgtgatcaactagctagtgccactcgtgtgttcgagaaaagaaaacacggaggatcaaagcttagaggcagcccagctacagaaagtttgcctcctaatcgataaggctaaagtggagcgagatcaccatgttcttgagattggctgtggttggggcagcttagcaatccaattggtgaagcaaactggttgcaaatacactgggatcacattatcagtggagcaattgaaatatgcacagagaaaggtgaaagaagctggattagaggaccacataagcttcatgttgtgtgattaccgtcaaataccaactcagcgcaaatacgacaggatcatctcttgcgagatgatcgaaggtgttgggcacgaatacatggacgatttcttcggctgctgcgagtcccttttggctcaagacggcatatttgtcctgcagttcatctcaatcccagaagaacggtatgaggaatacaggcgcagctcagacttcatcaaggaatacatcttccctgggggttgcctgccttcgttagcccggatcacgtctgccatgtctgcagcatcaaggctctgcatcgagcaccttgagaatattgggtaccattactacccaacgctgatacagtggagggacaacttcatggccaataaggatgcaattttggccctgggcttcgatgagaaattcatccgtatatgggaatactacttcatatactgcgccgctggtttcaagtcacggacacttgggaactaccagattgtgttttctcgccctggcaacgacaaattaggtgacagcggtatacactccttaagcaagctttctggcagctaataatgcgaggatctatatatatgtggtggtagctggatcagtcggagcctacacacctgaacttgagcctttttatttgtgatcgaattggacacgcagtgctgtgtacacgtcgctaactaactgtacttgcagcggcggatcattccattgcttcgatccaatttgacgtttcatcactttctgtttctgttggcgcaacgtaactccaatgattaaccttggcacatggccggctgggacgcaggagagactcgagcattcactttcgctggatatacatttgtgtattgtgtccagtctccagactccagcgctgtatgatgagctcaagaacgtagatatattgtcgtcagagtaagacaccacggtaccaaagtgctaggaaaaatcagagatatagaaagatagaggagcgcagacctaaaaccgctggatcagagtatcgatatagctgtatgcacacgtacaatataaagaggtttggactcttaagcataataccctacgtcatctatgtggtgattggttaggtgcaaatgtggatacagcttagactcagatgatatctgagctacccagtgagaacggccctaactaccacttagaatctgaatgtctacccctagagagaatgatattgaaccctttttacgttgctctacatattccttttatagcacaagagatgagagagtcattcatacatagagaagatagcgggctctgctcaatagaggtccatctaattttgatttgtcttagttgtcccaccatacatggagcacacatctgacgtgtcacaagagtgagtg

SEQ ID NO: 22158 - DNA, 3466 bp, Zea Mays
cggcgtcggtgctggtgcggttcatccgtgctttagtcgcgccccatgcccgtgcacgtcaagcgttcgtcttaatgcctgtgaggcacaccgtacgcgtcgtccatggagaagtgctccccatgcagctcaatgtggacggccacttgccacggcagccaaggaggctcgcaccagggtctggaccgtcctcaacgagctgagcaatcacggtaacatacccaaacatgctggagtggtttgaagggctcggtgtagagatggagatatccgacatgtccttctcagtgagcacggaattgggggccagcggcagcagatgcgagtggggcagccgcaatggcatctcaggactcttggcacagaaaagcaatgcactcagccctagtttctggcgcatgattcgggagatactcaagttcaagaacgatgctctcaggtacttggaggaccatgaaaacaaccctgatatggaccggaatgagactctcgggcaattcattcggtctcatggatattcacagttcttccaagaggcttaccttaccccgatctgtgcgtgtatatggtcatgcccatcgcaaggagtgttgggattctctgctttctttgtgctctctttctgccgtaaccatcatcttcttcagttgttcggtcgcccccagtggctcaccgtgaagggtcgttcgcactcctatgtacacaaggtaagggaggagttggaaagtatgggttgccaaattaaaaccagctgtgaaatcaaatctgtttcaagttctgagggaggtttcagggttacagtgtttgatggttcagaggagacgtatgacagaatcatatttggtgtccatgcacctgatgctctaaagattctaggagctgaagcaacacatgaagaattgaggatcctaggagcttttcagtacgtctacagtgatatatacctccactccgataaaagtttgatgccacggagtttgtctgcttggagttcctggaacttcctggggacgacaagcaagggggtttgtgtaacctactggctaaatctgcttcagaacatagaatctacaagcagaccttttctggtgacgctgaatcctcctcatgtcccagaccacgtctttcttaaatggtacactagccaccctgtcccatctgtggctgccgcaaaggcttctcttgagcttcatcacattcaaggaaacagaggaatttggttttgtggggcataccaaggttatggtttccatgaagatggactcaaggctgggaaagctgcagctcaagatttgcttggtaaggagagtgaccttttggtgaacccaaaacagatgatcccatcgtggtctgaggctggggcgcgtcttctggtaacaagatttcttggtcaatatgtgtctgtcggcaacttggtcttgcttgaagaaggaggcactatgttcagttttggtgaagtaggcaaaaaatgccatgtgaaatctgtcctgcgagtacatgaccccatgttttactggaaggttgcaactgaagcagaccttggcttggcagatgcctacattaacggttatttctcatttgtagacaagagagaaggtcttctaaatcttttcctgattctcattgcgaacagggacgcaaacaagagtagtagcagcgctgctggtaaaaggggttggtggacacccctgctattgacagctggggttgcctccgctaaatacttcctgcgtcacatagcaaggaggaattctgtctcacaaacacgtcaaaacatctctcaacactatgatctgagtaatgaattcttctctcttttcctggatccatcgatgacttactcttgtgccatcttcaagacggaggatcaaagcttagaggcagcccagctacagaaagtttgcctcctaatcgataaggctaaagtggagcgagatcaccatgttcttgagattggctgtggttggggcagcttagcaatccaattggtgaagcaaactggttgcaaatacactgggatcacattatcagtggagcaattgaaatatgcacagagaaaggtgaaagaagctggattagaggaccacataagcttcatgttgtgtgattaccgtcaaataccaactcagcgcaaatacgacaggatcatctcttgcgagatgatcgaaggtgttgggcacgaatacatggacgatttcttcggctgctgcgagtcccttttggctcaagacggcatatttgtcctgcagttcatctcaatcccagaagaacggtatgaggaatacaggcgcagctcagacttcatcaaggaatacatcttccctgggggttgcctgccttcgttagcccggatcacgtctgccatgtctgcagcatcaaggctctgcatcgagcaccttgagaatattgggtaccattactacccaacgctgatacagtggagggacaacttcatggccaataaggatgcaattttggccctgggcttcgatgagaaattcatccgtatatgggaatactacttcatatactgcgccgctggtttcaagtcacggacacttgggaactaccagattgtgttttctcgccctggcaacgacaaattaggtgacagcggtatacactccttaagcaagctttctggcagctaataatgcgaggatctatatatatgtggtggtagctggatcagtcggagcctacacacctgaacttgagcctttttatttgtgatcgaattggacacgcagtgctgtgtacacgtcgctaactaactgtacttgcagcggcggatcattccattgcttcgatccaatttgacgtttcatcactttctgtttctgttggcgcaacgtaactccaatgattaaccttggcacatggccggctgggacgcaggagagactcgagcattcactttcgctggatatacatttgtgtattgtgtccagtctccagactccagcgctgtatgatgagctcaagaacgtagatatattgtcgtcagagtaagacaccacggtaccaaagtgctaggaaaaatcagagatatagaaagatagaggagcgcagacctaaaaccgctggatcagagtatcgatatagctgtatgcacacgtacaatataaagaggtttggactcttaagcataataccctacgtcatctatgtggtgattggttaggtgcaaatgtggatacagcttagactcagatgatatctgagctacccagtgagaacggccctaactaccacttagaatctgaatgtctacccctagagagaatgatattgaaccctttttacgttgctctacatattccttttatagcacaagagatgagagagtcattcatacatagagaagatagcgggctctgctcaatagaggtccatctaattttgatttgtcttagttgtcccaccatacatggagcacacatctgacgtgtcacaagagtgagtg

SEQ ID NO: 22159 - DNA, 1034 bp, Zea Mays
ctcgctagtagctgatgctggcatacagcgtacactgcaattttggccctgggcttcgatgagaaattcatccgtatatgggaatactacttcatatactgcgccgctggtttcaagtcacggacacttgggaactaccagattgtgttttctcgccctggcaacgacaaattaggtgacagcggtatacactccttaagcaagctttctggcagctaataatgcgaggatctatatatatgtggtggtagctggatcagtcggagcctacacacctgaacttgagcctttttatttgtgatcgaattggacacgcagtgctgtgtacacgtcgctaactaactgtacttgcagcggcggatcattccattgcttcgatccaatttgacgtttcatcactttctgtttctgttggcgcaacgtaactccaatgattaaccttggcacatggccggctgggacgcaggagagactcgagcattcactttcgctggatatacatttgtgtattgtgtccagtctccagactccagcgctgtatgatgagctcaagaacgtagatatattgtcgtcagagtaagacaccacggtaccaaagtgctaggaaaaatcagagatatagaaagatagaggagcgcagacctaaaaccgctggatcagagtatcgatatagctgtatgcacacgtacaatataaagaggtttggactcttaagcataataccctacgtcatctatgtggtgattggttaggtgcaaatgtggatacagcttagactcagatgatatctgagctacccagtgagaacggccctaactaccacttagaatctgaatgtctacccctagagagaatgatattgaaccctttttacgttgctctacatattccttttatagcacaagagatgagagagtcattcatacatagagaagatagcgggctctgctcaatagaggtccatctaattttgatttgtcttagttgtcccaccatacatggagcacacatctgacgtgtcacaagagtgagtg

SEQ ID NO: 22160 - DNA, 2057 bp, Zea Mays
ctccaacggtgttggaccgcgggccgcggcccgcctagtaggccaacgtcgtgcgcatgctctcagtaaaatcacaccacgcgggggctttacctgcaaaaagcgcgcaaataaaaatctcacgcaggagacaaatccagtaatccacactttccttcgcctcctccatcgtggtcgcggccaaggccaacgaaccaattcctctaccattcctcctccctcctttcctgccattctcccatcccggcagggcgtctcctcctcctccctccctcctttccatcccgtttcttcgccgcctccatctccaggccgcgtcgaattcttccatccaccgcaccggtcgacgacgacgacgaggatgctgggcgcagcgaggaggcagcttggatccggtcccatgctgggacaggttttgcgaagactccgaccagcggtggcggctgaggtggcgaggggctactccgccgcggcgaaggagatgactgtccgtgatgcattgaactctgcattggatgaagagatgtctgctgatccttccgtttttctgatgggagaagaggttggagagtaccaaggtgcatacaagatttctaagggcttgcttgataggtatggtcctgatagggttcttgacacgcctatcacagaggctggttttactggcattggtgttggtgcagcttatcatggtcttcggcctattatagagtttatgacatttaatttctcgatgcaggctattgatcatatcatcaattcagctgccaagtcaaattatatgtcagctggtcagatatctgttcctattgtttttagaggaccaaacggagctgctgctggagttggtgctcaacactcacaggacttaaggttctcacaccatactcttcagaagatgcccgaggcttgctcaaagctgctatcagggaccctgatcctgttattttcctggaaaatgaattgctttatggagaatctttcccagtttctgctgaagtgcttgattctagtttttgcctaccgattggcaaagctaagatagaacgtgagggtaaagatgttaccattactgcgttctccaagatggttggctatgctctccaggctgcagagatactgtccaaggaaggaatcagtgctgaggtgatcaaccttcgatcaatcagaccacttgatagagctgctattaatgcatctgtcaggaaaaccaaccgattggtgactgttgaagaagggttcccccaacatgggattggtgccgagatatgcatgtctgttgtagaagaaagcttcgcgtaccttgatgcaccagttgagaggattgctggagctgatgtacctatgccctatgctgccaaccttgagagaatggctgttccgcaggtcgatgacattgtgcgggcggcaaagcgggcctgctacagggcagtaccaatggcagcagctgcctgattggtggacaagcctttctgttttccttccatcggttttcgctctctagccagaaacatgtagtattcataaggcgcaggcaaattggccggaacccagactccaagcgagctaattttgtagatctgccatggtgtgctttgtcccgttagtcgatatatgtggcgttatttctagattcaagtccatttgcttctctatgatttttgtacaccgctaaataatcttcttaagcccctgaatgaatgcaaaatatttaagatgttttaggaaaatactatggttttgtgaaataccttggtttaggagtaacatgaaggcgctcaaagtgaaatcactaagctaatagatgacttgataattttaaacttcttgacacataataaaccttagagaacaaatgcgtaaaaatggaccaaggccgatttaaaataagattttgttgtttgctgatcaatatgaccatttagagatattatttgccagtaattttttttctatagtttaaaggcacaagtgaacttcgactaagataaagggatgattcggatggttaatacctcaaccaagacatcataagacatgtgaagaccaactagtac

SEQ ID NO: 22161 - DNA, 2081 bp, Zea Mays
ctccaacggtgttggaccgcgggccgcggcccgcctagtaggccaacgtcgtgcgcatgctctcagtaaaatcacaccacgcgggggctttacctgcaaaaagcgcgcaaataaaaatctcacgcaggagacaaatccagtaatccacactttccttcgcctcctccatcgtggtcgcggccaaggccaacgaaccaattcctctaccattcctcctccctcctttcctgccattctcccatcccggcagggcgtctcctcctcctccctccctcctttccatcccgtttcttcgccgcctccatctccaggccgcgtcgaattcttccatccaccgcaccggtcgacgacgacgacgaggatgctgggcgcagcgaggaggcagcttggatccggtcccatgctgggacaggttttgcgaagactccgaccagcggtggcggctgaggtggcgaggggctactccgccgcggcgaaggagatgactgtccgtgatgcattgaactctgcattggatgaagagatgtctgctgatccttccgtttttctgatgggagaagaggttggagagtaccaaggtgcatacaagatttctaagggcttgcttgataggtatggtcctgatagggttcttgacacgcctatcacagaggctggttttactggcattggtgttggtgcagcttatcatggtcttcggcctattatagagtttatgacatttaatttctcgatgcaggctattgatcatatcatcaattcagctgccaagtcaaattatatgtcagctggtcagatatctgttcctattgtttttagaggaccaaacggagctgctgctggagttggtgctcaacactcacagtgttatgcagcttggtttgcacatgttccaggacttaaggttctcacaccatactcttcagaagatgcccgaggcttgctcaaagctgctatcagggaccctgatcctgttattttcctggaaaatgaattgctttatggagaatctttcccagtttctgctgaagtgcttgattctagtttttgcctaccgattggcaaagctaagatagaacgtgagggtaaagatgttaccattactgcgttctccaagatggttggctatgctctccagagatactgtccaaggaaggaatcagtgctgaggtgatcaaccttcgatcaatcagaccacttgatagagctgctattaatgcatctgtcaggaaaaccaaccgattggtgactgttgaagaagggttcccccaacatgggattggtgccgagatatgcatgtctgttgtagaagaaagcttcgcgtaccttgatgcaccagttgagaggattgctggagctgatgtacctatgccctatgctgccaaccttgagagaatggctgttccgcaggtcgatgacattgtgcgggcggcaaagcgggcctgctacagggcagtaccaatggcagcagctgcctgattggtggacaagcctttctgttttccttccatcggttttcgctctctagccagaaacatgtagtattcataaggcgcaggcaaattggccggaacccagactccaagcgagctaattttgtagatctgccatggtgtgctttgtcccgttagtcgatatatgtggcgttatttctagattcaagtccatttgcttctctatgatttttgtacaccgctaaataatcttcttaagcccctgaatgaatgcaaaatatttaagatgttttaggaaaatactatggttttgtgaaataccttggtttaggagtaacatgaaggcgctcaaagtgaaatcactaagctaatagatgacttgataattttaaacttcttgacacataataaaccttagagaacaaatgcgtaaaaatggaccaaggccgatttaaaataagattttgttgtttgctgatcaatatgaccatttagagatattatttgccagtaattttttttctatagtttaaaggcacaagtgaacttcgactaagataaagggatgattcggatggttaatacctcaaccaagacatcataagacatgtgaagaccaactagtac

SEQ ID NO: 22162 - DNA, 2048 bp, Zea Mays
ctccaacggtgttggaccgcgggccgcggcccgcctagtaggccaacgtcgtgcgcatgctctcagtaaaatcacaccacgcgggggctttacctgcaaaaagcgcgcaaataaaaatctcacgcaggagacaaatccagtaatccacactttccttcgcctcctccatcgtggtcgcggccaaggccaacgaaccaattcctctaccattcctcctccctcctttcctgccattctcccatcccggcagggcgtctcctcctcctccctccctcctttccatcccgtttcttcgccgcctccatctccaggccgcgtcgaattcttccatccaccgcaccggtcgacgacgacgacgaggatgctgggcgcagcgaggaggcagcttggatccggtcccatgctgggacaggttttgcgaagactccgaccagcggtggcggctgaggtggcgaggggctactccgccgcggcgaaggagatgactgtccgtgatgcattgaactctgcattggatgaagagatgtctgctgatccttccgtttttctgatgggagaagaggttggagagtaccaaggtgcatacaagatttctaagggcttgcttgataggctggttttactggcattggtgttggtgcagcttatcatggtcttcggcctattatagagtttatgacatttaatttctcgatgcaggctattgatcatatcatcaattcagctgccaagtcaaattatatgtcagctggtcagatatctgttcctattgtttttagaggaccaaacggagctgctgctggagttggtgctcaacactcacagtgttatgcagcttggtttgcacatgttccaggacttaaggttctcacaccatactcttcagaagatgcccgaggcttgctcaaagctgctatcagggaccctgatcctgttattttcctggaaaatgaattgctttatggagaatctttcccagtttctgctgaagtgcttgattctagtttttgcctaccgattggcaaagctaagatagaacgtgagggtaaagatgttaccattactgcgttctccaagatggttggctatgctctccaggctgcagagatactgtccaaggaaggaatcagtgctgaggtgatcaaccttcgatcaatcagaccacttgatagagctgctattaatgcatctgtcaggaaaaccaaccgattggtgactgttgaagaagggttcccccaacatgggattggtgccgagatatgcatgtctgttgtagaagaaagcttcgcgtaccttgatgcaccagttgagaggattgctggagctgatgtacctatgccctatgctgccaaccttgagagaatggctgttccgcaggtcgatgacattgtgcgggcggcaaagcgggcctgctacagggcagtaccaatggcagcagctgcctgattggtggacaagcctttctgttttccttccatcggttttcgctctctagccagaaacatgtagtattcataaggcgcaggcaaattggccggaacccagactccaagcgagctaattttgtagatctgccatggtgtgctttgtcccgttagtcgatatatgtggcgttatttctagattcaagtccatttgcttctctatgatttttgtacaccgctaaataatcttcttaagcccctgaatgaatgcaaaatatttaagatgttttaggaaaatactatggttttgtgaaataccttggtttaggagtaacatgaaggcgctcaaagtgaaatcactaagctaatagatgacttgataattttaaacttcttgacacataataaaccttagagaacaaatgcgtaaaaatggaccaaggccgatttaaaataagattttgttgtttgctgatcaatatgaccatttagagatattatttgccagtaattttttttctatagtttaaaggcacaagtgaacttcgactaagataaagggatgattcggatggttaatacctcaaccaagacatcataagacatgtgaagaccaactagtac

SEQ ID NO: 22163 - DNA, 2633 bp, Zea Mays
ctcgcactcgagcaccgagagggaggaaaaaagaattctccacttccccactctccctctcccgctcgtggctcgtcagtgggtgggagtgtgcggggctagccgctagggtttccgcgagcccatcgccggccggccacggacgatccgggactccatccggcgcctgccctgaatcggcttcgcggggcgcaaggagcgagagaatgaagtcgtcgctgcggaagctgcggggcttcgcgctgcagcgccaggagcagcgggtggaccgggaccgcggccggggccacgccaccgccgccgccaccgcggcggacgagctcctcgcggctgcccaggatatggcagatatgagaagctgttacgataacttgctttctgttgctgcagcaattgcaaatagtgcatatgagttctctgaagcacttcaagaaatgggaacttgtttgcttaaaagagttacgccaaataaggatggaataaatgataaagttttgctgttgcttgggaaatcacaatttgaacttcggaaacttttagatagttatcgtgtgcatgttcttaacaccatcaccactccatcgctgtcgcttcttaatgaacttcaaactgtggaggaaatgaagcaccaatgcgatgaaaaaaaagaattgtatgaattcatggtaaacacgcagaaagaaaagggaaggtctaagaatgctaaaggtgataatggagcatcagagcaattgaaacaagctcaggaagattatcaagaggaagcaactctttttctattccggttgaagtcattgaagcaaggacagttccgaagtctttttacacaagctgctcggcatcatgctgcacagctaaatttgttccgaaagggagtcaagtcccttgaggctgtagagccacatgttaggctcgctgctgagcagcaacacattgatcatcagttcagcgcacttgaggaagaggattaccttgttgaggatgaaaatgatgacgattacaatggcagtcatgatggagagttatcttttgattatggagaaaataaggaagttgaggaatctgggtttttttaacagaagcaaagaagagtattcttctgttccacatgaaagacaaagaatcgtaagtcagtcagcaccactttttcctgagaaaaagctcaatacagaagagagaataaaagatttgcggcgttctgcaacaaggaagttgaatacttatgttttgcctactccaaatgacgttggagctacttctcagagagcatcaggaaatcctacttctgaacctctcgagagtaaaggtgccttccattcatctccactccactcatctgcagacataagagatttgggagacagtaatctacctagtcctacaagattgtctaacgtacagtctgtgctgaaagatagcaataccaataaaacagaaacaaggaaagtactcccagtgggtgatctggctttacctagctatcatgacctgaagacttctgataacaaaaaagtgaaaagagggtcattttctggcccaatagcttccagaccacggtcaacagagaacattgatgttatttctgcagcgcctaggcatagctcagcacatcagccagtgcacatgagagtatcccccggcaactcgccgccacccatttcctcaccgaagatcaaggaacttcatgagcttcctcgaccacctgttaatacatcaaaaaatatagcattccccagtttagttgcccactccgccccattggcaccaaatcctgcatctttgactcccaaagttcaagatcattttaggacaaaacaaacgctccaaagaactgcttcacctttaccaactccaccacctggatctatagcccgcagtttttctataccttctaggggtatttcagacagtaaagagacagaagatcaacacaagggagctgccagaatgagtctttcttctcttccttcagcacaaacattcttggaagatcgtcagccattgtcatcagctgctggatcggtcagcaaaacataggagtattctctattatcattatcaagcagctcgccgagccctcttcctgaaagaatgttgtacatattagcatttgaactctggccagtatcgcggaagaagttgggtgctgtttggttcacgaaatgtaacgtaaagggtaatggtaacggtttacactcgattacggacggtaacaagtttgaatagtccggtatcaaattttagtatggtatctgattacggttggactaaaacaaacatgatttaacgttatcacttacccattacgttacaaatatttgaaccaaacggtaccttggtgtttcgcgtgccctttggttggttaagatgtagcctgtgcaaataatgggttctgcggaaataaaatccccatttttctcacccatttgattgattgacgcgagatttgctgttgcgccgttgagcttgtttgccttgaagcgagttcagagtgccatctgtttcctgcagcttatgtaattatcacctggtttcctgtgcttatgtaatcatcatctatgtgtttgattgcctgtactggtgcttgcatcgcgagatgcaatgagctggtgtttggttgttgtcaatcaggc

SEQ ID NO: 22164 - DNA, 2591 bp, Zea Mays
ctcgagcaccgagagggaggaaaaaagaattctccacttccccactctccctctcccgctcgtggctcgtcagtgggtgggagtgtgcggggctagccgctagggtttccgcgagcccatcgccggccggccacggacgatccgggactccatccggcgcctgccctgaatcggcttcgcggggcgcaaggagcgagagaatgaagtcgtcgctgcggaagctgcggggcttcgcgctgcagcgccaggagcagcgggtggaccgggaccgcggccggggccacgccaccgccgccgccaccgcggcggacgagctcctcgcggctgcccaggatatggcagatatgagaagctgttacgataacttgctttctgttgctgcagcaattgcaaatagtgcatatgagttctctgaagcacttcaagaaatgggaacttgtttgcttaaaagagttacgccaaataaggatggaataaatgcgtgtgcatgttcttaacaccatcaccactccatcgctgtcgcttcttaatgaacttcaaactgtggaggaaatgaagcaccaatgcgatgaaaaaaaagaattgtatgaattcatggtaaacacgcagaaagaaaagggaaggtctaagaatgctaaaggtgataatggagcatcagagcaattgaaacaagctcaggaagattatcaagaggaagcaactctttttctattccggttgaagtcattgaagcaaggacagttccgaagtctttttacacaagctgctcggcatcatgctgcacagctaaatttgttccgaaagggagtcaagtcccttgaggctgtagagccacatgttaggctcgctgctgagcagcaacacattgatcatcagttcagcgcacttgaggaagaggattaccttgttgaggatgaaaatgatgacgattacaatggcagtcatgatggagagttatcttttgattatggagaaaataaggaagttgaggaatctggtaatgcttctaggaatcatacagagggtttttttaacagaagcaaagaagagtattcttctgttccacatgaaagacaaagaatcgtaagtcagtcagcaccactttttcctgagaaaaagctcaatacagaagagagaataaaagatttgcggcgttctgcaacaaggaagttgaatacttatgttttgcctactccaaatgacgttggagctacttctcagagagcatcaggaaatcctacttctgaacctctcgagagtaaaggtgccttccattcatctccactccactcatctgcagacataagagatttgggagacagtaatctacctagtcctacaagattgtctaacgtacagtctgtgctgaaagatagcaataccaataaaacagaaacaaggaaagtactcccagtgggtgatctggctttacctagctatcatgacctgaagacttctgataacaaaaaagtgaaaagagggtcattttctggcccaatagcttccagaccacggtcaacagagaacattgatgttatttctgcagcgcctaggcatagctcagcacatcagccagtgcacatgagagtatcccccggcaactcgccgccacccatttcctcaccgaagatcaaggaacttcatgagcttcctcgaccacctgttaatacatcaaaaaatatagcattccccagtttagttgcccactccgccccattggcaccaaatcctgcatctttgactcccaaagttcaagatcattttaggacaaaacaaacgctccaaagaactgcttcacctttaccaactccaccacctggatctatagcccgcagtttttctataccttctaggggtatttcagacagtaaagagacagaagatcaacacaagggagctgccagaatgagtctttcttctcttccttcagcacaaacattcttggaagatcgtcagccattgtcatcagctgctggatcggtcagcaaaacataggagtattctctattatcattatcaagcagctcgccgagccctcttcctgaaagaatgttgtacatattagcatttgaactctggccagtatcgcggaagaagttgggtgctgtttggttcacgaaatgtaacgtaaagggtaatggtaacggtttacactcgattacggacggtaacaagtttgaatagtccggtatcaaattttagtatggtatctgattacggttggactaaaacaaacatgatttaacgttatcacttacccattacgttacaaatatttgaaccaaacggtaccttggtgtttcgcgtgccctttggttggttaagatgtagcctgtgcaaataatgggttctgcggaaataaaatccccatttttctcacccatttgattgattgacgcgagatttgctgttgcgccgttgagcttgtttgccttgaagcgagttcagagtgccatctgtttcctgcagcttatgtaattatcacctggtttcctgtgcttatgtaatcatcatctatgtgtttgattgcctgtactggtgcttgcatcgcgagatgcaatgagctggtgtttggttgttgtcaatcaggc

SEQ ID NO: 22165 - DNA, 2402 bp, Zea Mays
gggaggaaaaaagaattctccacttccccactctccctctcccgctcgtggctcgtcagtgggtgggagtgtgcggggctagccgctagggtttccgcgagcccatcgccggccggccacggacgatccgggactccatccggcgcctgccctgaatcggcttcgcggggcgcaaggagcgagagaatgaagtcgtcgctgcggaagctgcggggcttcgcgctgcagcgccaggagcagcgggtggaccgggaccgcggccggggccacgccaccgccgccgccaccgcggcggacgagctcctcgcggctgcccaggatatggcagatatgagaagctgttacgataacttgctttctgttgctgcagcaattgcaaatagtgcatatgagttctctgaagcacttcaagaaatgggaacttgtttgcttaaaagagttacgccaaataaggatggaataaatgataaagttttgctgttgcttgggaaatcacaatttgaacttcggaaacttttagatagttatcgtgtgcatgttcttaacaccatcaccactccatcgctgtcgcttcttaatgaacttcaaactgtggaggaaatgaagcaccaatgcgatgaaaaaaaagaattgtatgaattcatggtaaacacgcagaaagaaaagggaaggtctaagaatgctaaaggtgataatggagcatcagagcaattgaaacaagctcaggaagattatcaagaggaagcaactctttttctattccggttgaagtcattgaagcaaggacagttccgaagtctttttacacaagctgctcggcatcatgctgcacagggtttttttaacagaagcaaagaagagtattcttctgttccacatgaaagacaaagaatcgtaagtcagtcagcaccactttttcctgagaaaaagctcaatacagaagagagaataaaagatttgcggcgttctgcaacaaggaagttgaatacttatgttttgcctactccaaatgacgttggagctacttctcagagagcatcaggaaatcctacttctgaacctctcgagagtaaaggtgccttccattcatctccactccactcatctgcagacataagagatttgggagacagtaatctacctagtcctacaagattgtctaacgtacagtctgtgctgaaagatagcaataccaataaaacagaaacaaggaaagtactcccagtgggtgatctggctttacctagctatcatgacctgaagacttctgataacaaaaaagtgaaaagagggtcattttctggcccaatagcttccagaccacggtcaacagagaacattgatgttatttctgcagcgcctaggcatagctcagcacatcagccagtgcacatgagagtatcccccggcaactcgccgccacccatttcctcaccgaagatcaaggaacttcatgagcttcctcgaccacctgttaatacatcaaaaaatatagcattccccagtttagttgcccactccgccccattggcaccaaatcctgcatctttgactcccaaagttcaagatcattttaggacaaaacaaacgctccaaagaactgcttcacctttaccaactccaccacctggatctatagcccgcagtttttctataccttctaggggtatttcagacagtaaagagacagaagatcaacacaagggagctgccagaatgagtctttcttctcttccttcagcacaaacattcttggaagatcgtcagccattgtcatcagctgctggatcggtcagcaaaacataggagtattctctattatcattatcaagcagctcgccgagccctcttcctgaaagaatgttgtacatattagcatttgaactctggccagtatcgcggaagaagttgggtgctgtttggttcacgaaatgtaacgtaaagggtaatggtaacggtttacactcgattacggacggtaacaagtttgaatagtccggtatcaaattttagtatggtatctgattacggttggactaaaacaaacatgatttaacgttatcacttacccattacgttacaaatatttgaaccaaacggtaccttggtgtttcgcgtgccctttggttggttaagatgtagcctgtgcaaataatgggttctgcggaaataaaatccccatttttctcacccatttgattgattgacgcgagatttgctgttgcgccgttgagcttgtttgccttgaagcgagttcagagtgccatctgtttcctgcagcttatgtaattatcacctggtttcctgtgcttatgtaatcatcatctatgtgtttgattgcctgtactggtgcttgcatcgcgagatgcaatgagctggtgtttggttgttgtcaatcaggc

SEQ ID NO: 22166 - DNA, 2435 bp, Zea Mays
aatcgagttggatctgacaaatgggtgccccattccagattagtttgtgcagaagtcttcaattgtttaaaattgaactattttgtgtggctgtcctgaataacaaaaacagtggatatggcagatatgagaagctgttacgataacttgctttctgttgctgcagcaattgcaaatagtgcatatgagttctctgaagcacttcaagaaatgggaacttgtttgcttaaaagagttacgccaaataaggatggaataaatgataaagttttgctgttgcttgggaaatcacaatttgaacttcggaaacttttagatagttatcgtgtgcatgttcttaacaccatcaccactccatcgctgtcgcttcttaatgaacttcaaactgtggaggaaatgaagcaccaatgcgatgaaaaaaaagaattgtatgaattcatggtaaacacgcagaaagaaaagggaaggtctaagaatgctaaaggtgataatggagcatcagagcaattgaaacaagctcaggaagattatcaagaggaagcaactctttttctattccggttgaagtcattgaagcaaggacagttccgaagtctttttacacaagctgctcggcatcatgctgcacagctaaatttgttccgaaagggagtcaagtcccttgaggctgtagagccacatgttaggctcgctgctgagcagcaacacattgatcatcagttcagcgcacttgaggaagaggattaccttgttgaggatgaaaatgatgacgattacaatggcagtcatgatggagagttatcttttgattatggagaaaataaggaagttgaggaatctggtaatgcttctaggaatcatacagagggtttttttaacagaagcaaagaagagtattcttctgttccacatgaaagacaaagaatcgtaagtcagtcagcaccactttttcctgagaaaaagctcaatacagaagagagaataaaagatttgcggcgttctgcaacaaggaagttgaatacttatgttttgcctactccaaatgacgttggagctacttctcagagagcatcaggaaatcctacttctgaacctctcgagagtaaaggtgccttccattcatctccactccactcatctgcagacataagagatttgggagacagtaatctacctagtcctacaagattgtctaacgtacagtctgtgctgaaagatagcaataccaataaaacagaaacaaggaaagtactcccagtgggtgatctggctttacctagctatcatgacctgaagacttctgataacaaaaaagtgaaaagagggtcattttctggcccaatagcttccagaccacggtcaacagagaacattgatgttatttctgcagcgcctaggcatagctcagcacatcagccagtgcacatgagagtatcccccggcaactcgccgccacccatttcctcaccgaagatcaaggaacttcatgagcttcctcgaccacctgttaatacatcaaaaaatatagcattccccagtttagttgcccactccgccccattggcaccaaatcctgcatctttgactcccaaagttcaagatcattttaggacaaaacaaacgctccaaagaactgcttcacctttaccaactccaccacctggatctatagcccgcagtttttctataccttctaggggtatttcagacagtaaagagacagaagatcaacacaagggagctgccagaatgagtctttcttctcttccttcagcacaaacattcttggaagatcgtcagccattgtcatcagctgctggatcggtcagcaaaacataggagtattctctattatcattatcaagcagctcgccgagccctcttcctgaaagaatgttgtacatattagcatttgaactctggccagtatcgcggaagaagttgggtgctgtttggttcacgaaatgtaacgtaaagggtaatggtaacggtttacactcgattacggacggtaacaagtttgaatagtccggtatcaaattttagtatggtatctgattacggttggactaaaacaaacatgatttaacgttatcacttacccattacgttacaaatatttgaaccaaacggtaccttggtgtttcgcgtgccctttggttggttaagatgtagcctgtgcaaataatgggttctgcggaaataaaatccccatttttctcacccatttgattgattgacgcgagatttgctgttgcgccgttgagcttgtttgccttgaagcgagttcagagtgccatctgtttcctgcagcttatgtaattatcacctggtttcctgtgcttatgtaatcatcatctatgtgtttgattgcctgtactggtgcttgcatcgcgagatgcaatgagctggtgtttggttgttgtcaatcaggc

SEQ ID NO: 22167 - DNA, 1248 bp, Zea Mays
agaaaccggtttttaaaaactaagataaaaaaccagttttttataaactacaacgcttccaaacggtgccgtaatcgaccccaccgggccaccgttccttgccaactgccaagcatcaccgcgaaatctaataactcgttgctcttcgtcttcgctccgcgatcgatccaggagggggaagcagaaggagggatggcggagaacccgcagctgtttgggaatgggatgccggtgccgttctacagtgagatgttcgtcctcgcccgggatggcgtcgagttccacgtcgacaagatcccatcaggaggatatatctccaggacaggatgcagaagacccactaacatgtacctttccaaacaacatatgcagaattaagagctcctggtggtcatgtgaaaacaaaaggcacaatttacctgtctaatataaggatggtgtttgttgccaacaagcatgttggcaacttctttgcttttgatatgccactgttgtttgtgcacggtcagaagttcaatcagccaatatttcactgcaacaacatctctggattcgttgagccagttgttccagacaaccagaacagggccctgtactcaactcacaccttcaaggtcttgttcaaggacggcggctgtggtactttcgttcctctgttcctcaacctgactgcatctgtgcggcgctacaaccagtttgaaacccagtctgctgctagcatggcacctcgtgtggaccctctgcaagctgtgcagactcctgttgatgacatgatgcgtcatgcgtatgttgacccaaacgatcctaccaagatcttccttcagcaacctgcgccagaatcgcagctgaggaggaggaactaccacggcccagctgatgcaaattagcgcttggctggattggcagaactcatgctcaattaagtgctgtgtccatttgagcatttcacctatccttgtcgtttaccacaactgacttcaatattcgggtacccctgggtcctgtgaccttacatatatagtacataatgttgcgagttctcgcaatatgtaatgtacataagtggcgtgttcatatattattgctggagcctggagggtcaacttggatgtgggttgcttggatattgctgatctgctggtgctgcatgtttctctgaatctatcattgttcttgttcggggcttgtggggaactcggagtcgtttgtactttgtaggttgactagatcaggcggcgcccattcggg

SEQ ID NO: 22168 - DNA, 2928 bp, Zea Mays
gcccattgttacctgtctcggctgctcctccacgacaggaaaccctgtaccaaaaccctcgtcactccatcctcgtccctcccggcgccggaaaaaccagttcgcgtccatcctcctcccctcccacttcgccatggaccccagcttccggttcgacccggacagctccgacgacgaggcggcgggtgctccaccgcggggcggcccggtgcagtcgccgtgggagttctcgtcgtacgcggagtccgtggcggcggagcacgcgcgccgccgcaccacctccatcgacgagaaaatctcgctcctgcgccaggaacgcgggaatcccgtcgttcccgatgactcggggagcgacgtgagcggcagcggggaggatgatagcgacgacgaggagatagagggggagagcggtgacgaggaggacgagctggagattgaggggagtggcgatgaggaggcgatcggcgatagggagggcgatgaggacgggggtgacgagaagggaggaggcgagctgggagaagaggatgatgcccatgaggaagaagatacggtcgatcagaatgacacgagtggaccagttgatccttctaattttttctcttcttcggatcgggcatcatttcatgcaaattcattccttgagcttaacttgtctcgtccgctagtgcgagcttgtgaagcacttggctaccagaaaccaactccgattcaggctgcttgcattcctctggcattaactggaagggacatctgtggtagtgctattacaggatctggaaagctgctttctctttgcctgtgttggaacgtctactttttcgtccaaagcgtgtacctgcaattagggtgcttattcttactccaaccagagagttggctgctcagattcatagtatggttgagaagttagcccaattcactgatatcagatgttgtctcatcgttggaggtctttcaactaagattcaagaagttgctctaaggtcaatgcctgacatagttgtagcaacccctgggcgcataatagatcatctgcgcaattctctttctgttgggcttgaagatctagctgttgtgatccttgatgaggctgatcgcttgcttgaattgggcttcagtgctgaaattcaagaactgattcgtatgtgtcctaaaaggaggcaaactatgcttttctctgctacaatgacagaagaaattgatgaacttgtaaagctttcactaaacaagcctgtacgccttgaagctgatccttctctgaaacggcctgcaacattgactgaagaggttgttaggatacgacgagcacgtgagtcaaatcaagaagctgttcttcttgcactctgtttgaagactttcaagcgaagtgttatcatttttagtgggacaaagcaatctgcacacaggttaaaaataatatttggtctctctggcatgaaagcagctgaacttcatggcaaccttacacaggcccagcggcttgaggctctggaacttttcaagaaaaaagaagtagattttttgattgcaactgatgtcgctgctcgtgggattgatattgttggtgttcagactgtaataaatttcgcatgcccaagagatgtgaaaacttatcttcatcgtgttggccgcactgcgcgggcaggaagagaaggctatgctgtgacatttgtaaccgatgatgatagatgcctcttgaaagcaattgcaaagaaggctggttcacagctgaaaagtcgcattgttgcagagaaacctgtggctgagtgtgcacgactgattgagcaactagaaggccaaatttctatcatcattcgagaagaaagggtggaaagagaagcaagaaaagctgaaatggaaatcgcaaaggcagaaaatatgatagctcataaggatgagatatactcacggccaaagagaacctggtttgctactgaaagggagaagaaacttttggcagcagcggctaaagaatctttggatcacggtaagagtacctctggagttattagtgctaagaaggccgaagaccttcgtctaaaggagaaaaggagacgagaacatgagaagaatctaccaaggaagaagcgccgaagattggaggcccagcgtgagatgttggaagatgaggatgacgagaaaacaaaggaaaatgatagagggaagcaaccaatgaaaggccaatctctagtggatgctgcttaccgaaaggcaaaatcattgaaggcagccagcaaacgggcccctggtgcaaggaaaggaaagaaagagaagaatgaaaggcaacattctgagaaggctccgaacaggcatgaagagatgcgtgacctgttccaaaatgatatgagtgaatggaaacagggacgctcctcaaagaaaaataacaaatttgcgcccaaaaaatcaaggaactcttttaagagcaaagcaaggtacaagcggaagtagaagactcggccatctccgggtttatattacattcccttgtttcaattttgactgactgatcctgaagaaatatctgggatccagatgtttgcagttaattcaagtttgctttaaacatattctcatatcatgtattgaaactcaccgttttctggggtctcttatgatctcgcgaactgtgttgccgttttgtagttcgtaccatcttaaattttagggttatttggtttctatagacttagcttttaggacccgtttggtttgagctattaaagagtagtcccttcgttttagtcccatttagcatataaattgccaaatgatatgactaaaatagcgactaaactgctttagactctggtctcattaagggtgactaaaagagactaaaggaaataattaggtcttagcgatttagagactaaagtggagtaaaatagatggactaaaaaatagttactagaaaccaaacacctt

SEQ ID NO: 22169 - DNA, 2932 bp, Zea Mays
ccattgttacctgtctcggctgctcctccacgacaggaaaccctgtaccaaaaccctcgtcactccatcctcgtccctcccggcgccggaaaaaccagttcgcgtccatcctcctcccctcccacttcgccatggaccccagcttccggttcgacccggacagctccgacgacgaggcggcgggtgctccaccgcggggcggcccggtgcagtcgccgtgggagttctcgtcgtacgcggagtccgtggcggcggagcacgcgcgccgccgcaccacctccatcgacgagaaaatctcgctcctgcgccaggaacgcgggaatcccgtcgttcccgatgactcggggagcgacgtgagcggcagcggggaggatgatagcgacgacgaggagatagagggggagagcggtgacgaggaggacgagctggagattgaggggagtggcgatgaggaggcgatcggcgatagggagggcgatgaggacgggggtgacgagaagggaggaggcgagctgggagaagaggatgatgcccatgaggaagaagatacggtcgatcagaatgacacgagtggaccagttgatccttctaattttttctcttcttcggatcgggcatcatttcatgcaaattcattccttgagcttaacttgtctcgtccgctagtgcgagcttgtgaagcacttggctaccagaaaccaactccgattcaggctgcttgcattcctctggcattaactggaagggacatctgtggtagtgctattacaggatctggaaagacagctgctttctctttgcctgtgttggaacgtctactttttcgtccaaagcgtgtacctgcaattagggtgcttattcttactccaaccagagagttggctgctcagattcatagtatggttgagaagttagcccaattcactgatatcagatgttgtctcatcgttggaggtctttcaactaagattcaagaagttgctctaaggtcaatgcctgacatagttgtagcaacccctgggcgcataatagatcatctgcgcaattctctttctgttgggcttgaagatctagctgttgtgatccttgatgaggctgatcgcttgcttgaattgggcttcagtgctgaaattcaagaactgattcgtatgtgtcctaaaaggaggcaaactatgcttttctctgctacaatgacagaagaaattgatgaacttgtaaagctttcactaaacaagcctgtacgccttgaagctgatccttctctgaaacggcctgcaacattgactgaagaggttgttaggatacgacgagcacgtgagtcaaatcatgggacaaagcaatctgcacacaggttaaaaataatatttggtctctctggcatgaaagcagctgaacttcatggcaaccttacacaggcccagcggcttgaggctctggaacttttcaagaaaaaagaagtagattttttgattgcaactgatgtcgctgctcgtgggattgatattgttggtgttcagactgtaataaatttcgcatgcccaagagatgtgaaaacttatcttcatcgtgttggccgcactgcgcgggcaggaagagaaggctatgctgtgacatttgtaaccgatgatgatagatgcctcttgaaagcaattgcaaagaaggctggttcacagctgaaaagtcgcattgttgcagagaaacctgtggctgagtgtgcacgactgattgagcaactagaaggccaaatttctatcatcattcgagaagaaagggtggaaagagaagcaagaaaagctgaaatggaaatcgcaaagagccgtgcttcagagttctgaatacatttgtacctttgccattgcacatttgaatatacaaggcagaaaatatgatagctcataaggatgagatatactcacggccaaagagaacctggtttgctactgaaagggagaagaaacttttggcagcagcggctaaagaatctttggatcacggtaagagtacctctggagttattagtgctaagaaggccgaagaccttcgtctaaaggagaaaaggagacgagaacatgagaagaatctaccaaggaagaagcgccgaagattggaggcccagcgtgagatgttggaagatgaggatgacgagaaaacaaaggaaaatgatagagggaagcaaccaatgaaaggccaatctctagtggatgctgcttaccgaaaggcaaaatcattgaaggcagccagcaaacgggcccctggtgcaaggaaaggaaagaaagagaagaatgaaaggcaacattctgagaaggctccgaacaggcatgaagagatgcgtgacctgttccaaaatgatatgagtgaatggaaacagggacgctcctcaaagaaaaataacaaatttgcgcccaaaaaatcaaggaactcttttaagagcaaagcaaggtacaagcggaagtagaagactcggccatctccgggtttatattacattcccttgtttcaattttgactgactgatcctgaagaaatatctgggatccagatgtttgcagttaattcaagtttgctttaaacatattctcatatcatgtattgaaactcaccgttttctggggtctcttatgatctcgcgaactgtgttgccgttttgtagttcgtaccatcttaaattttagggttatttggtttctatagacttagcttttaggacccgtttggtttgagctattaaagagtagtcccttcgttttagtcccatttagcatataaattgccaaatgatatgactaaaatagcgactaaactgctttagactctggtctcattaagggtgactaaaagagactaaaggaaataattaggtcttagcgatttagagactaaagtggagtaaaatagatggactaaaaaatagttactagaaaccaaacacctt

SEQ ID NO: 22170 - DNA, 2879 bp, Zea Mays
ccaaaaccctcgtcactccatcctcgtccctcccggcgccggaaaaaccagttcgcgtccatcctcctcccctcccacttcgccatggaccccagcttccggttcgacccggacagctccgacgacgaggcggcgggtgctccaccgcggggcggcccggtgcagtcgccgtgggagttctcgtcgtacgcggagtccgtggcggcggagcacgcgcgccgccgcaccacctccatcgacgagaaaatctcgctcctgcgccaggaacgcgggaatcccgtcgttcccgatgactcggggagcgacgtgagcggcagcggggaggatgatagcgacgacgaggagatagagggggagagcggtgacgaggaggacgagctggagattgaggggagtggcgatgaggaggcgatcggcgatagggagggcgatgaggacgggggtgacgagaagggaggaggcgagctgggagaagaggatgatgcccatgaggaagaagatacggtcgatcagaatgacacgagtggaccagttgatccttctaattttttctcttcttcggatcgggcatcatttcatgcaaattcattccttgagcttaacttgtctcgtccgctagtgcgagcttgtgaagcacttggctaccagaaaccaactccgattcaggctgcttgcattcctctggcattaactggaagggacatctgtggtagtgctattacaggatctggaaagacagctgctttctctttgcctgtgttggaacgtctactttttcgtccaaagcgtgtacctgcaattagggtgcttattcttactccaaccagagagttggctgctcagattcatagtatggttgagaagttagcccaattcactgatatcagatgttgtctcatcgttggaggtctttcaactaagattcaagaagttgctctaaggtcaatgcctgacatagttgtagcaacccctgggcgcataatagatcatctgcgcaattctctttctgttgggcttgaagatctagctgttgtgatccttgatgaggctgatcgcttgcttgaattgggcttcagtgctgaaattcaagaactgattcgtatgtgtcctaaaaggaggcaaactatgcttttctctgctacaatgacagaagaaattgatgaacttgtaaagctttcactaaacaagcctgtacgccttgaagctgatccttctctgaaacggcctgcaacattgactgaagaggttgttaggatacgacgagcacgtgagtcaaatcaagaagctgttcttcttgcactctgtttgaagactttcaagcgaagtgttatcatttttagtgggacaaagcaatctgcacacaggttaaaaataatatttggtctctctggcatgaaagcagctgaacttcatggcaaccttacacaggcccagcggcttgaggctctggaacttttcaagaaaaaagaagtagattttttgattgcaactgatgtcgctgctcgtgggattgatattgttggtgttcagactgtaataaatttcgcatgcccaagagatgtgaaaacttatcttcatcgtgttggccgcactgcgcgggcaggaagagaaggctatgctgtgacatttgtaaccgatgatgatagatgcctcttgaaagcaattgcaaagaaggctggttcacagctgaaaagtcgcattgttgcagagaaacctgtggctgagtgtgcacgactgattgagcaactagaaggccaaatttctatcatcattcgagaagaaagggtggaaagagaagcaagaaaagctgaaatggaaatcgcaaagaaaatatgatagctcataaggatgagatatactcacggccaaagagaacctggtttgctactgaaagggagaagaaacttttggcagcagcggctaaagaatctttggatcacggtaagagtacctctggagttattagtgctaagaaggccgaagaccttcgtctaaaggagaaaaggagacgagaacatgagaagaatctaccaaggaagaagcgccgaagattggaggcccagcgtgagatgttggaagatgaggatgacgagaaaacaaaggaaaatgatagagggaagcaaccaatgaaaggccaatctctagtggatgctgcttaccgaaaggcaaaatcattgaaggcagccagcaaacgggcccctggtgcaaggaaaggaaagaaagagaagaatgaaaggcaacattctgagaaggctccgaacaggcatgaagagatgcgtgacctgttccaaaatgatatgagtgaatggaaacagggacgctcctcaaagaaaaataacaaatttgcgcccaaaaaatcaaggaactcttttaagagcaaagcaaggtacaagcggaagtagaagactcggccatctccgggtttatattacattcccttgtttcaattttgactgactgatcctgaagaaatatctgggatccagatgtttgcagttaattcaagtttgctttaaacatattctcatatcatgtattgaaactcaccgttttctggggtctcttatgatctcgcgaactgtgttgccgttttgtagttcgtaccatcttaaattttagggttatttggtttctatagacttagcttttaggacccgtttggtttgagctattaaagagtagtcccttcgttttagtcccatttagcatataaattgccaaatgatatgactaaaatagcgactaaactgctttagactctggtctcattaagggtgactaaaagagactaaaggaaataattaggtcttagcgatttagagactaaagtggagtaaaatagatggactaaaaaatagttactagaaaccaaacacctt

SEQ ID NO: 22171 - DNA, 977 bp, Zea Mays
tacgtgggagccaccagcactgggaatctttggatcacggtaagagtacctctggagttattagtgctaagaaggccgaagaccttcgtctaaaggagaaaaggagacgagaacatgagaagaatctaccaaggaagaagcgccgaagattggaggcccagcgtgagatgttggaagatgaggatgacgagaaaacaaaggaaaatgatagagggaagcaaccaatgaaaggccaatctctagtggatgctgcttaccgaaaggcaaaatcattgaaggcagccagcaaacgggcccctggtgcaaggaaaggaaagaaagagaagaatgaaaggcaacattctgagaaggctccgaacaggcatgaagagatgcgtgacctgttccaaaatgatatgagtgaatggaaacagggacgctcctcaaagaaaaataacaaatttgcgcccaaaaaatcaaggaactcttttaagagcaaagcaaggtacaagcggaagtagaagactcggccatctccgggtttatattacattcccttgtttcaattttgactgactgatcctgaagaaatatctgggatccagatgtttgcagttaattcaagtttgctttaaacatattctcatatcatgtattgaaactcaccgttttctggggtctcttatgatctcgcgaactgtgttgccgttttgtagttcgtaccatcttaaattttagggttatttggtttctatagacttagcttttaggacccgtttggtttgagctattaaagagtagtcccttcgttttagtcccatttagcatataaattgccaaatgatatgactaaaatagcgactaaactgctttagactctggtctcattaagggtgactaaaagagactaaaggaaataattaggtcttagcgatttagagactaaagtggagtaaaatagatggactaaaaaatagttactagaaaccaaacacctt

SEQ ID NO: 22172 - DNA, 1449 bp, Zea Mays
ctcctatctactcaccccgatgaagcccaactacgctccagaggataaagcccagcccacactccgcatttagcaatccgaactgcttgccgccgtcagccaccacctcgtcggcgtcggaggccaccgcccaccgtcctataccctccactccatccaaggaggagaaaacgaacccagcctcacccaggctcgttcagacgccgaccaacgcgatcgcttcctccgacgcctcccgcgctctccacgaacaactggtatcgctgcagtgccaaacggtgatcggccggggccgcctggttcaaacttcaaagcaaacttcgattcgcatctcgccggttgagtttcataggcgcgttgcctgatgtatcctagttggaatggacgctggctgctgggtgtgtgaggcccttagcaggtaacttggagggatgggcgtgggccggccaatctgctagttgtagatggcgcgttatctgaagacgcagaatggccacgtccatgtggtatggtctcctttctatttggagaatccaccaagcagattttatactttattaagattttgtgatacttgaacttaaacaccaacgatttgttgtaaatgagcacttattctcataatgaaactcagtaatctttattgaggtgggtaacataggaagatgaccttcaaatgctagtttgttccatatgatatgagtcaattactctagaacctaactgtcaactaacatctcatatgttttcaactattttaggtggactaatttctgaattgtgaatggtactgcctccatgtagatgtttctctgaatcttttcttcagcttgatcccagaaacctgttaaaccaaccatacaatattgttaagaaatggtgtttaatggaactgttctcctagaataagatgcctgatttcttgtgtcattgtaaccagaacacgaacaggtgaggggtcgttgtgatagtgaatttatgtgtgcctctttcttgcataggcttgtatcactaatttattgaaatagacattgtatgaagaggtgacgaagcatttcatcacccattgacttagaaagagatctttttttgtaataatgctagaggcaccactcaaaatacatagtttgcttatggcctttaagaccttaggaaagaacactcctatcctaaaaggaatttgttcgaaaccaaagaaattgaggcgttaaacttttgttcactatataatatcatcaaggaaatgtatttattttagatttagagtattcctaaattttgatgcttcattctttgttgactttgtgcttgtgttagatgagatactaatgcctaatgaaccaaccattgttatctatctagagagaggacccttttggatttgtatgatttagtgtctatataacatctactgttgtattaatgtattattctaaaacataaagtttc

SEQ ID NO: 22173 - DNA, 3924 bp, Zea Mays
ctcctatctactcaccccgatgaagcccaactacgctccagaggataaagcccagcccacactccgcatttagcaatccgaactgcttgccgccgtcagccaccacctcgtcggcgtcggaggccaccgcccaccgtcctataccctccactccatccaaggaggagaaaacgaacccagcctcacccaggctcgttcagacgccgaccaacgcgatcgcttcctccgacgcctcccgcgctctccacgaacaactggtatcgctgcagtgccaaacggtgatcggccggggccgcctggttcaaacttcaaagcaaacttcgattcgcatctcgccggttgagtttcataggcgcgttgcctgatgtatcctagttggaatggacgctggctgctgggtgtgtgaggcccttagcaggtaacttggagggatgggcgtgggccggccaatctgctagttgtagatggcgcgttatctgaagacgcagaatggccacgtccatgtgttgaagtataatgcagcaactggtgctccaagattgtaaattgccgagaagtctctgatgttgaaattttgccgccatcctggtgcataaactgtttgtcttgcttgctgtttgaacagcacaaaaacaattcgatgaattccagctggtggccttgggctttcatagggaactatttcattgcctgaaaaaagcatgtattccttattagaatgctttgctataattttttaggttaatcctagcattaaccattttgtgctaatgacttttgtaattgtaactgttttttcactacctgctgtcctcaacattgtgttcagttggcaccatgccacccccccccccccaacacacacacacaaagaaaatcaacacatccacccacccaaaaagaaaagaaatacacacacgataggttctgatgatgaagttattgctacctatagcatattaaatgtagacccttatagcttctacaatcaaaagtaaattaaatatcaaagcttaccatatataatgtacatgtgtaatatccccattattgagagtataaatcataaattcacaaaaaacatgaggtctattatgattatgatgtgctagttttatttcatttgtttaaaatgttcttaacttttttcttacagtcagaagtttttctatctgccagcctaagctgattgggctgctagattgtgcatgaaacatgcattgctaaagatatgtttatgagtctacagtaatgcttcctgattttgaagaaatccctggtgcaatttaaaatttgtcacagaagtagttctgtagttgtataattgataacaagggagttgagctagctcagttggtcaagccaagagtgtggatgtatgaccagaccacctaggttgaagtcctcatggaggcaaattttgatgcctattttctttttaataaaatgccacctacattcttctaggttgatctatttttttatgtatgcaacaattgataaccattaatatgtttgatatcatcatgctaatatatagtatttttgagatctggttgaaagcttcctgaaggagacatctaggtcatgaaacatttttgacaccttatagtatcgtatttaatttaaacactaagctcaatttcatttttgtctagaatggaagttctaatgcgtgacattctgaaggacatctcaaagatttaatatatagctgcaacctttatttttgtgggcgcacacagaagataccattagttgagcattgtatattgtcatgcaatgaattaggtaacaatagccatctactttatttcctgtagaagtctcaccacactgactaaagtgatcaagtggatcccacagaaaataccatgatgtcagatcctcaacttgagatccttaacctgcatcaaaataggtgtcgtcacatattagagtggggtccccctctcggtgctggaaactcccacgtgagtggggctggggtctgaggaagggataaaccgaggcaacccttctccacaaatgcggagaggctgcttcgaacccacggcctggtgacacattgagacaactctcaccattgcaccaggtctaccctgccttcacatttgactcttaggtatgcagtattaaaatggttcttagtaagtttagtcttcaataaaatcatctatcctaatcttttcaattgctgaatgacgatgaatccaaaaggtaggaggattatgaattttcattcaaaagaaacaagcggtagccactatggcaattaaggagattgaaccaaaccacaatgacttatgagatgaaagtgtctgattttttctttaacctattaaattcacctagcatgcacttggccagaaagtatttgatgtagatgtcggcttctggtattttacatgacaccacttgcaactagtatgtgaataatttagacaaatttagttcactacaaaaattcttgaacttactataagtccatgcatctttcttcaaatattgatgtcatcagtaataagcatggatgccaggcataatagcatgcacgcaacataagataaatgtgtaaaggttttaatataaatgatgtgttacatagcatctttgaaacaaaattcacatcaccatttgctcaccaaagcagttacttcgtcaaagcattttacctctttcacatcaattgttttggcaaattctacaatctagatgttacatttgcaatagtgattcttccatagttacttaaatcctttactatcatcagatgttttgtcatttgacatacatttaactggccacatgttcattgtgacattgtcacatttccaagagcaaggtgctggtgaaatgtttaaatttagtggaagatgatatatattatgtatatttaattaagacgcaacatgaatctggagttgtttgcgttttatgtgaaacaataatgttcaaagatctggagttgtttggaagtagtcctaaaaaaagtttaaagatctgtgccttaaatgctaattcataagaagaggtcaggtaaggttttacccaccagaacatatgtctcttgcctctggtatatctgttaccaacctgtaaaagaaaataaacaagatgaaaagaagcaagggcatgcctttagatctttgattggtatggtatcaaaattacttatgcaatctagataattaagtaaatagttttaattgtaaaacatacatgaatttggaatattgatgttcatgtagatgtaagagtttaactggtgttttctattaacaatagctgatttgcacattcacaagtcacaagtctagtgtaagcctttatccccatagttttggactatcgaaataagtgtaaaactgtaattgcatgcatgcatatgcaatatctttcatgtcaatcttgtaactaatgccttatctgattaaatgatataacagtttaccttatttttaactgagaattacaatattaaagtagtctagatagaatttgggtccatggctgttctctttaatttatccatgaagtaattaattgacagattttgatatagcagaccaccttgtccatacagagtttgtaaaatatcttcttgacaaatttagaaactattatgctgtaaaaatatctacaatattactcattttatttgtatgctatagatatcaattcaactggaaactaatgttgacaataaaaaacagtctgcacaatgagacttaggttaagcgaattacggtgattgaaaacaaaagttactctatcacagaaactttggtttcttacccaatagcatacataacaagagttcttcagatgttgatggatggaaaagaaacacccccctccttttttgagagggctgcatccaatcctgcaggttatctagatattccctgtactctggtttgc

SEQ ID NO: 22174 - DNA, 2121 bp, Zea Mays
agcagttctttgtaaatttatattagttgtgaagcatccactttatgttcacaacattccattgagcactataagaagatagaatcttacttttaatatatcattatttttccttatatttgcttctttgttgcatggacatgtagagtacctatcaacctccagatggcctagttgtagttgaacctgcacgatctttgtgaatgatatctatggtcagtttttcatgcatatattctccaaagacaggaggtatgtttaaagcttcaagagttagcctcccctgcatggcgccttgcctgggcttggccaaaggttcacgatgtgccatttgatgttcaacgatacttctcttgagtggtgagcacatagatgtagaaagattctttggatcaacatcacaatgcagcagtacgaaacctggggaggtagagccaggtcattagcaatcttctttcttctcttcattttcttttccttgacggcaattgaagtatcaagcacttccctcttgacccttgcttgaaaactgttctgtggacttgtttcataaggccttagttcatgctcttgtctacaatgtccccatacattacatacatgacttctctgttcattttcagttttaaatgtctattttcatggtctagtgtgtgtttccatttaccattgtgccattgtcatatattcacatgttggtactttgcccctcgtccgcacaatacaaatgtatgcatgtagaggattattcggaccaaactgggaccaaagaagcatctcctggcctgaatcgacacatcagtgtcttaatatcatcagatggacttattccagattcctcacgacatttaaaatgtctatgcaagaagaaattacactttcgatggtgtgaatgggcattcagaacttctgagaatagactcatcataccatggagattgcattgaagttgtttcaggcggaacaccacattctgcctcggacctccacagaagcctcaatatgtgcaactgccataaacaattcatgcagatttgttttcttctttcagcagggaataaaagggttctcatttcgttccagcgatcataacaaccgcacagagacagactgcaaactagtttttgactattagataactactactttggacgtgtcctctgggaaagttgcttgaaggcatgcaagtttgcagtgagaacacaaaacccttttgaagggaatatactcaacgtctaacgatctcttggaataaaggcagtataggtactgtcctgcagatcagatgggcatctccaccaggacgtttgcaagcagaaaggtagaagatcacctttgaactttgaaagttctgacatcccgagggggcaaaaggcgccagggaatttctcccgcactgcaaacagcctacacccagatccagcttctgtggatgaactcttgccatgccagacgttggtcctccttctctgctccttctataatgttcaccagccagctggaaatgctgctaaagtcagtacataattttgagctgccaatagctaatcctggagtcctgggaccctatgctttcttgctgtctgcaaatttatttgtcacaagcttacatgattgaattctggcattgaattggatggttggcatcaccaattcgtcatgtcaattcttcaaatttacaatgcatgatggttctagtgggaagtgaatgaagacgaggtgaacgtctgcggtacagtaagatgagtttggacaacgtgtgcggaaaaggacgagagctcgcttgcactccatcgatactgtctacaggctaaaggtaacaagaacgaggtcaaaggaaacgccaagcagcaatagctagcgtcttacaaaatgtcgattcgacacagaataatcaatccatacgttgatgtgatgccaaagtagaataaggctatagatgtaatattactcaatttccatgcggggctatttcgaccgggtggattcggcatttacgctctctccaactattctctctatacaccttccctaatctatgctttctaatatattttactatttttaaaaaaaaatctatatatctcctctgtacactctaacttaattatttaatatttg

SEQ ID NO: 22175 - DNA, 2172 bp, Zea Mays
atcaacctccagatggcctagttgtagttgaacctgcacgatctttgtgaatgatatctatggtcagtttttcatgcatatattctccaaagacaggaggtatgtttaaagcttcaagagttagcctcccctgcatggcgccttgcctgggcttggccaaaggttcacgatgtgccatttgatgttcaacgatacttctcttgagtggtgagcacatagatgtagaaagattctttggatcaacatcacaatgcagcagtacgaaacctggggaggtagagccaggtcattagcaatcttctttcttctcttcattttcttttccttgacggcaattgaagtatcaagcacttccctcttgacccttgcttgaaaactgttctgtggacttgtttcataaggccttagttcatgctcttgtctacaatgtccccatacattacatacatgacttctctgttcattttcagttttaaatgtctattttcatggtctagtgtgtgtttccatttaccattgtgccattgtcatatattcacatgttggtactttgcccctcgtccgcacaatacaaatgtatgcatgtagaggattattcggaccaaactgggaccaaagaagcatctcctggcctgaatcgacacatcagtgtcttaatatcatcagatggacttattccagattcctcacgacatttaaaatgtctatgcaagaagaaattacactttcgatggtgtgaatgggcattcagaacttctgagaatagactcatcataccatggagattgcattgaagttgtttcaggcggaacaccacattctgcctcggacctccacagaagcctcaatatgtgcaactgccataaacaattcatgcagatttgttttcttctttcagcagggaataaaaggtgaggtgcactgcctactacattatgtacgttctgctctactttatactctaaaagccatcctctgccttatattccgctttgtcgtcaagtacaccgtgctttctcaggcttctttcacctttttttctgaatagcatataagactatatactggagtgtaagcaacaaatgtatgaaaatcaatacatgcttatgcatcagggttctcatttcgttccagcgatcataacaaccgcacagagacagactgcaaactagtttttgactattagataactactactttggacgtgtcctctgggaaagttgcttgaaggcatgcaagtttgcagtgagaacacaaaacccttttgaagggaatatactcaacgtctaacgatctcttggaataaaggcagtataggtactgtcctgcagatcagatgggcatctccaccaggacgtttgcaagcagaaaggtagaagatcacctttgaactttgaaagttctgacatcccgagggggcaaaaggcgccagggaatttctcccgcactgcaaacagcctacacccagatccagcttctgtggatgaactcttgccatgccagacgttggtcctccttctctgctccttctataatgttcaccagccagctggaaatgctgctaaagtcagtacataattttgagctgccaatagctaatcctggagtcctgggaccctatgctttcttgctgtctgcaaatttatttgtcacaagcttacatgattgaattctggcattgaattggatggttggcatcaccaattcgtcatgtcaattcttcaaatttacaatgcatgatggttctagtgggaagtgaatgaagacgaggtgaacgtctgcggtacagtaagatgagtttggacaacgtgtgcggaaaaggacgagagctcgcttgcactccatcgatactgtctacaggctaaaggtaacaagaacgaggtcaaaggaaacgccaagcagcaatagctagcgtcttacaaaatgtcgattcgacacagaataatcaatccatacgttgatgtgatgccaaagtagaataaggctatagatgtaatattactcaatttccatgcggggctatttcgaccgggtggattcggcatttacgctctctccaactattctctctatacaccttccctaatctatgctttctaatatattttactatttttaaaaaaaaatctatatatctcctctgtacactctaacttaattatttaatatttg

SEQ ID NO: 22176 - DNA, 1776 bp, Zea Mays
aacctccagatggcctagttgtagttgaacctgcacgatctttgtgaatgatatctatggtcagtttttcatgcatatattctccaaagacaggaggtatgtttaaagcttcaagagttagcctcccctgcatggcgccttgcctgggcttggccaaaggttcacgatgtgccatttgatgttcaacgatacttctcttgagtggtgagcacatagatgtagaaagattctttggatcaacatcacaatgcagcagtacgaaacctggggaggtagagccaggtcattagcaatcttctttcttctcttcattttcttttccttgacggcaattgaagtatcaagcacttccctcttgacccttgcttgaaaactgttctgtggacttgtttcataaggccttagttcatgctcttgtctacaatgtccccatacattacatacatgacttctctgttcattttcagttttaaatgtctattttcatggtctagtgtgtgtttccatttaccattgtgccattgtcatatattcacatgttggtactttgcccctcgtccgcacaatacaaatgtatgcatgtagaggattattcggaccaaactgggaccaaagaagcatctcctggcctgaatcgacacatcagtgtcttaatatcatcagatggacttattccagattcctcacgacatttaaaatgtctatgcaagaagaaattacactttcgatggtgtgaatgggcattcagaacttctgagaatagactcatcataccatggagattgcattgaagttgtttcaggcggaacaccacattctgcctcggacctccacagaagcctcaatatgtgcaactgccataaacaattcatgcagatttgttttcttctttcagcagggaataaaagaaaggcagtataggtactgtcctgcagatcagatgggcatctccaccaggacgtttgcaagcagaaaggtagaagatcacctttgaactttgaaagttctgacatcccgagggggcaaaaggcgccagggaatttctcccgcactgcaaacagcctacacccagatccagcttctgtggatgaactcttgccatgccagacgttggtcctccttctctgctccttctataatgttcaccagccagctggaaatgctgctaaagtcagtacataattttgagctgccaatagctaatcctggagtcctgggaccctatgctttcttgctgtctgcaaatttatttgtcacaagcttacatgattgaattctggcattgaattggatggttggcatcaccaattcgtcatgtcaattcttcaaatttacaatgcatgatggttctagtgggaagtgaatgaagacgaggtgaacgtctgcggtacagtaagatgagtttggacaacgtgtgcggaaaaggacgagagctcgcttgcactccatcgatactgtctacaggctaaaggtaacaagaacgaggtcaaaggaaacgccaagcagcaatagctagcgtcttacaaaatgtcgattcgacacagaataatcaatccatacgttgatgtgatgccaaagtagaataaggctatagatgtaatattactcaatttccatgcggggctatttcgaccgggtggattcggcatttacgctctctccaactattctctctatacaccttccctaatctatgctttctaatatattttactatttttaaaaaaaaatctatatatctcctctgtacactctaacttaattatttaatatttg

SEQ ID NO: 22177 - DNA, 1739 bp, Zea Mays
cttctctcttcttattcagttctgtttcgtgccaatcagacggcggccgcctcctctccccccgctgccgagctcacccttccgcctgccgcctgaacttgtctcgcccgcggcagatctgctccttccgctcgctgcaccgcaacccggataggagaccgcgcgcggtcgagaactacctggggaccaacgtcctcgaccagctccggtgcggccggcacacagctccacagatttggacagcgcaattacttaagctatttgtattcggatctgatccaaccctggtggtcagctggactcatcgcccatggagcacactaagtcaggccccagcagttggccagaactggccgacgtggtgccggtgccgcaggacgatgggcctagccctgtggtgtccatcgcctatcgagatgactttcgtgaggtcatggattacttccgcgccctctacctcaccggtgagcgaagccctcgcgctctccgcctcaccgccgaggccatcgagctcaaccccggcaactacactgtctggcatttccggcgccttattctggagtcactagattttgatttactagaggagatgaaatttgtcgaaaaaattgctgaatgcaatccaaaaaattaccaaatctggcaccataagagatggcttgctgagaaattaggacctggtattgcaaacaaagagcatgaattcacaatgaagatacttgctattgatgcaaaaaattatcatgcttggtctcataggcagtgggttcttcaagcgttggggggatgggagactgaattagaatactgtgaccacttacttaaggaagacgtcttcaataattcagcttggaatcagagatactttgttataacaagatcaccatttcttggtggccttgcggcaatgcgtgattcagaagtagactacacaattgaagctattctagcaaacgctcagaatgaaagcccctggaggtacctcaagggtctatacaagggtgagaataacctgctagtagaggacgagcgcatctctgctgtttgtttcaaggtcctgaagaatgattggacttgtgtatttgctttgagtttgctgctcgatcttctctgcactggtttgcagccttcagatgaacttaggtccactcttgaaacaataaggagctcccatcctgaaaccgcggatgatgatcctgcagccgctgtttgctgtatcctgcagaaatgtgatcccctgcgggtaaattattggtcttggttcaaggacactctttctcagatctcatgacttcacatgggttcaccccttgtccgcgctggtccgggctctgtgagatagacatgttttagatagtttcattggacacccaaacagagcggacagagtgtatggctgctaccttctccgtgactgaaagcagtgcttgtaacgattttgtttagtaaaatttgtgagtgttactgctccaaacaacaccttatgcaaccatatttgaatatttcacatgtaagcttgaatccaggtgtgtttgttaatgtattacaattgccatgggagcctaaatgagacccataatcacttccactagagtcggaagaccgtgtcgagcagttcactcatatggtcacttaaagcactcttctgcactgtaaattgtaatattcgcagagttttaaatatgggtatgacgatgagtacgctgctgaaaatagtctaaccatttgctttgattttc

SEQ ID NO: 22178 - DNA, 1803 bp, Zea Mays
cttcttattcagttctgtttcgtgccaatcagacggcggccgcctcctctccccccgctgccgagctcacccttccgcctgccgcctgaacttgtctcgcccgcggcagatctgctccttccgctcgctgcaccgcaacccggataggagaccgcgcgcggtcgagaactacctggggaccaacgtcctcgaccagctccggtgcggccggcacacagctccacagctggactcatcgcccatggagcacactaagtcaggccccagcagttggccagaactggccgacgtggtgccggtgccgcaggacgatgggcctagccctgtggtgtccatcgcctatcgagatgactttcgtgaggtcatggattacttccgcgccctctacctcaccggtgagcgaagccctcgcgctctccgcctcaccgccgaggccatcgagctcaaccccggcaactacactgtctggcatttccggcgccttattctggagtcactagattttgatttactagaggagatgaaatttgtcgaaaaaattgctgaatgcaatccaaaaaattaccaaatctgattttgcatgaatgattggcaatatcttgactaaatatcttccatagtttttttaaactttgatcatcttttatctttgctctggaaaagtggaaatcatgactaactgttgatggtccaattttattaccaggcaccataagagatggcttgctgagaaattaggacctggtattgcaaacaaagagcatgaattcacaatgaagatacttgctattgatgcaaaaaattatcatgcttggtctcataggcagtgggttcttcaagcgttggggggatgggagactgaattagaatactgtgaccacttacttaaggaagacgtcttcaataattcagcttggaatcagagatactttgttataacaagatcaccatttcttggtggccttgcggcaatgcgtgattcagaagtagactacacaattgaagctattctagcaaacgctcagaatgaaagcccctggaggtacctcaagggtctatacaagggtgagaataacctgctagtagaggacgagcgcatctctgctgtttgtttcaaggtcctgaagaatgattggacttgtgtatttgctttgagtttgctgctcgatcttctctgcactggtttgcagccttcagatgaacttaggtccactcttgaaacaataaggagctcccatcctgaaaccgcggatgatgatcctgcagccgctgtttgctgtatcctgcagaaatgtgatcccctgcgggtaaattattggtcttggttcaaggacactctttctcagatctcatgacttcacatgggttcaccccttgtccgcgctggtccgggctctgtgagatagacatgttttagatagtttcattggacacccaaacagagcggacagagtgtatggctgctaccttctccgtgactgaaagcagtgcttgtaacgattttgtttagtaaaatttgtgagtgttactgctccaaacaacaccttatgcaaccatatttgaatatttcacatgtaagcttgaatccaggtgtgtttgttaatgtattacaattgccatgggagcctaaatgagacccataatcacttccactagagtcggaagaccgtgtcgagcagttcactcatatggtcacttaaagcactcttctgcactgtaaattgtaatattcgcagagttttaaatatgggtatgacgatgagtacgctgctgaaaatagtctaaccatttgctttgattttc

SEQ ID NO: 22179 - DNA, 1547 bp, Zea Mays
ggccgtcgctctaaaaagatcattacgcacacaatctgctgatttggacagcgcaattacttaagctatttgtattcggatctgatccaaccctggtggtcagctggactcatcgcccatggagcacactaagtcaggccccagcagttggccagaactggccgacgtggtgccggtgccgcaggacgatgggcctagccctgtggtgtccatcgcctatcgagatgactttcgtgaggtcatggattacttccgcgccctctacctcaccggtgagcgaagccctcgcgctctccgcctcaccgccgaggccatcgagctcaaccccggcaactacactgtctggcatttccggcgccttattctggagtcactagattttgatttactagaggagatgaaatttgtcgaaaaaattgctgaatgcaatccaaaaaattaccaaatctggcaccataagagatggcttgctgagaaattaggacctggtattgcaaacaaagagcatgaattcacaatgaagatacttgctattgatgcaaaaaattatcatgcttggtctcataggcagtgggttcttcaagcgttggggggatgggagactgaattagaatactgtgaccacttacttaaggaagacgtcttcaataattcagcttggaatcagagatactttgttataacaagatcaccatttcttggtggccttgcggcaatgcgtgattcagaagtagactacacaattgaagctattctagcaaacgctcagaatgaaagcccctggaggtacctcaagggtctatacaagggtgagaataacctgctagtagaggacgagcgcatctctgctgtttgtttcaaggtcctgaagaatgattggacttgtgtatttgctttgagtttgctgctcgatcttctctgcactggtttgcagccttcagatgaacttaggtccactcttgaaacaataaggagctcccatcctgaaaccgcggatgatgatcctgcagccgctgtttgctgtatcctgcagaaatgtgatcccctgcgggtaaattattggtcttggttcaaggacactctttctcagatctcatgacttcacatgggttcaccccttgtccgcgctggtccgggctctgtgagatagacatgttttagatagtttcattggacacccaaacagagcggacagagtgtatggctgctaccttctccgtgactgaaagcagtgcttgtaacgattttgtttagtaaaatttgtgagtgttactgctccaaacaacaccttatgcaaccatatttgaatatttcacatgtaagcttgaatccaggtgtgtttgttaatgtattacaattgccatgggagcctaaatgagacccataatcacttccactagagtcggaagaccgtgtcgagcagttcactcatatggtcacttaaagcactcttctgcactgtaaattgtaatattcgcagagttttaaatatgggtatgacgatgagtacgctgctgaaaatagtctaaccatttgctttgattttc

SEQ ID NO: 22180 - DNA, 1610 bp, Zea Mays
aacggccatcgctgttgtcctacttcgccagcgatgagcaccgcctggtattcgctccccttgctgtgcgaaaccgtgtgcccaaaccttgacgtaactcgtagatttggacagcgcaattacttaagctatttgtattcggatctgatccaaccctggtggtcagctggactcatcgcccatggagcacactaagtcaggccccagcagttggccagaactggccgacgtggtgccggtgccgcaggacgatgggcctagccctgtggtgtccatcgcctatcgagatgactttcgtgaggtcatggattacttccgcgccctctacctcaccggtgagcgaagccctcgcgctctccgcctcaccgccgaggccatcgagctcaaccccggcaactacactgtctggcatttccggcgccttattctggagtcactagattttgatttactagaggagatgaaatttgtcgaaaaaattgctgaatgcaatccaaaaaattaccaaatctggcaccataagagatggcttgctgagaaattaggacctggtattgcaaacaaagagcatgaattcacaatgaagatacttgctattgatgcaaaaaattatcatgcttggtctcataggcagtgggttcttcaagcgttggggggatgggagactgaattagaatactgtgaccacttacttaaggaagacgtcttcaataattcagcttggaatcagagatactttgttataacaagatcaccatttcttggtggccttgcggcaatgcgtgattcagaagtagactacacaattgaagctattctagcaaacgctcagaatgaaagcccctggaggtacctcaagggtctatacaagggtgagaataacctgctagtagaggacgagcgcatctctgctgtttgtttcaaggtcctgaagaatgattggacttgtgtatttgctttgagtttgctgctcgatcttctctgcactggtttgcagccttcagatgaacttaggtccactcttgaaacaataaggagctcccatcctgaaaccgcggatgatgatcctgcagccgctgtttgctgtatcctgcagaaatgtgatcccctgcgggtaaattattggtcttggttcaaggacactctttctcagatctcatgacttcacatgggttcaccccttgtccgcgctggtccgggctctgtgagatagacatgttttagatagtttcattggacacccaaacagagcggacagagtgtatggctgctaccttctccgtgactgaaagcagtgcttgtaacgattttgtttagtaaaatttgtgagtgttactgctccaaacaacaccttatgcaaccatatttgaatatttcacatgtaagcttgaatccaggtgtgtttgttaatgtattacaattgccatgggagcctaaatgagacccataatcacttccactagagtcggaagaccgtgtcgagcagttcactcatatggtcacttaaagcactcttctgcactgtaaattgtaatattcgcagagttttaaatatgggtatgacgatgagtacgctgctgaaaatagtctaaccatttgctttgattttc

SEQ ID NO: 22181 - DNA, 1532 bp, Zea Mays
gtcctacttcgccagcgatgagcaccgcctggtattcgctccccttgctgtgcgaaaccgtgtgcccaaaccttgacgtaactcgtagctggactcatcgcccatggagcacactaagtcaggccccagcagttggccagaactggccgacgtggtgccggtgccgcaggacgatgggcctagccctgtggtgtccatcgcctatcgagatgactttcgtgaggtcatggattacttccgcgccctctacctcaccggtgagcgaagccctcgcgctctccgcctcaccgccgaggccatcgagctcaaccccggcaactacactgtctggcatttccggcgccttattctggagtcactagattttgatttactagaggagatgaaatttgtcgaaaaaattgctgaatgcaatccaaaaaattaccaaatctggcaccataagagatggcttgctgagaaattaggacctggtattgcaaacaaagagcatgaattcacaatgaagatacttgctattgatgcaaaaaattatcatgcttggtctcataggcagtgggttcttcaagcgttggggggatgggagactgaattagaatactgtgaccacttacttaaggaagacgtcttcaataattcagcttggaatcagagatactttgttataacaagatcaccatttcttggtggccttgcggcaatgcgtgattcagaagtagactacacaattgaagctattctagcaaacgctcagaatgaaagcccctggaggtacctcaagggtctatacaagggtgagaataacctgctagtagaggacgagcgcatctctgctgtttgtttcaaggtcctgaagaatgattggacttgtgtatttgctttgagtttgctgctcgatcttctctgcactggtttgcagccttcagatgaacttaggtccactcttgaaacaataaggagctcccatcctgaaaccgcggatgatgatcctgcagccgctgtttgctgtatcctgcagaaatgtgatcccctgcgggtaaattattggtcttggttcaaggacactctttctcagatctcatgacttcacatgggttcaccccttgtccgcgctggtccgggctctgtgagatagacatgttttagatagtttcattggacacccaaacagagcggacagagtgtatggctgctaccttctccgtgactgaaagcagtgcttgtaacgattttgtttagtaaaatttgtgagtgttactgctccaaacaacaccttatgcaaccatatttgaatatttcacatgtaagcttgaatccaggtgtgtttgttaatgtattacaattgccatgggagcctaaatgagacccataatcacttccactagagtcggaagaccgtgtcgagcagttcactcatatggtcacttaaagcactcttctgcactgtaaattgtaatattcgcagagttttaaatatgggtatgacgatgagtacgctgctgaaaatagtctaaccatttgctttgattttc

SEQ ID NO: 22182 - DNA, 1757 bp, Zea Mays
ccttgggtcggaaaaggccaaaaactcatcggcaacctccatctgaaaattctctcgcctgaacgtccaagcacaatcccgaaccctaaccagcgccccagctcgccgtcggcatgtccgccaggttgctccggcgagtcctccaggagcgtgaggccaccccgcaggacaccgacgtcgccgacgacgaccagtcggtggaggaggaggcttctcctccgcggtcctccgcgcggaacctcttcgatctcctcgacgacggaaacggcgacggcggcgaagaagatgaaaaggtacacatatgacccttcagtcagccatgtgcaggaattatttgaagccgccaaagcagcaaatgatctcaatgctattgcagctatattagggaaatatccatatcatccagaatcactgttgacatttgctgagcttttcaaatattctggagagcatcaatcatcagcagatgcagtggagaaatgcctatttgcattggagtgtgcttggcatcctttatttagcccacttcagggcaactatcagttgaaattcaaccatgacacaaataagccactgtttacagcactctttagtcacatgaaaaatctggataggcgtggctgccatcggtctgctttagaggtctgcaagtttctgttgtcactggacttcgatgatccaaagggttctctattttgcattgattactttgctctaagatcacaacagtacaaatggctggagcaatttgcagaagagtaccagtgtgataactccttgtggttatttccgaatttctcattttctcttgctactgcacggttttaccttgagtgtgatgcagcgtcagagggttctgatgatgctgacaaatcaacatctcttgatctcatgaagcaagctctgatgcttcatcctatggtgcttcgcaagatagttgacaaggctcctctgaaagactcatcatggacccaaatactcagaaatgtattctttggatcagcaaaaccgggaagcccttcacttgagcatatgatcaatatatatgtggaacgccattatatcatgtggagattcccagaactgcagaacttgctgaaagaggctgctcttttggtgattgaatcactaaagcaggataacagagaagccctggactgggcttgtgttagaaaagaagcattctcgtcagacaagaatgaaactgcgaccatttatggtcggtccaggaatgttgcatgagatgccacctgttgaacaagaagctggacccgagagactccgtgctcctcgtgaagtcgctgggcgtaatcctgcagtagtcttccttgaatcactgctcccatgggtcgactatggtgacaatcatcaaggtgcaaatgacgacgacaacgacgacgaatgatcagttggatgtataaagtggcaaggactcacaattgcgcctgaattattgaatgtgacacatgattaagaaaagttgttgttgctcatagggtcacctcggtactatcaataaccaccacaagtctgcaagccaagtggtcttgtgtttttcatgatgggacagaggcctgaggttaagtatgtatggggatcgaccactaagttgccaaaacatgtataccaaattttagggatcgagtaccatccttgtctgagacttgactctatgctaattctgcaaacatagtgaaagggtttaatactttacggtgctgttagaaaatttaccccaggctaggaaaggctttcac

SEQ ID NO: 22183 - DNA, 1578 bp, Zea Mays
ccgacctatttcgtaactagtgttaaatgccactactcaaccatatgcacaataacgtgtaatccccacaagctaaacaacatcgaagcatcccggctgacaattgaattattaaccttaatccctagcagcccacgttagggacagtacaattgaaccattaaccttaatccctaacagcccacgcggacccaatgaacaaaaacctattttttttcgcaaaaaggtttcatcgcggggggcaaaaaaaccctacccgatggaagatgagaattttactatccgtgttaaatcaccctaaacaactaacagtccaccgcaaaatttgctcaaatcttagcccgaagaaagtggggcaaagtaacgcagaaccgcgatctgaaccgcgaccggaagcaccgaaatcttcacccaaaggagaagtcgcgatctgaaccacaacataagacgacagacttactgcgtccgctgcgtcgcgcctccccctgccgccgcctggctcccgcccgcggggtgggatcccgccggaacgttagggccactgccgccgatcgttttggagaagccgtccatgacgctgagcacggaggtattctagatgggagagatctcgatgggagacggtggcgttcgccggtcgatgcgtgggttaaccgcgctcgggatcgagggtgccgagaaacgaacaaagggagcagcaatggcggcggcctggtgttaagaggtgacctttttctttcttgcaaccgaagccgaagaggagagcgccacctatgggttgagatccaagccggctgggctgggtctcgtgggctagtatatgaaaaccaacggctaggatggattaagaagcgagacaacatcaggtcaaccgtccgatcccctcagagctaggagtggggaccaggggagctgggagtttgcggcttcagctgctgctgcgagcctgcgacctccgaggcggagctcaatggagttatccactcccgtcgggagctcccttgctagaactgcgaccatggccctcgttagccccagcttcaagataaccaatcaaatgtgtgccaggggtatgccacttgaatgccaatttcctcataggctaccatctgtagcttgttcaatgttgttaaacacacaaccttcacaacgaaccaaccataaagattgtggtttgcttcaggtgcaatgtacagaaaaccttatgcagtcgccagtatctttcagtgacttctctgtttcagtgtgtgctcaagaggatggtctgataaagctacaggtaaatgtatctggcacaatgacagattctatctttgagaaagttttcacaaagaatgttgccgccgctcaaccccttcccggctttcgacgaatgaaaggagataccgaaagaagttgctctacacttaatcgggccatcaaaagtgaagaaagaaacaatcaagaaaattataagtagcacggttgctgagtatgttcaaaaggagggcctgactgtatcgaagaatatgaaagttcagcagagctatgaagagcttgaggcagcatttgaaccagggaaagaattttgctttgacg

SEQ ID NO: 22184 - DNA, 1196 bp, Zea Mays
atctgaaccgcgaccggaagcaccgaaatcttcacccaaaggagaagtcgcgatctgaaccacaacataagacgacagacttactgcgtccgctgcgtcgcgcctccccctgccgccgcctggctcccgcccgcggggtgggatcccgccggaacgttagggccactgccgccgatcgttttggagaagccgtccatgacgctgagcacggaggtattctagatgggagagatctcgatgggagacggtggcgttcgccggtcgatgcgtgggttaaccgcgctcgggatcgagggtgccgagaaacgaacaaagggagcagcaatggcggcggcctggtgttaagaggtgacctttttctttcttgcaaccgaagccgaagaggagagcgccacctatgggttgagatccaagccggctgggctgggtctcgtgggctagtatatgaaaaccaacggctaggatggattaagaagcgagacaacatcaggtcaaccgtccgatcccctcagagctaggagtggggaccaggggagctgggagtttgcggcttcagctgctgctgcgagcctgcgacctccgaggcggagctcaatggagttatccactcccgtcgggagctcccttgctagaactgcgaccatggccctcgttagccccagcttcaagataaccaatcaaatgtgtgccaggggtatgccacttgaatgccaatttcctcataggctaccatctgtagcttgttcaatgttgttaaacacacaaccttcacaacgaaccaaccataaagattgtggtttgcttcaggtgcaatgtacagaaaaccttatgcagtcgccagtatctttcagtgacttctctgtttcagtgtgtgctcaagaggatggtctgataaaggtaaatgtatctggcacaatgacagattctatctttgagaaagttttcacaaagaatgttgccgccgctcaaccccttcccggctttcgacgaatgaaaggagataccgaaagaagttgctctacacttaatcgggccatcaaaagtgaagaaagaaacaatcaagaaaattataagtagcacggttgctgagtatgttcaaaaggagggcctgactgtatcgaagaatatgaaagttcagcagagctatgaagagcttgaggcagcatttgaaccagggaaagaattttgctttgacg

SEQ ID NO: 22185 - DNA, 1377 bp, Zea Mays
cgcggggtgggatcccgccggaacgttagggccactgccgccgatcgttttggagaagccgtccatgacgctgagcacggaggtattctagatgggagagatctcgatgggagacggtggcgttcgccggtcgatgcgtgggttaaccgcgctcgggatcgagggtgccgagaaacgaacaaagggagcagcaatggcggcggcctggtgttaagaggtgacctttttctttcttgcaaccgaagccgaagaggagagcgccacctatgggttgagatccaagccggctgggctgggtctcgtgggctagtatatgaaaaccaacggctaggatggattaagaagcgagacaacatcaggtcaaccgtccgatcccctcagagctaggagtggggaccaggggagctgggagtttgcggcttcagctgctgctgcgagcctgcgacctccgaggcggagctcaatggagttatccactcccgtcgggagctcccttgctagaactgcgaccatggccctcgttagccccagcttcaagataaccaatcaaatgtgtgccaggggtatgccacttgaatgccaatttcctcataggctaccatctgtagcttgttcaatgttgttaaacacacaaccttcacaacgaaccaaccataaagattgtggtttgcttcaggtgcaatgtacagaaaaccttatgcagtcgccagtatctttcagtgacttctctgtttcagtgtgtgctcaagaggatggtctgataaagctacaggtaaatgtatctggcacaatgacagattctatctttgagaaagttttcacaaagaatgttgccgccgctcaaccccttcccggctttcgacgaatgaaaggaggtatacttctaaaacttttacaaccccagatttctgtccatcatttgacaattttaaattgcctaaaactgtgcatgtgattcgtactctcatcctgcaaattctgaattcacctcagatgtacttaaaggatactgagttcaatatgccataccagttaggctgtaaataagatattaaatttggttgcttgcatattatactatatgttgtttaaatttggcatatgaaaactaatactgtttaagtttgttgacattgtcttccacgtgatgctatcttaaatattcagggaaaactccagacataccgaaagaagttgctctacacttaatcgggccatcaaaagtgaagaaagaaacaatcaagaaaattataagtagcacggttgctgagtatgttcaaaaggagggcctgactgtatcgaagaatatgaaagttcagcagagctatgaagagcttgaggcagcatttgaaccagggaaagaattttgctttgacg

SEQ ID NO: 22186 - DNA, 565 bp, Zea Mays
ctttaactgagttctgagtttcagagattttgataaccaatcaaatgtgtgccaggggtatgccacttgaatgccaatttcctcataggctaccatctgtagcttgttcaatgttgttaaacacacaaccttcacaacgaaccaaccataaagattgtggtttgcttcaggtgcaatgtacagaaaaccttatgcagtcgccagtatctttcagtgacttctctgtttcagtgtgtgctcaagaggatggtctgataaagctacaggtaaatgtatctggcacaatgacagattctatctttgagaaagttttcacaaagaatgttgccgccgctcaaccccttcccggctttcgacgaatgaaaggagataccgaaagaagttgctctacacttaatcgggccatcaaaagtgaagaaagaaacaatcaagaaaattataagtagcacggttgctgagtatgttcaaaaggagggcctgactgtatcgaagaatatgaaagttcagcagagctatgaagagcttgaggcagcatttgaaccagggaaagaattttgctttgacg

SEQ ID NO: 22187 - DNA, 920 bp, Zea Mays
ccttccacctcttatgctaccagctgggccaatggcacattgcagatgagtatgatggccaggtgagggaacttaattgtaaatcaatatgccatagtccaatgtgccctccttattcagcgatgacagagtggcagcatatagttctttcagctgacaaaatggatctggtatttgagacagtacagcaagtacatgatgttccatttggttccttctttgaggtgcattgtaggtggtctgtgaaaactatcagttctagcctgtgcagtcttaacataagcgctggtgcacatttcaagaaatggtgcataatgcagtctaagataaagagcggtgctgtggatgagttgaagaaagaagtcaaggaaatgttagactttgcacaggggtatattctcaaagttaggtctccggaccaagagaacagtaatctcgcccaacaagacaacatggcaccggatgcagtgtctggcgatcaatgattatttcaggttgtgcctcctgatttagggtggggtgacagctgccatgacaacgaattatgatgttatacacagaagggcaggtggacctgtaactagtccacatgaaccacatctaacatgttaagctgacttccaaaagatggttggaccgtgtattgtgtgtgtaaacttctttttcctgtcattccgctatccattctggcagtttggctgatgtatatagttgtaaaaacaagtatagtgttgactgcggacggttcagtggtgcgttgttcgaagataaacaaagaaagaaacaaaagagaaatatttgcaccagaaccatcagaacttgtgcagtgtacatttttgtagccagagggaactgttgctttttctgcatctgggccaatggcacgtcgcagatgagtatgatggccaggtgaggccatg

SEQ ID NO: 22188 - DNA, 784 bp, Zea Mays
cagaatgttccattatgacagataatagttcttggtatttgagacagtacagcaagtacatgatgttccatttggttccttctttgaggtgcattgtaggtggtctgtgaaaactatcagttctagcctgtgcagtcttaacataagcgctggtgcacatttcaagaaatggtgcataatgcagtctaagataaagagcggtgctgtggatgagttgaagaaagaagtcaaggaaatgttagactttgcacaggggtatattctcaaagttaggtctccggaccaagagaacagtaatctcgcccaacaagacaacatggcaccggatgcagtgtctggcgatcaatgattatttcaggttgtgcctcctgatttagggtggggtgacagctgccatgacaacgaattatgatgttatacacagaagggcaggtggacctgtaactagtccacatgaaccacatctaacatgttaagctgacttccaaaagatggttggaccgtgtattgtgtgtgtaaacttctttttcctgtcattccgctatccattctggcagtttggctgatgtatatagttgtaaaaacaagtatagtgttgactgcggacggttcagtggtgcgttgttcgaagataaacaaagaaagaaacaaaagagaaatatttgcaccagaaccatcagaacttgtgcagtgtacatttttgtagccagagggaactgttgctttttctgcatctgggccaatggcacgtcgcagatgagtatgatggccaggtgaggccatg

SEQ ID NO: 22189 - DNA, 957 bp, Zea Mays
gtcaaaacagggccaatgcaattctgatgcaatcaaaacagctcaatcttgttgagtctttcctcgtcaaaactaaagcagggtgagttgataaagaaaaaaaatatttacaatggaataaaaatacaaattgcttgaatgcataaagaccactaggcttgacatctgcacaaataactagaacacaaacaactgtatattcgtaagaaagaaccactacgaatcgaaatagtaaatctggttacagtttgacatgcagagtattagccgttaaaaggcaacaatatattcctactccatctggtgtcctattagttgtcgttttgatcaagacatgaatcaaacttataaattttgactacaaataactattttattatgtagttttgaaacacaatgtttatatacaccgatttgttataataagtacttttataaaagtataaatgttgagagtttatttgtattttaacaaaaaatattgatgaaagttatattttggagaccgtgtcgctgttctaaatgacaactaatagtacatcagatggagtaggttctaacatttcatcatctaaacatcaacaatatggttgtccaactagtccagaccttagctctttcagcaactctagccacatctagccatcatcttaccatccgatcggatagaaattagccaccggaggagacagagacaaacaaggtcgagggagaagctatatcttccttctcagcatcgaatcgggcatgtaccttgcatagatccagccagttgttgcaaagaggataaggtatggaagggcatgcagattgtagtttgctgcgtaggtagcccccactgctgcagcctagcgcgccgccgccgtcgcctccgcctcatgagccacatatgtcgccctccctctctcgcctttgcgtggaaatgttccacgtccctgcggcgtgggtgagttcccg

SEQ ID NO: 22190 - DNA, 2661 bp, Zea Mays
cgacgccacacaggaccaccgccatgagtgatgcgctcaaggatccgcatccgcgacaatggcttcgctggtgccgggcgtcctggtgaagctcctgcagcacatgaacacgggcgtgaaagtcggcggcgagcaccggtcctcgctcctccaggtggtcagcatcgtgccggccctcgccgggagcgacctcttcaccaaccgagggttctacctcaaggtgtcggactcgtcccacgcgacctacgtctccctgccagaggagcagcacgatctcatcctgagcgacaggatccagctgggccagttcgtccacgcggaccgtctcgaggcggccactcccgtccccatcctcagaggggtccggccggtccctggtcgccacgcctgtgtcggcacccccgaggacctcgtgctgaccgcctcctcgtcgaactctcacggcggcggcaagaacaagaaggcgcgaccgtcgaatgcgaaaacgaaggacgccagcgccagcgtcctgtcgctagacaaggaatcgagcaagctggagaagataaacgcctcgcgcaagcctaccgctaccggggcggaaaacaagaagccgacgctcaccagatccaactcttcgctgccaagagaagctctggatgggaggatcggtgatgacaaggtagcggcggttaagtcaaaaaaggtgaagccaggtgttactaggtccacaccttcgtcaccaaccagcgtctattctctgcctgcgtcgttcgacaggttctcgaatgacctgaagcagaggaacagagtgaaaggagcggagaataaagcttcgtcttcctctaggctttcattgttggaaaaggccgcttctgttttgaaggccactagtgccgccgggagagtgtcctctgctggcattccgatcggtagctctgtgctgagcattggatcgtcagggccaaaggccctgagaagaagctgggaaggaaacacggatgttaaagggaaaggaaaaccagaatcgaggacagccaaacctgacaggaagtctgatagcaagattccaatgactcctagacggaaatcaccagtggatgagaaggtggcgccacataaagatgacaacagtcagaaagctgctaggaagagcaccacaagtgctcccgcctcagacgacgctgctgacaaagcagtgaagaagaagcatattcctacagcgaagagaacttccgggggtttagggaactggagtgtcacaaatctagtgaagattcctcccagcagcagaaaactagcagacgttagcgcttcatggacatcactcccgccatcacttgccaagctaggaaaggagcttctcaggcacagggaatcagcacagatagctgctgttgaagccatgcaagaagcttccgctgcagagagcttgctgagatgtttgagctcgtacgcggaggtgagctccacggcggaagagcagaacccgcagccagccgtagagcagttcctcaccctccacgccgcgctctcgcgcgccacggtgatcaccgacaccctcgccaagtctgccacatctgcagcctcgccagattgctcggcagccagcgacgctgggacggtgtgttccgctaccgacgaggaggccgctgccatcacggccgagcgccggcgccgagctacgtcctgggtgagcgccgctctcgccacggacctgtccgccttcggcatctacaagctcaaaccgccccccgccaccgtgtcctcgccgctggccgtggtcgtcgtggacgagcccgcgaagctggcggcggccgcggctacgaaatcgtcgccgtcgccgaagtcgcggctgtcccccgcgaaggggaaggcgaggacgggcgctgctgcggctgcaggagcgctggccacgacgcccgcgccgccggagtgggagaggggaggaggggccgaggagaggggcgaactggcgacgcggctgggagaggagtcaaggggctggttcctcggcttcgtggagcggttcctggacgccgacgtggcggcgaccgcgcagtgggaccgcgagcgcgcggccaggatgctcccgcagctaaagcgtgtcaacgactggctcggcgagatcgggaagcgcagcgagaccgagacttcgtcgctgccgccggccgacgcggacggtgaggcgaccaccacgagcaccgcccccgtcccctcgaacggcggctgcggggtacctgaggaaacgatagagcggctaaggaagaagatctacgagtatctcctcaccaatgtcgattctgccgccgcgatgctcggaggcggcgggctggccgcgccgacgaatgggaagaaaggctgacgcgtgggtagaggtcctaattgggccgttagtagtgtgaaattttattgggccaaaaatgggctgggttaactaatgtaggcttcgtttctgttgtttctttgttgggctttgagcatttcagcttctcttggtttcttattttggtcacagaaaaaagaaaggcggtgagatattgacttgtatttatcactgatgtcgactgggtgactctggattatggagtattgctccattggatagttttctgcatttcgagacaggaaagtggttttctgcggaactgttcggtcggtcattctgaatggataatttcg

SEQ ID NO: 22191 - DNA, 2815 bp, Zea Mays
ctttaaggtcccatgcccgtacccgaatcaccgtgcggcgatttcttggtgccgtatgagtaaatgccaggtttctgcacatgaacaacatccgcgaaaaaagtcgcatcctttcactgcattcagggcctgagggtcagggggtgctggtctcactccactttcgttaggaactgcgagagtgatgcgctcaaggatccgcatccgcgacaatggcttcgctggtgccgggcgtcctggtgaagctcctgcagcacatgaacacgggcgtgaaagtcggcggcgagcaccggtcctcgctcctccaggtggtcagcatcgtgccggccctcgccgggagcgacctcttcaccaaccgagggttctacctcaaggtgtcggactcgtcccacgcgacctacgtctccctgccagaggagcagcacgatctcatcctgagcgacaggatccagctgggccagttcgtccacgcggaccgtctcgaggcggccactcccgtccccatcctcagaggggtccggccggtccctggtcgccacgcctgtgtcggcacccccgaggacctcgtgctgaccgcctcctcgtcgaactctcacggcggcggcaagaacaagaaggcgcgaccgtcgaatgcgaaaacgaaggacgccagcgccagcgtcctgtcgctagacaaggaatcgagcaagctggagaagataaacgcctcgcgcaagcctaccgctaccggggcggaaaacaagaagccgacgctcaccagatccaactcttcgctgccaagagaagctctggatgggaggatcggtgatgacaaggtagcggcggttaagtcaaaaaaggtgaagccaggtgttactaggtccacaccttcgtcaccaaccagcgtctattctctgcctgcgtcgttcgacaggttctcgaatgacctgaagcagaggaacagagtgaaaggagcggagaataaagcttcgtcttcctctaggctttcattgttggaaaaggccgcttctgttttgaaggccactagtgccgccgggagagtgtcctctgctggcattccgatcggtagctctgtgctgagcattggatcgtcagggccaaaggccctgagaagaagctgggaaggaaacacggatgttaaagggaaaggaaaaccagaatcgaggacagccaaacctgacaggaagtctgatagcaagattccaatgactcctagacggaaatcaccagtggatgagaaggtggcgccacataaagatgacaacagtcagaaagctgctaggaagagcaccacaagtgctcccgcctcagacgacgctgctgacaaagcagtgaagaagaagcatattcctacagcgaagagaacttccgggggtttagggaactggagtgtcacaaatctagtgaagattcctcccagcagcagaaaactagcagacgttagcgcttcatggacatcactcccgccatcacttgccaagctaggaaaggagcttctcaggcacagggaatcagcacagatagctgctgttgaagccatgcaagaagcttccgctgcagagagcttgctgagatgtttgagctcgtacgcggaggtgagctccacggcggaagagcagaacccgcagccagccgtagagcagttcctcaccctccacgccgcgctctcgcgcgccacggtgatcaccgacaccctcgccaagtctgccacatctgcagcctcgccagattgctcggcagccagcgacgctgggacggtgtgttccgctaccgacgaggaggccgctgccatcacggccgagcgccggcgccgagctacgtcctgggtgagcgccgctctcgccacggacctgtccgccttcggcatctacaagctcaaaccgccccccgccaccgtgtcctcgccgctggccgtggtcgtcgtggacgagcccgcgaagctggcggcggccgcggctacgaaatcgtcgccgtcgccgaagtcgcggctgtcccccgcgaaggggaaggcgaggacgggcgctgctgcggctgcaggagcgctggccacgacgcccgcgccgccggagtgggagaggggaggaggggccgaggagaggggcgaactggcgacgcggctgggagaggagtcaaggggctggttcctcggcttcgtggagcggttcctggacgccgacgtggcggcgaccgcgcagtgggaccgcgagcgcgcggccaggatgctcccgcagctaaagcgtgtcaacgactggctcggcgagatcgggaagcgcagcgagaccgagacttcgtcgctgccgccggccgacgcggacggtgaggcgaccaccacgagcaccgcccccgtcccctcgaacggcggctgcggggtacctgaggaaacgatagagcggctaaggaagaagatctacgagtatctcctcaccaatgtcgattctgccgccgcgatgctcggaggcggcgggctggccgcgccgacgaatgggaagaaaggctgacgcgtgggtagaggtcctaattgggccgttagtagtgtgaaattttattgggccaaaaatgggctgggttaactaatgtaggcttcgtttctgttgtttctttgttgggctttgagcatttcagcttctcttggtttcttattttggtcacagaaaaaagaaaggcggtgagatattgacttgtatttatcactgatgtcgactgggtgactctggattatggagtattgctccattggatagttttctgcatttcgagacaggaaagtggttttctgcggaactgttcggtcggtcattctgaatggataatttcg

SEQ ID NO: 22192 - DNA, 2160 bp, Zea Mays
agtaaaacaaaagcagccaagattgtgaaacgaaaacccctcgtgctcccctcccccgcccccatttcttcctgttccctacctccgtcccactcccacggttccaccccaccaccgatggcgaccgccgagcccggcccgtccccgcccgcgcccaagcccacctgcgccgtcacgttcggacgctccaccctcctcggccgctacctggccgcggcgctcgctgcctccggccgctggtccgccgtcgccatcctcgacccctccccaacctcaccgtccccgccgcccggaccgcctgcctcccacatcgtctaccaccacgacgtcgacttctcggaccccgcgcgcctcgtttcagcgcttgccggcgccgcggctgtcttccatgtggacgccaccacagcggccgcctccgggagcgacgggtccttcctctccctccaccgcctcgccgtcgagggcacgaggcggctcctcgcggcttgccgcgcggccggggttgggagggtggtgtacaccggctcagccgacgtggtcgctgctgttgcccgggatgtgataaacgcggacgaggactccgcgccctaccctgacaagttcgggaatgcgatgagcgagctgagggcgcaggtggagatgatggtgctgggtgcggacggggtggacggggtgaggacgtgcgtgctgcgacctagcaatcttttcggtccgggtgattccagcttggtgaggtttgttgctggatatgcaaggtctcccttgggcaagtttgtaataggcagtggcagtaacatgtctgactttacctatgtggaaaatgtggcccatgccaatatttgtgctgagcaagccttgtcttcaaatgcagcttctgtagctgggaagcccttttttgttaccaatgacgaacctatggaaacatgggagtttatgaattgcatgatggaagccatgggttgtcagaggcccaggattaatcttcctgccaagatgttattgtttgcagccttgttctccaaaatgattcatcacaggcttggttttcaaatgctttccacccctcttcttcatccagatacaatatacttcttgtcgtgtacgagaacctttaacacttcaagagccagaagattacttggataccacccaattgtatcattggaggatggaattatgagaactcttgggtcattttcagaactagcagataatttggggttgtcaagaaaacagggctcctgtggatcctcgaaggcagataagctgctaggaagtggaacagctgctgatattcttctttggagggatgaaaagagaaccttttcatttgtcacagtattgtttctgcttttctactggttcctgctttcagacagaacttttgtttcatcagctgccaaatttcttctagtgctctcgcttgctctctttatccatggtgtgctgccttcagaagtgtttggttttacagtcgagaaggtcacatctgatcattttgaagtatcacactcagcattgaggaattcacttatgtgtgtggcttctgcatggaatgggagttttcataaactaaggcttttagcagaaggtatttgcatttctgtacagcatcaaactaatgctgaactttcagttcagatttttgatgggacttgtactggcatccttgttcattgtcttcattgtctatgaacaatgcgaggaagaaattgacagtttggtggcaaacgcttctgtcaaagtcaagtggctaacagacagagtagtcagaaatttgccggcctttttgaaggcgtatatagcctagaggagacatctgaaggatgtctcgccaactcgccatggtgctcctatctgtaaaaaaccttagttcttttaagctaacatgtactgtgcgatttacccaaatgtttgactagcacttttatattcttgttcaagtttcaccttttttttaattgagaatcctttcccacccctttttacaactcgtgacttggcatacaactgcctgcgttttatgctcatgcatgggtaccaaactactaagtcaattttctttagctttaaccaaatttatagaaaatatataaatatctataacacgaaataagatttgttagatataccatgaaatatatttttatgtatttattt

SEQ ID NO: 22193 - DNA, 2313 bp, Zea Mays
agtaaaacaaaagcagccaagattgtgaaacgaaaacccctcgtgctcccctcccccgcccccatttcttcctgttccctacctccgtcccactcccacggttccaccccaccaccgatggcgaccgccgagcccggcccgtccccgcccgcgcccaagcccacctgcgccgtcacgttcggacgctccaccctcctcggccgctacctggccgcggcgctcgctgcctccggccgctggtccgccgtcgccatcctcgacccctccccaacctcaccgtccccgccgcccggaccgcctgcctcccacatcgtctaccaccacgacgtcgacttctcggaccccgcgcgcctcgtttcagcgcttgccggcgccgcggctgtcttccatgtggacgccaccacagcggccgcctccgggagcgacgggtccttcctctccctccaccgcctcgccgtcgagggcacgaggcggctcctcgcggcttgccgcgcggccggggttgggagggtggtgtacaccggctcagccgacgtggtcgctgctgttgcccgggatgtgataaacgcggacgaggactccgcgccctaccctgacaagttcgggaatgcgatgagcgagctgagggcgcaggtggagatgatggtgctgggtgcggacggggtggacggggtgaggacgtgcgtgctgcgacctagcaatcttttcggtccgggtgattccagcttggtgaggtttgttgctggatatgcaaggtctcccttgggcaagtttgtaataggcagtggcagtaacatgtctgactttacctatgtggaaaatgtggcccatgccaatatttgtgctgagcaagccttgtcttcaaatgcagcttctgtagctgggaaggtacatttttagagataaaagggctatgtttatccatattactttaatggttaattttgcacaccgaacttttacagcccttttttgttaccaatgacgaacctatggaaacatgggagtttatgaattgcatgatggaagccatgggttgtcagaggtatttctccctccctctttgccccttttttctttgaaggcaacttgtgaagttaacatgtgttgtggtttctcatccatttaggcccaggattaatcttcctgccaagatgttattgtttgcagccttgttctccaaaatgattcatcacaggcttggttttcaaatgctttccacccctcttcttcatccagatacaatatacttcttgtcgtgtacgagaacctttaacacttcaagagccagaagattacttggataccacccaattgtatcattggagaactagcagataatttggggttgtcaagaaaacagggctcctgtggatcctcgaaggcagataagctgctaggaagtggaacagctgctgatattcttctttggagggatgaaaagagaaccttttcatttgtcacagtattgtttctgcttttctactggttcctgctttcagacagaacttttgtttcatcagctgccaaatttcttctagtgctctcgcttgctctctttatccatggtgtgctgccttcagaagtgtttggttttacagtcgagaaggtcacatctgatcattttgaagtatcacactcagcattgaggaattcacttatgtgtgtggcttctgcatggaatgggagttttcataaactaaggcttttagcagaaggtgaagactggagtttacttttgaaggtatttgcatttctgtacagcatcaaactaatgctgaactttcagttcagatttttgatgggacttgtactggcatccttgttcattgtcttcattgtctatgaacaatgcgaggaagaaattgacagtttggtggcaaacgcttctgtcaaagtcaagtggctaacagacagagtagtcagaaatttgccggcctttttgaaggcgtatatagcctagaggagacatctgaaggatgtctcgccaactcgccatggtgctcctatctgtaaaaaaccttagttcttttaagctaacatgtactgtgcgatttacccaaatgtttgactagcacttttatattcttgttcaagtttcaccttttttttaattgagaatcctttcccacccctttttacaactcgtgacttggcatacaactgcctgcgttttatgctcatgcatgggtaccaaactactaagtcaattttctttagctttaaccaaatttatagaaaatatataaatatctataacacgaaataagatttgttagatataccatgaaatatatttttatgtatttattt

SEQ ID NO: 22194 - DNA, 2011 bp, Zea Mays
agtaaaacaaaagcagccaagattgtgaaacgaaaacccctcgtgctcccctcccccgcccccatttcttcctgttccctacctccgtcccactcccacggttccaccccaccaccgatggcgaccgccgagcccggcccgtccccgcccgcgcccaagcccacctgcgccgtcacgttcggacgctccaccctcctcggccgctacctggccgcggcgctcgctgcctccggccgctggtccgccgtcgccatcctcgacccctccccaacctcaccgtccccgccgcccggaccgcctgcctcccacatcgtctaccaccacgacgtcgacttctcggaccccgcgcgcctcgtttcagcgcttgccggcgccgcggctgtcttccatgtggacgccaccacagcggccgcctccgggagcgacgggtccttcctctccctccaccgcctcgccgtcgagggcacgaggcggctcctcgcggcttgccgcgcggccggggttgggagggtggtgtacaccggctcagccgacgtggtcgctgctgttgcccgggatgtgataaacgcggacgaggactccgcgccctaccctgacaagttcgggaatgcgatgagcgagctgagggcgcaggtggagatgatggtgctgggtgcggacggggtggacggggtgaggacgtgcgtgctgcgacctagcaatcttttcggtccgggtgattccagcttggtgaggtttgttgctggatatgcaaggtctcccttgggcaagtttgtaataggcagtggcagtaacatgtctgactttacctatgtggaaaatgtggcccatgccaatatttgtgctgagcaagccttgtcttcaaatgcagcttctgtagctgggaagcccttttttgttaccaatgacgaacctatggaaacatgggagtttatgaattgcatgatggaagccatgggttgtcagaggcccaggattaatcttcctgccaagatgttattgtttgcagccttgttctccaaaatgattcatcacaggcttggttttcaaatgctttccacccctcttcttcatccagatacaatatacttcttgtcgtgtacgagaacctttaacacttcaagagccagaagattacttggataccacccaattgtatcattggaggatggaattatgagaactcttgggtcattttcagaactagcagataatttggggttgtcaagaaaacagggctcctgtggatcctcgaaggcagataagctgctaggaagtggaacaggtttggttttacagtcgagaaggtcacatctgatcattttgaagtatcacactcagcattgaggaattcacttatgtgtgtggcttctgcatggaatgggagttttcataaactaaggcttttagcagaaggtgaagactggagtttacttttgaaggtatttgcatttctgtacagcatcaaactaatgctgaactttcagttcagatttttgatgggacttgtactggcatccttgttcattgtcttcattgtctatgaacaatgcgaggaagaaattgacagtttggtggcaaacgcttctgtcaaagtcaagtggctaacagacagagtagtcagaaatttgccggcctttttgaaggcgtatatagcctagaggagacatctgaaggatgtctcgccaactcgccatggtgctcctatctgtaaaaaaccttagttcttttaagctaacatgtactgtgcgatttacccaaatgtttgactagcacttttatattcttgttcaagtttcaccttttttttaattgagaatcctttcccacccctttttacaactcgtgacttggcatacaactgcctgcgttttatgctcatgcatgggtaccaaactactaagtcaattttctttagctttaaccaaatttatagaaaatatataaatatctataacacgaaataagatttgttagatataccatgaaatatatttttatgtatttattt

SEQ ID NO: 22195 - DNA, 1683 bp, Zea Mays
agtaaaacaaaagcagccaagattgtgaaacgaaaacccctcgtgctcccctcccccgcccccatttcttcctgttccctacctccgtcccactcccacggttccaccccaccaccgatggcgaccgccgagcccggcccgtccccgcccgcgcccaagcccacctgcgccgtcacgttcggacgctccaccctcctcggccgctacctggccgcggcgctcgctgcctccggccgctggtccgccgtcgccatcctcgacccctccccaacctcaccgtccccgccgcccggaccgcctgcctcccacatcgtctaccaccacgacgtcgacttctcggaccccgcgcgcctcgtttcagcgcttgccggcgccgcggctgtcttccatgtggacgccaccacagcggccgcctccgggagcgacgggtccttcctctccctccaccgcctcgccgtcgagggcacgaggcggctcctcgcggcttgccgcgcggccggggttgggagggtggtgtacaccggctcagccgacgtggtcgctgctgttgcccgggatgtgataaacgcggacgaggactccgcgccctaccctgacaagtttgtaataggcagtggcagtaacatgtctgactttacctatgtggaaaatgtggcccatgccaatatttgtgctgagcaagccttgtcttcaaatgcagcttctgtagctgggaagcccttttttgttaccaatgacgaacctatggaaacatgggagtttatgaattgcatgatggaagccatgggttgtcagaggcccaggattaatcttcctgccaagatgttattgtttgcagccttgttctccaaaatgattcatcacaggcttggttttcaaatgctttccacccctcttcttcatccagatacaatatacttcttgtcgtgtacgagaacctttaacacttcaagagccagaagattacttggataccacccaattgtatcattggaggatggaattatgagaactcttgggtcattttcagaactagcagataatttggggttgtcaagaaaacagggctcctgtggatcctcgaaggcagataagctgctaggaagtggaacaggtatttgcatttctgtacagcatcaaactaatgctgaactttcagttcagatttttgatgggacttgtactggcatccttgttcattgtcttcattgtctatgaacaatgcgaggaagaaattgacagtttggtggcaaacgcttctgtcaaagtcaagtggctaacagacagagtagtcagaaatttgccggcctttttgaaggcgtatatagcctagaggagacatctgaaggatgtctcgccaactcgccatggtgctcctatctgtaaaaaaccttagttcttttaagctaacatgtactgtgcgatttacccaaatgtttgactagcacttttatattcttgttcaagtttcaccttttttttaattgagaatcctttcccacccctttttacaactcgtgacttggcatacaactgcctgcgttttatgctcatgcatgggtaccaaactactaagtcaattttctttagctttaaccaaatttatagaaaatatataaatatctataacacgaaataagatttgttagatataccatgaaatatatttttatgtatttattt

SEQ ID NO: 22196 - DNA, 676 bp, Zea Mays
aaaaaactaacctaacctaacctagccggcccacgagggcccatgaaaccggccatgcccatgcccccaaccctagccgccactaccctgctccctctcccaagccgccgccactccttctccctccccctttctctctcttctctctctatcgcccacctctctccacctcctctccccaagccgcgccaccaggagttcgccccggaggaggcccagcccggaggcagtgcggcggcatggctggtggtggtggaggaccggggccgaggcgggtgaaggcggggagccgccgccgtgggtcaaggaggcgctcggctacaaccagcaggcgctcaccatgctcggcgtcggcaacgacatcggcgagaacgtcgccatgccttattgggtgacaattgaaaaagagaattgttcttttttatgggcgaagtgttgaagatggctttggtgaaggaaatgtcttgttagcatcaagtaagtggcgacatcacaacccctacaagcttgtgccttaaaacacgaggatacataagaagctggagtgcttttgtgaaggcttttgcgaatcacttgaagcgttaggacttttgtgaatgattttgtaaagtgtttgcaaatatgtgcaaaacataataacatatgtaggttttgtgaatgattttgttgtggtgct

SEQ ID NO: 22197 - DNA, 446 bp, Zea Mays
tttctctctcttctctctctatcgcccacctctctccacctcctctccccaagccccgccgccgtgggtcaaggaggcgctcggctacaaccagcaggcgctcaccatgctcggcgtcggcaacgacatcggcgagaacgtcgccatgccttattgggtgacagacaattgaaaaagagaattgttcttttttatgggcgaagtgttgaagatggctttggtgaaggaaatgtcttgttagcatcaagtaagtggcgacatcacaacccctacaagcttgtgccttaaaacacgaggatacataagaagctggagtgcttttgtgaaggcttttgcgaatcacttgaagcgttaggacttttgtgaatgattttgtaaagtgtttgcaaatatgtgcaaaacataataacatatgtaggttttgtgaatgattttgttgtggtgct

SEQ ID NO: 22198 - DNA, 2638 bp, Zea Mays
ttttgagacacctaagacgacattagagtgatcatgtatcgacctctaacctaaaccaaacctagctatgtaaggtatatcgttccatcttattccgttgcgtcaaataaacacagcctaagatcattctttctccacggcagtgccacgcaatcgtttcgtagagagctagctagacgcaaggcaactaggcactagctagctagatacggcctatgggcatggattcctacgccggcgagaacgagccgaaagtcggcagcggcgttggaagccacgtgctgctcctgccgtacccgagccagggccacgtccaccccatgctccagttcggcaagcgcctggcgtactacggcctgcgccccacactggccgtcacccgcttcatcctcgccacctgcgcgcctggcgacgccggcgtccgcctcgcggcggtctcggacggcttcgaccgcggcggcttcggcgagtgcggcgacgtggccgcctacctatcgcggctcgaggccgcgggttcggagacgctgggcgagctcctcgaggacgaggccgcgcggggccggcccgtccgggcggtggtctacgacgcgttcctgccgtgggcgcagggcgtggcgcggcggcacggcgcccgggccgcggccttcttcacgcagccgtgcgccgtcaacgtggcgtacgggcacgtgtggcgccgccggctgcgcgtgccggtggacggggtgctccgcctccctgggctgccggcgctcgacccggatggcctgccgtcgttcctcaaggtcgggaccggcctgtacccggcctacttcgagatggtcgtccgccagttccaggggctggagcaagccgacgacgtgcttgtcaactccttctatgagctggagcccgaggaggcggagtacatggcgtcggcgtggcgcggcaagacgatcgggccgacagtgccggcctcttacatcggcgacgaccggctcccgtccgacaccaagtacggacttgacctctacgagccgaccgccgcgccgtgcatcgcgtggctggacgcgcacccgccgcgctccgtggtgtacgcctccttcggcagcctgtccgacctcgacccgctgcagatgcgggaggtcgcgcacggcctcctggacgccggccggccgttcctctgggtcgtgcgcgcgtccgaggcccacaagctgcccgcgggcttcgagggcgcgtgcggcgggcgcgggctggtggtgtcgtggtgcccgcagctggaggtgctggcgcaccgcgccgtggggtgcttcctgacccactgcggctggaactccacagcggaggcgctggtgacgggcgtgcccatggtggccgtgccgcagtggacggaccagccgatgaacgccaggtacgtcgaggccgtgtggcgggtgggcgtgcgggcgcggccggccccgcccgacgacagcctcggcctcgtgcggaggggcgaggtggtcatgcgcgtcgaggaggtgatggacggcgacaagagcgccgagttcaggaggagcgccgacgtgtggatggctaaggccagggcggcgagcagggaaggcggcagctcggacaggaacatcgccgagttcgtggccaaatatgcacatcggacgccaagtgaatgaagtgatcatcagataaagaaaaagacgccttctagctttgagcgaatctgtgtatacaggtcaagtaccagcatttgatgtgaatgccaattcttggacagccaaatacaatgtattatcacactgctaaacgctgatgtgcagcatttatgtgacatgcaagtcagattagtctgtgtatgttagtatgtatgtatatatgtatatgtgtatatagtaactcttccatcatacactacgatcgattttgcacacatgaacctggtataagaggttgcgcaatgccgcaccactctcgcagtcgcagttcacaccttagagaaactctctcccgtacacagctaaagtgagcgagcggcctgggaccatggccgacacacacgcgtcggagcgcagcatcctcgtcatcttgctcccgtatccgagccaaggccacgtcaacccaatcctccagttcggcaagcgcctctcgccgcgcaccgcggccaggttcgtgctcagcaatatcgccaccatattggacagctgcgaccgtggactagctcgcacggtccgagtcggagcagggcgcggtggacgtgctggtgcacgacgcgttcctggcgcgtgctgcctgcgtgcgtgcatgcctttcttcacgcagccgtgcgcgccggtggacgtggtgtacgcgcacgcgtgggccgggcggacagagcggccgctggtgagcgaggaggcggtggagctgccccgatttcccggtcggtgagccgtgagcgtgccgtcgtttcttgccgatcccagcggctaccgtaccccgcccgcgtacgtggacctgttcgtaaaccagttcaacggcatgcacaagataaccgaccatgcacgtccttgtcaactcgttctatgagctgcagcgacaggcattatatatgtgatgtgattatgtcgcgcgttctatgtatatcactactgatacccactcccgctaacaacataacacagaagtaatcctg

SEQ ID NO: 22199 - DNA, 1313 bp, Zea Mays
ccaccgtcgagcagctcgagccgctgcccgggctcccgggcgggctcaggccgtgcgatctgccgacgttcctgaccgataaggacgatcgcgcctacctggacctgctggtgagccagttcgtcgatctggacacggccgaccatgtcttggtcaactcgttctacgagttgcagcctcaggaatcggactacatggcgtcgacctggagagccaagacggtgggtccagcggtcccgtcggcgtacctcgacaaccggctgccggacgacacatcctacggcttccacctctacacgcctatgacggagacgacgaaggcctggctggacgctaggcccgcgcgctcggtcgtgtacgcctctttaggcagcatcgccaagccagacgcggctcagacggcggagatggcggaggggctgtacggcagcggcaaggccttcctgtgggtcgtcagggcctcggagagcgcgaagctacctgaaaacttcgccggcaggaccaccgaggagaggggcctcgtcgtgacatggagccctcagctcgaggtgctggcgcacccggctgtggggtgcttcgtgacgcactgcgggtggaactcgacgatggaggcgctgggtgccggcgtgccgatggtggccatgccgcagtggtcggaccagaccatgaacgccaagtacatcgaggacgtgtggcgcgtaggcgtgcgagtgcgcccggacgggagaggcgtggtgaggaaggaggagctcgagaggtgcgtgagggaggtgatggaaggagagaggagcttggactacatccggaacgctgccggctggaaggagaaggccaggagtgccatgagcgaaggcggcagctccgacaagaacgtcctagatttccttggcgcgcttggactgaaaaaataaatggccggggcagatgtctttgggacttgcttgtttcagcgccccctcttcagttattgttctctttcctgggcccttgttgttgtggaataatgtgcggcgttggctgcaaggtaaaatcagttgtgacagtgaagctaatttactgaaactgatatgctaaggtccgctaatatgaagctcgatttagctcggccacgggtcacatttccttcctccaggcgagtgtctttggttgttcacatttccttcctccaggctgggtgtgggtctatataaggcctaattggattgctcgcgccgtcctggtcggccggcccgatacagatgtttcacgcgtacgggtgaatacagctaaatatttttaaagaaaaattaaacaataatttagataaagtcaag

SEQ ID NO: 22200 - DNA, 1485 bp, Zea Mays
cttaagtccccaatgttttataaaagaattctaagaagaaattacatcttttcaggaatcaaacagaagtttaattcagatggttcagaccctaatatcagttgaggggattgaaatcaatgcggttaatagagctggagagactgcttttgctattgcagataaacaaggtaatgaagagctcgtcaacatcctgagagaggtcggtggaggaactgcaaaagagcaagtaaatcctcctaatccagcaaagcagcttaagcagacagtcagcgatatcaggcatgatgttcaatcacagatgaagcaaacacgccagaccaagatgcaattccaaaaaatcaagaagaggattcagaagctccacattggtgggctaaacaatgccatcaactccaacactgttgttgcggtgcttattgccaccgttgcctttgctgccatattccaactccccggtaattttctggaggacatgactcaagcacctgacccagacatgaccttggggcaagcattgatagccagtgatccagcctttataatcttcttggttttcgatgctttggctctctttatctcgcttgctgtcgtagtagtccagacatctctaattgttgttgaacagaaggccaagaagaagatggtctttgtgataaacaagttgatgtggctcgcatgcctctgcatctcggcagccttcatagcgctaacctacgttgtcgtgggtcgagacgacgagtggctggcctggtgtactatggcaattggcactgttaccatggtggccactgtcggttccatgtgctactgcgttgtcgctcacaggatggaagagaagagcttgaggaagatcaggaggacctccatgagccagtcatggtccatatcaattgactcggaagcagagctgatgaacagtgagtacaagaagatgtatgccctttaggatgatgtctgttcttgtcggctgagtcttgtatatattggtacccatttgcctgagaccagtccatggcattgagtgggattgactcaatcagaactatatttagtcctagaacatggcacctgtatgtaactgtagtcttgcagcctccagacatgaacataggggtgaagtctaggtgataggtgtagtcactttttttgttggcaaaatacaaatattgccaagcatgatgtccctatatcatgttttgtgtgggtgtggatggcagtgaaaaatgaaaatcattagattgtatctgtatggtagaatagtatggaataagttgtctttatgtcaaaatttgtgtggtcgtggatgctcttatgatgcgacatgagactgactagacggaggcaaaaaaacaatgatcacaaatgccctttgggacattggtccggagaaagctgggagactttgttggccgctgtggttatgcggcatttgcagccgttctgtgagatgcaaatgcctagaggaacttaagagtttttaca

SEQ ID NO: 22201 - DNA, 3027 bp, Zea Mays
cgtaaggcagcggatctggttccgtctggctcggcccgtcaagccggctgccggtaggagcggaggagacggcgtctcgccgctcgcttcgtttccgccttccccctcccgcaagtcgccgccggctcgcattcgtggttccgcgtggggggtccgtggaaacgcgacaagagaggcggaagcgatggcgaagtcgtgcaaggggttggccatggagctcgtcaagtgtctcagcgagaccgactgcgtcaagaaaaggccgtacaaggagtgcgctggggagaaggtgccaaacattaccagcgagtgcgttggcctgcgggagacctacttcaactgcaagaggggccaggtgaggggaactcacaacacacgtggcttcaattgatgaggggagtgcattcctgtctacattctatacatttgatattccctctgttttaaatgtttgacgttttgttactatgatctgtgcgtgtagcaaaagttaatctatggcccgtttggtttagccgtagattcctgaaaatctaattctagccgtgaaagttgtggcgagatgactgttgtgttgtggaaaaactaaaatatgtttggtcaaaataactaatatgaatgataaaaatctgagatagaaggtgattctgaattgaactagaggactctatagattttcatgaatttattctactcatttggttgaaattccggaattttggcagcgaatttggttcaaaaaactgaaccaaatacaccctatgtctgttcctgaatgtaagaggaactgagagcacaccgatagtttgaattgatgagaggtatatctcaatgttggcctctaacctgacttttggaaaaaggtgtttcctgaacactttctgctactactttgaaaaggcagtttttagaccaattcgaaaacatcttattttttttgctgcttatccaagtttgatatattagtgaagcgatataaatataaattaaaatggaataaaaaattatcaaatgttacaataaaatctttttcgtccgcattttgcttgctttccggagaagttccatcatacgatggcctctaaagttgtctttccagagaagttccatcattccccatctgttcaggtggtgtgacttgtaaatgctgctttgtcttgaactgaacctgtggaccctttcagcaaaatagttcatatctttttctttattaaactaaaatcacatgataacaaagatttcagattagctatgcacattttttacttaagtgtgtaaataattgctgaacctgcgttttggctaagaaaaatcactgcatgttatgcaatgtgttacatttgttatttaaaataaaaaaatatatttacaatgttctgcagatcaatggaaaaaggtgagctatcatccggtattatgttgttatataaataaatcaatagaaaaaatgtaatcaggtgctagggtagctagcatttttttaagatgtttggcagagcttcatcagttccaaatccacacaggtctactatagagcagctctactagtttgttcgtttcatgcaagtgttcaatacactatttagcacattgaaagtgttcaatacactatttagcacatttgtattagtagttagcttttcgctattaatgcaggatcttacttatctctctcacaaagtttcttggttcttgtgtctaaatttggcggtaaatttacagtccgcttctcttctcttctttttcatccatctcagcatttagctagcttctaacctcttaattatacttactcttagagcaagcttaataacgcaacctatagtgagctttataagagcaagtttaacaatagtgcctatggtgggcttaaaacctctatagccatcaataaaacattcatataatggtgttaactataaggttgactcttagattactattttgtctttttgtcttttatctttttattttggagctcgtgtagcagctgactcttgtataagagcccacttctcctaattttttatctctctcttccacgtaagaaaaaatgtcgtgtaagcaggcctgtagctataataactctctcacgataaaaactgcacatttaatacttcgtcaaactctttcttttatagagtctagctactagtgagtaatctgattttctctctctttatttctctttctttcacatcattataatttggtatatcatcccttgcagcccatctacatcatcttattatatttgttcttagactatctctaacagattttctatactttgcaaacaatgtaatctacagtacaaaacagtactttgcacgacctgctggagatgaccttagtgataacatatgctacctattataccacgatagcgcctctttggtatcgctgcaaacaatgcaagggcaactaagcttctcaaaatcttttggatggagccgctagcgggaacgaagccattctatcccaagtggcttcgaaaccaaacgctacgtaagttaacacattggccaatattgattcaccggctgaacaagaagagggtggatttctcgtcaccaatggaagacccaggccgtggagcgaggaaggcagaaagcaatctggacagccttgtcctctgaaggctaggctgggcacgcctcaacccagccctgtggatccactcccacctgagcggctgagcctgagggtccagactccagatcaccgagctcacgtgggcgacgcaccgtccacaatgcaaccccacatttccggccaggtatctcgtcgcctcccgtccatagaaaagcacgacgtcgcttgtcgatggcccatgggcgagagagaagcgtgatggagacgtgtgctggaattgaactgcggagagggtcgccgcaggcaacgtatagctcggccggccaccattttctccttccagcaggatatgtacagcatttttattgttgttgttctaagagcaactccaataaactccctatattctttctaatatatataaataaagttttt

SEQ ID NO: 22202 - DNA, 76 bp, Zea Mays
atcccatctaaccagctttttaacctacttgctccagaaaacactggaaattgccgtgtccgaacgtccatatata

SEQ ID NO: 22203 - DNA, 1344 bp, Zea Mays
gtcggcgcgccctcgcggcttcggggagagcacccagtgctggccgtgcgggcggacggtgagccccttgaccttggcgaagagcgtgacggcgcggcgcacgccgcggtcgtcggcggacgtgaagtagtcgtggccgaacatgacgccgccggggcggagcacggcccaggccaggttgatgtcggcccacgccgagtggaagtcgtggccggcgtccacctcgatgaggtcggcgtagacgccccactcgcagagcgcggcgagcgcggacgccgtggagaagggcagcggcaggacgacgcgcgccccctccgccgccacgacgttggccatgaactgcggcagcagcagcgcgtcgccgtgccgcggcggcggcacgtcgcggcggaagcggtcccggaacgccggccagccgcggaagtcgtcgacgcagaggatggccggggacagggacaggttcctggccacggccgccatgtgcagcgccgacgcgcccaggaacgcgcccagctccacgaccaccgccgggcgcaccgcctccatgagctccgcgaacaccgcccccgtcgacccccacccgcgcgggcgcgccgcggccgggcgcagcagcgccgccgtgcgctcgggcgggaaccccgcgtaggggctctcgccgccgaagagcctgtcgagcagcgtccgcaccacggcgtcgctcggcaccggctccccgcaccgctccctgaaccggaacaggtcgtgcggaggcgaccgcgggtagctcgacgcggcggtcccgttcgagttcgacgacgccgggaataaagcgtcggcgtgcggccgcgcgatcgtcgtcgcctgggactgggactgggactgggacggtctcggtggcggcggccgggtggacgacgacaggaggcccagcgagtagcccacggcgaagacgatcaggaaggaggcgagccgcgccaggtgcggccgcagcctgggcggcgcggcggaagcggacgacgcccccgccggtggacgtggcttcatgctggtcgcgcacgccacaaaggagtctcctttgcgctgcggctcttctggagtgttgacagacaccgggcttatcgctctttattcctcggtttagctagaatttttatccaaggattaggctttggattctccgttatttatagtatttaatagctacggagagctgcagctagcactagcagcggttgttagcttagtttggtttgatatatatattgcccctagtatttggttggagtgaggatagtgtaaaacaagccaagataacctttttttttggattcctaaataaataaataaataggagaggaaacaaga

SEQ ID NO: 22204 - DNA, 3216 bp, Zea Mays
cgtaggcgtaggctgctgatgcgcggacgcgaaccagcccgagcgcccgtctctgattcccttttcttccctttaaaaacacgcaagaacctacccggtgacgctaccaaacgggcggggccgcaccgaccgaacctaaccgagagcacgagcatacccgtcccgactccgactgcagagcatcagccgaggagaaaagtcgggagaaacgcgcgtgacgtctgcccgcgtcgtatgcgccgcgctgccgtcgccgcgacgacgacgacgaccaggatggcagccgaggagatgagacgggcctccgcctcaacggccacggcggagatgccggcgtcgccggcgccggcgcaagcggggtcgaggtgggcgcgggtgtggccgcgcgcgctccggtggatccccacctccacggaccgcatcatcgccgccgagaagcgactcctcacgatagtcaaaactggatatgtccaggaacgagtcaacattggctctgctccacctgggtcaaaagtaagatggtttaggtcagcaagtgatgaaccaaggttcattaatactgtaacatttgatagcaaggagaatgcccccaccctggttatggtccatggctatggagcttcacaggggttcttctttcgaaactttgatgcccttgcaagccgttttagggtgattgccattgatcagcttggctggggtggttcaagcagacctgacttcacatgtaaaagtaccgaagaaactgaggcatggttcatagattctttcgaggagtggcgcaaggccaagaacctcagtaattttatattgcttggtcactcttttggaggatatgttgctgcaaaatatgcgctaaagcaccctgaacacgttcaacagttgattttggttggtcctgctggcttctcatcagaaacagagcatagctctgagtggttaaccaagtttcgagcaacatggaaaggcatgctaatgaatcgtctttgggagtccaattttactccccaaagggttattaggtagtctaagcttattgcacttatgctttttttcgaagcattacatattacaaattaaaatttcatgtgactttttatttgttttttgccctccatttccaaattgtaattcgttttgctttgtcctaagttaaactttaatatctttgtccaaatttatagaaaaatacataaacatatttttatagcccatttattttgtattgtaccctctctgttccaaatcgtaagatttttttttggtacattatttttactgtgtatctagacatagtgtatatataagtgcgtagcaaaacgtcttatgatttggaatggatggataagtacatgttaatattgtgtgttttttttctggggattcctgcatagacaatattaagatgacttacaatttggaactgagggggtatttggaatataaataggatggcattgcaacagaatctattattcggatttaaatgttggaacaacctgcccttaaggttagagagtagcatggttagtcttttcaattggtaaacgtgtggtgtcagtcgtgacctccacatcagacaaagtttacatggctttacatggaaaacttcaaagaaaaacttgaagttgcgttcgagttggaaacacctgcccagttcgagctgagtccattaatctccattaataaaagttgcattcaaatgtgtgaaagaaaccgaagtaacacctacaccagtcaggctcaaattaacatttctgagcatttccatctgcattactacacacttcagaggccccttgagcatatgcatatcactactgttttgcatccaagacctgagcagcacaagaaggatgctcacaggggcctgcgcagaggttatggaggagtgtttgtcacttctcaagaagactaagtgatgctaaactcatgctgtgtcatgtcacaactttgaagctgcctaggtgcctaccaattcccgctgcatattggaatttaaaataagaactgcataagttgtcattttttattttatttattccttgtagtcaacatgcatagacatcttatgttctgacatggcagtcacatatgcgactgctggctgctgcaaataatggccacttggccaggttaaaaatgggcatatccgcatatggcatgggctactttaacagagtagaggggccagccatattcagatcatactagaggggctcaattgctccaatgggaaaattatgtgaggctttgttgcaattttgctgcaaaaacaaagaacaatgctcttatatttttttgggtaggtgctcctacattttgtccttatatttgtttgtttgtctcaaacaggggattgggtccttggggtccaggtctagtacagagatataccagtgccaggtttggtacaagttctactggtgaattactaacagatgaagaatcggcattgatgacagattatatgtaccatacgttagctgccaaagctagtggagagctgtgcttgaaatatatattttccttcggggcatttgcaaggaaacctcttctgcagtgcgcgtccgattggaaagtgccgactactttcatatatgggcagcaagattggatgaactaccaaggcgctcagcaagcacggaaggacatgaaagttccttgtgaaataatcagggtgccgcagggtggacattttgtgttcatagacaacccttcagggttccactcggctgtcttctatgcgtgccgtaatcttctatcagtaaatggagaggagggattcacatttcctgatggcctaatatctgcgtgaagtggcatgttcaacaagcttgctcaacaacagtttacataaagcaaagatatacgattgtggaaatcattgcccatttccaccaatttgcttgtatacggattatgctgtgtatatattacataacaaatgtattagtatcatttaatgcacgatttgtgaaagggcctgagtttgtatttagcgaattttaggttggtttttttccctttttcttctttcagtgcgcttgctagtcaatcccatactataagccgtgatcattttttgtttatgtctcataatataaggcacatctcactacacacgtttatcgatgcagtgatatatagggaattaaatacaatttttggtttttaaatcagaggtggttactggaaccgagggagtaacgcaga

SEQ ID NO: 22205 - DNA, 2014 bp, Zea Mays
cgtaggcgtaggctgctgatgcgcggacgcgaaccagcccgagcgcccgtctctgattcccttttcttccctttaaaaacacgcaagaacctacccggtgacgctaccaaacgggcggggccgcaccgaccgaacctaaccgagagcacgagcatacccgtcccgactccgactgcagagcatcagccgaggagaaaagtcgggagaaacgcgcgtgacgtctgcccgcgtcgtatgcgccgcgctgccgtcgccgcgacgacgacgacgaccaggatggcagccgaggagatgagacgggcctccgcctcaacggccacggcggagatgccggcgtcgccggcgccggcgcaagcggggtcgaggtgggcgcgggtgtggccgcgcgcgctccggtggatccccacctccacggaccgcatcatcgccgccgagaagcgactcctcacgatagtcaaaactggatatgtccaggaacgagtcaacattggctctgctccacctgggtcaaaagtaagatggtttaggtcagcaagtgatgaaccaaggttcattaatactgtaacatttgatagcaaggagaatgcccccaccctggttatggtccatggctatggagcttcacaggggttcttctttcgaaactttgatgcccttgcaagccgttttagggtgattgccattgatcagcttggctggggtggttcaagcagacctgacttcacatgtaaaagtaccgaagaaactgaggcatggttcatagattctttcgaggagtggcgcaaggccaagaacctcagtaattttatattgcttggtcactcttttggaggatatgttgctgcaaaatatgcgctaaagcaccctgaacacgttcaacagttgattttggttggtcctgctggcttctcatcagaaacagagcatagctctgagtggttaaccaagtttcgagcaacatggaaaggcatgctaatgaatcgtctttgggagtccaattttactccccaaagggttattagacctgagcagcacaagaaggatgctcacaggggcctgcgcagaggttatggaggagtgtttgtcacttctcaagaagactaagtgatgctaaactcatgctgtgtcatgtcacaactttgaagctgcctaggggattgggtccttggggtccaggtctagtacagagatataccagtgccaggtttggtacaagttctactggtgaattactaacagatgaagaatcggcattgatgacagattatatgtaccatacgttagctgccaaagctagtggagagctgtgcttgaaatatatattttccttcggggcatttgcaaggaaacctcttctgcagtgcgcgtccgattggaaagtgccgactactttcatatatgggcagcaagattggatgaactaccaaggcgctcagcaagcacggaaggacatgaaagttccttgtgaaataatcagggtgccgcagggtggacattttgtgttcatagacaacccttcagggttccactcggctgtcttctatgcgtgccgtaatcttctatcagtaaatggagaggagggattcacatttcctgatggcctaatatctgcgtgaagtggcatgttcaacaagcttgctcaacaacagtttacataaagcaaagatatacgattgtggaaatcattgcccatttccaccaatttgcttgtatacggattatgctgtgtatatattacataacaaatgtattagtatcatttaatgcacgatttgtgaaagggcctgagtttgtatttagcgaattttaggttggtttttttccctttttcttctttcagtgcgcttgctagtcaatcccatactataagccgtgatcattttttgtttatgtctcataatataaggcacatctcactacacacgtttatcgatgcagtgatatatagggaattaaatacaatttttggtttttaaatcagaggtggttactggaaccgagggagtaacgcaga

SEQ ID NO: 22206 - DNA, 2828 bp, Zea Mays
cgtaggcgtaggctgctgatgcgcggacgcgaaccagcccgagcgcccgtctctgattcccttttcttccctttaaaaacacgcaagaacctacccggtgacgctaccaaacgggcggggccgcaccgaccgaacctaaccgagagcacgagcatacccgtcccgactccgactgcagagcatcagccgaggagaaaagtcgggagaaacgcgcgtgacgtctgcccgcgtcgtatgcgccgcgctgccgtcgccgcgacgacgacgacgaccaggatggcagccgaggagatgagacgggcctccgcctcaacggccacggcggagatgccggcgtcgccggcgccggcgcaagcggggtcgaggtgggcgcgggtgtggccgcgcgcgctccggtggatccccacctccacggaccgcatcatcgccgccgagaagcgactcctcacgatagtcaaaactggatatgtccaggaacgagtcaacattggctctgctccacctgggtcaaaagtaagatggtttaggtcagcaagtgatgaaccaaggttcattaatactgtaacatttgatagcaaggagaatgcccccaccctggttatggtccatggctatggagcttcacaggggttcttctttcgaaactttgatgcccttgcaagccgttttagggtgattgccattgatcagcttggctggggtggttcaagcagacctgacttcacatgtaaaagtaccgaagaaactgaggcatggttcatagattctttcgaggagtggcgcaaggccaagaacctcagtaattttatattgcttggtcactcttttggaggatatgttgctgcaaaatatgcgctaaagcaccctgaacacgttcaacagttgattttggttggtcctgctggcttctcatcagaaacagagcatagctctgagtggttaaccaagtttcgagcaacatggaaaggcatgctaatgaatcgtctttgggagtccaattttactccccaaagggttattaggtagtctaagcttattgcacttatgctttttttcgaagcattacatattacaaattaaaatttcatgtgactttttatttgttttttgccctccatttccaaattgtaattcgttttgctttgtcctaagttaaactttaatatctttgtccaaatttatagaaaaatacataaacatatttttatagcccatttattttgtattgtaccctctctgttccaaatcgtaagatttttttttggtacattatttttactgtgtatctagacatagtgtatatataagtgcgtagcaaaacgtcttatgatttggaatggatggataagtacatgttaatattgtgtgttttttttctggggattcctgcatagacaatattaagatgacttacaatttggaactgagggggtatttggaatataaataggatggcattgcaacagaatctattattcggatttaaatgttggaacaacctgcccttaaggttagagagtagcatggttagtcttttcaattggtaaacgtgtggtgtcagtcgtgacctccacatcagacaaagtttacatggctttacatggaaaacttcaaagaaaaacttgaagttgcgttcgagttggaaacacctgcccagttcgagctgagtccattaatctccattaataaaagttgcattcaaatgtgtgaaagaaaccgaagtaacacctacaccagtcaggctcaaattaacatttctgagcatttccatctgcattactacacacttcagaggccccttgagcatatgcatatcactactgttttgcatccaagacctgagcagcacaagaaggatgctcacaggggcctgcgcagaggttatggaggagtgtttgtcacttctcaagaagactaagtgatgctaaactcatgctgtgtcatgtcacaactttgaagctgcctaggggattgggtccttggggtccaggtctagtacagagatataccagtgccaggtttggtacaagttctactggtgaattactaacagatgaagaatcggcattgatgacagattatatgtaccatacgttagctgccaaagctagtggagagctgtgcttgaaatatatattttccttcggggcatttgcaaggaaacctcttctgcagtgcgcgtccgattggaaagtgccgactactttcatatatgggcagcaagattggatgaactaccaaggcgctcagcaagcacggaaggacatgaaagttccttgtgaaataatcagggtgccgcagggtggacattttgtgttcatagacaacccttcagggttccactcggctgtcttctatgcgtgccgtaatcttctatcagtaaatggagaggagggattcacatttcctgatggcctaatatctgcgtgaagtggcatgttcaacaagcttgctcaacaacagtttacataaagcaaagatatacgattgtggaaatcattgcccatttccaccaatttgcttgtatacggattatgctgtgtatatattacataacaaatgtattagtatcatttaatgcacgatttgtgaaagggcctgagtttgtatttagcgaattttaggttggtttttttccctttttcttctttcagtgcgcttgctagtcaatcccatactataagccgtgatcattttttgtttatgtctcataatataaggcacatctcactacacacgtttatcgatgcagtgatatatagggaattaaatacaatttttggtttttaaatcagaggtggttactggaaccgagggagtaacgcaga

SEQ ID NO: 22207 - DNA, 1974 bp, Zea Mays
gccgctggactggttgcgcaacctttctcatcagtcccctctctctggtctactcagacttcttcgatgagcctaaacccacatgctgctggtcgcgctgctgcacggggtaggagagcatggcgccggggggtggcacttcggcggccggcctcgtcgccgccacctcccggattgcctccctcggccgcgcgggcgacgcggcctccgcgcgcgccatgttcgacgccatgccgcggcgcgacgccgtagcctggaacgccatgctcaccgcctacgtgcgcgccgggcagccgcgcgacgcactcacgctcttctcccgcgcgcccgcgcccgacgcgttctcgctcaccgccgcgctctccgcggccgcggcactccgaagccccgtcgccggagcgcagttgcacgcccgcctcatccgagctggcctgcgggcgctactcccagtgggcaacacgctcgtcgacatgtacgccaagtgcgcccgcgctgacgacgcggcgcgcgcattcggtgagatgcgcgagcgcaatgcgctgtcctggtgctcgctcctgcatgcctacgtcgtgtcagaccacctgatgctcgcacaggaactgtttgatcaaatgcccaacagaaataatgtcgcctggaacacgttgcttatggggtattcgcgcagtggcaatgctaaccagtgcttgcttctcttcaacaagatgcgggcggaggggatggcctgtgatggggcaacactctgcattctcgctgatgcttgcaccgagctggcccatccatctgctggttctgcaattcacaaggttgcagtgcagagtggatggagtgcaatggccgagaaaaagccacttctctattcagacgtgtacctgagactaatgtcatctcctggactgcgatgatcggaggcctcgcaaggaacggctgtgctgatgaagcactcgcgctatttattgtgatgctggcacacgaacacatccatccagatgacttcacatttgggagtgtgctgcatgcttgtgctactgcggcatctctagcaagtggaaggatggtccactgtagggcgttccgaagtgggtttgcggcctacttgtacgtggccaacagcttgatggacatgtatgccaagtgcggggatgtggagggtggtactaatgtgttcggtgccatcgtcaacaaggatctggtctcatggaacacgatgttgtttggatttgcaataaatggatgggccaacgaagcactggtggtgtacgacagcatgaaatcccatgaagtctgccccgatgaggtgacatttgcaggtttactcacagcctgtaaccactctggtcttctggagcatggggaaagcttcttcgagtcaatggtgtctgttcatggaattcagccaaagccagagcatctgtcttgcattcttgacatgtatgcaagatcagggaacattacaaaggctatggagatgttggatctttattcagaaacgattcgggcacataacagtgacatacgtgaagctctgcttagcgcatgctctttggaacacctgaatttcagggttgcgaggaaggcgatggaagacatggtagcgaccaagtctgcgggagacgtgggctatgtcatgctgtccaacttattctgtgccgctgggcagtggaaccaggctgagcaagtgcgaatagcaatggctgagcacggcatcaagaagacacctggttgtagctggatcgaagtccaaggtgctgttaaggtttttgcatcaggtgcacaagatcttgatcattcaggttctgtattggatgttattagcttgttggatgaagagatgacaaatagcatgtattttgatttgtagtcgtatgtataggtcatcagtcatcacagcgtcccgcactgtgagtgttattatttccaaatggaactttcttcgtttccacatacgctccacggcaaagaagttctaag

SEQ ID NO: 22208 - DNA, 1972 bp, Zea Mays
gcgctcacgttttgctcgctctgccttcgcgttcgcattcgctctcgccgtcacaaaaacctcgccgccggcattccctagttcaccttcccctcgcaatgccctcctcctgaaccctagctccggctcagtaccatcctccacccctctctccgtcgcgatggacgaggactggagcaccgatcccgctcaccgccgacgtcgcctcctcttgccgacgagctgtcagacccagacccagaacccgccacagacacagcccccgctccccatggacctcgcctcccagtacaaccgacgctttgcaccgtcacttttcctcccaccgatggcgccccgcctggcttccagctccggcttctcggtcttcagcaactaccagagcccgccgacgctcgtgcccacggcggcgggcgccggatcgcatctcgctcggtcgctcccgaagctgcctcttttctccatggactctctaggtcttctcccgtactccaccaatcctgcggcgggggcggcggtcccgcgttccctgtcgtcgcctggcggctccgagcagcaagtgccgtccgcgtccggcctgccgccgcgcggggcggggcaccggaggtcccgtagcgatttcctcgtcgggttctcgcgcccgaatcagctctccctgccgatgactcctgcagctggggaatacaggtcgagggaagcctccgtactcgaggagctattccgctcgtacagggacccgaatctcagctcctccggggataacaacagtgaaaggaacgatcacttaggcagacaactcaccggccaaggcgcttggagccccggtgatagcagcgacaatgacgctgagagctgggcggctagtggcagcgcagccgcaggcaccagcgctagccatagccatactcgccattgccgcagcctgtcggtggacagcatcatgggcaatctcaactttggaggcctgggccaggtttctctgagactgccgcctccgtctccggtggcaggcgccggcggcagcctctcgcgtgctggaagtggggcatcgggcggtgcggttgcgactgcctcttctcaacctgccaacggagagttcagcgagtctgagatgaaaaagatcatggccaatgatcgccttgctgagctcgctcttgttgatcctaggagggtcaagaggattctagctaatcggatctcggcagcgaagtctaaggagcgcaaggtgaagtacatgggtgagcttgagcgcaaggttcgtgtgctgcagatggaaactagtacgttatcttcaaaagcagcatcgtcgcagagggaatgcgaggcacttagaattctgaacaatgagatgaagatcaggctgcaagcaatggagcagcaagcacagctgaaagatgcgcctgaaacaaattgctggtgaggccagtgatcctcatgtgccgaatatgagccgcaagattgtcgaacagcagctgcagaagcagccatcggaggcccagctggctgagcagcagcagccacaggaatcagaggagttcaaagctcagcagaagcagtggaaccattaataagacgcgtttcacagaggacatgcttgaaggtctaatccatacagcagatccatgaagggacaccttgtgttctcccggacattcgtttttttttttttccttaggttttagaacgacagcggttggacatcctgtcttttgtggtttcttgcaaaggtatttggttggttggcagttggtaatgcatggtgtgggttctgtgttgtacaagcttccagtctctttagttttccgctagagctattcaaaccattttctggtacatttgtgtagcgaattcaagggggcaatttgtggggtacaacatattgtgtagacgcggatgcgtgagatcatgcagcttgtattcttattcattagtcattgtattaagaagttcagatggaattgtcatagttgat

SEQ ID NO: 22209 - DNA, 3777 bp, Zea Mays
agctatgcacattgttatgttaccaaccactgtcagagcaccttgaagggctacaagaacctgtgggtcaagcaagaaaaccattatcacgaaggcaaacaatacgagcagaagatctgtttcaaatgttgggttgtacttttgtctattttcatgaaaactccgaagggttaacatgtgtaataattatgtcatcataagaagtagtaaaacatgactgcataaggatctcagcgaaaagaatatctgaaaatagtcgctggtctacactaatcaatgtttcattcatagcaggaacacaatggcatctcacaatcaagaacataaaaattggggacagatacgtttgataatcatatcagcaaacaacaaacacgaaactgcacttttaacccaaaggaaatatcttacttcaagagactctgaattgtagaagaaatgccacgtgcaagcacacattgctccacctagaagtggaacctattcggcagaaatgaaaatttgtcagtcaataaaacgtaacataagcagtgtcaaaacagttggaaatttatgaacatatgaactccctaaatagcaaagttctgcaaatagaagaaatacataaaagtttcttctgctcaagacgacactgaagtgaaccgtttctacgacaaaatcttaaaacatcgcaatctgtagttctacaggcgggatagagaagaaccaccacacatttcttcagcaaacgatatcttagctacgacgaaatttacgctcaccatcccccacgagaggcctttccaacccttgagccccgtcttctcgccgtagtcccaaaccagccacatcgccgtcaccctgcaacgcaaatccccgtcagggattcagacattcactcctcacagagcttacaggcgcggaagcagttgttgctagccggtagcagagagaagcggcaccactcggcgacgctggagacgtggacggcccaggtgggcagcgagagcgcgttcgccggctcggacagcgcggcgagcgccggtggtgaggcggccgcggccgccgccacggcagcagctgccgccaggcccatcccacctgtcagacggactgcggaggacggtctccgctgcttacgtcgaggtggcggcggaggaccggagggcgctagcgttgccacgagccggagggatgccattggagccggaggttggcgctagcgctaccgtccgtgaacggtcaaaaatatcagtggcaacgtcagcactcgaacctgtcttgcggtcggtcacgtgcccctcacgcgctgcactagggtttccgcagcatatctaaatactggagcacccccgtccgatctccccctcttttccggctgcgccttcccctcgcagccgccagtcctcaacgccactatcagcagccaccgcccgttacttgtgatgtctcccgccctcgccgctgccgtggagcccatggccgtcgacgactccgcctccaagaaggccaagcgcaagcagctcaaagccgctgccgccgccgccgccgcggaggcagaggaggaggctgcttcggccaagaagaaagagaagaaggagaagaagcggaaagcgaaggagccgtcccctccgctcccgtcggccgcatcatctggcgaggagaagagcagcaccagctccgaggagacagcccccaccgcgaagaaggcgaagaaggacaagacgaagaagaatgtcgaggtctcgtcttcagcctcagatgacgacggcgagatcacggccggcagcgacgaggaccccgcggacccgaacgcgctgacgaacttcaggatatcggagccactgaggcagagcctcaggtccaaggggatcaaggcactgttccccatccaggccaccactttcgacctcgtactcgacggcagcgacttggttggccgagcgcgcaccggtcagggaaaaactttggcttttgtcttgcccatattggaatctttggttaacggggcaaataaggcatctaggcggactgaacatggcaggaccccaagtgttctcgttctgctaccaacaagagagctggccaatcaggtgcatgccgactttgagttttatggtgcaacatttgggctttctgcatgttgtgtgtatgggggttcaccttatcgtcctcaagaaatggcattgagaagaggcgtggacattgttgttggaactcctggtcgtatcaaggattttattgtaaaaggaactctcaacttgaaatgcttgaagttccgtgtccttgacgaagctgatgagatgcttaacatgggctttgttgatgatgtcgagctcattcttggcaaggtagaagatgctaccaaagtacagacacttctgttcagtgccactctgccagattgggtgaataagctctctatgaggtttctgaaagttgacaggaaaacagttgatcttgtcggtaacgagaaactgaaggccagtgcatctgttaagcaccttgctcttccttgtaacaaggcagcaagggcacaacttattccagatattatccgatgttacagccatggaggccgaaccattatcttcactgagacgaaggattctgcatcagagctttctggtttgattcctggatcccgtgccttgcatggagatgttgtgcaagctcagcgtgaagtcattcttgctggatttcgtagcgggaagttccaggttttggttgctacaaatgtggcggctcgtggtctggatattaatgatgtgcagcttatcattcagtgtgaacctccccgtgacgttgaagcttacatacaccggtcaggtcggacagggagagcaggtaatactggtgttgctgtcatgctttatgagcccagatataagtacagtgtcagcagactagaaagggaatctggggttaagttcgaacatatctctgcaccacaacctactgatgtagcacaatctgctggcagtgaagctgcagatgccattgcgagtgtgtcagacagtgttattcctgtcttcaggcagcaagcagagcagttgctaagctcttccactctgtctgcggctgacttgcttgccaaagctcttgcaaaggcagttggttacacggacataaagaaaaggtcattgttgtcttcaatggaggattacgctacactacatcttcaaactggcagacagatgtggtcacctgggtttgcttttactatattgaaaaggttcatgccagaagagaaacttgcagatgtaaagggtgcaaccctcacggctgatggaacgggggttgtatttgatgttcctgcagcagatgttgaagattacattcaagcttcggagaatgccgcacaggtgacaattgatgaagtccagcaattgccacccttgcaagagaagcagcagcagcagtcaagaggcggcggcaatagatttaacaggaggaattagaagctgctgcaatcttaacggacgtttcagtgacgtagttttgaggaagagggggagggaatattctcagttttggctgcaattgtatcgggttttgtttatttgttagcgttcgtcaacgagaatacgacacacatttttgccaacgcaagaattcgcgtttatctactcgaaatcaaccaacgtgttattactaagtaaagctataaacctattgttttaacttgacatggatgctgactcggtctcctttggtcagaaagtgtagtttctattttttttctgcgtcgtgtcagacgttttgatgtttaccgtttttttttaaaaaagcgtattg

SEQ ID NO: 22210 - DNA, 3797 bp, Zea Mays
gttatgttaccaaccactgtcagagcaccttgaagggctacaagaacctgtgggtcaagcaagaaaaccattatcacgaaggcaaacaatacgagcagaagatctgtttcaaatgttgggttgtacttttgtctattttcatgaaaactccgaagggttaacatgtgtaataattatgtcatcataagaagtagtaaaacatgactgcataaggatctcagcgaaaagaatatctgaaaatagtcgctggtctacactaatcaatgtttcattcatagcaggaacacaatggcatctcacaatcaagaacataaaaattggggacagatacgtttgataatcatatcagcaaacaacaaacacgaaactgcacttttaacccaaaggaaatatcttacttcaagagactctgaattgtagaagaaatgccacgtgcaagcacacattgctccacctagaagtggaacctattcggcagaaatgaaaatttgtcagtcaataaaacgtaacataagcagtgtcaaaacagttggaaatttatgaacatatgaactccctaaatagcaaagttctgcaaatagaagaaatacataaaagtttcttctgctcaagacgacactgaagtgaaccgtttctacgacaaaatcttaaaacatcgcaatctgtagttctacaggcgggatagagaagaaccaccacacatttcttcagcaaacgatatcttagctacgacgaaatttacgctcaccatcccccacgagaggcctttccaacccttgagccccgtcttctcgccgtagtcccaaaccagccacatcgccgtcaccctgcaacgcaaatccccgtcagggattcagacattcactcctcacagagcttacaggcgcggaagcagttgttgctagccggtagcagagagaagcggcaccactcggcgacgctggagacgtggacggcccaggtgggcagcgagagcgcgttcgccggctcggacagcgcggcgagcgccggtggtgaggcggccgcggccgccgccacggcagcagctgccgccaggcccatcccacctgtcagacggactgcggaggacggtctccgctgcttacgtcgaggtggcggcggaggaccggagggcgctagcgttgccacgagccggagggatgccattggagccggaggttggcgctagcgctaccgtccgtgaacggtcaaaaatatcagtggcaacgtcagcactcgaacctgtcttgcggtcggtcacgtgcccctcacgcgctgcactagggtttccgcagcatatctaaatactggagcacccccgtccgatctccccctcttttccggctgcgccttcccctcgcagccgccagtcctcaacgccactatcagcagccaccgcccgttacttgtgatgtctcccgccctcgccgctgccgtggagcccatggccgtcgacgactccgcctccaagaaggccaagcgcaagcagctcaaagccgctgccgccgccgccgccgcggaggcagaggaggaggctgcttcggccaagaagaaagagaagaaggagaagaagcggaaagcgaaggagccgtcccctccgctcccgtcggccgcatcatctggcgaggagaagagcagcaccagctccgaggagacagcccccaccgcgaagaaggcgaagaaggacaagacgaagaagaatgtcgaggtctcgtcttcagcctcagatgacgacggcgagatcacggccggcagcgacgaggaccccgcggacccgaacgcgctgacgaacttcaggatatcggagccactgaggcagagcctcaggtccaaggggatcaaggcactgttccccatccaggccaccactttcgacctcgtactcgacggcagcgacttggttggccgagcgcgcaccggtcagggaaaaactttggcttttgtcttgcccatattggaatctttggttaacggggcaaataaggcatctaggcggactgaacatggcaggaccccaagtgttctcgttctgctaccaacaagagagctggccaatcaggtgcatgccgactttgagttttatggtgcaacatttgggctttctgcatgttgtgtgtatgggggttcaccttatcgtcctcaagaaatggcattgagaagaggcgtggacattgttgttggaactcctggtcgtatcaaggattttattgtaaaaggaactctcaacttgaaatgcttgaagttccgtgtccttgacgaagctgatgagatgcttaacatgggctttgttgatgatgtcgagctcattcttggcaaggtagaagatgctaccaaagtacagacacttctgttcagtgccactctgccagattgggtgaataagctctctatgaggtttctgaaagttgacaggaaaacagttgatcttgtcggtaacgagaaactgaaggccagtgcatctgttaagcaccttgctcttccttgtaacaaggcagcaagggcacaacttattccagatattatccgatgttacagccatggaggccgaaccattatcttcactgagacgaaggattctgcatcagagctttctggtttgattcctggatcccgtgccttgcatggagatgttgtgcaagctcagcgtgaagtcattcttgctggatttcgtagcgggaagttccaggttttggttgctacaaatgtggcggctcgtggtctggatattaatgatgtgcagcttatcattcagtgtgaacctccccgtgacgttgaagcttacatacaccggtcaggtcggacagggagagcaggtaatactggtgttgctgtcatgctttatgagcccagatataagtacagtgtcagcagactagaaagggaatctggggttaagttcgaacatatctctgcaccacaacctactgatgtagcacaatctgctggcagtgaagctgcagatgccattgcgagtgtgtcagacagtgttattcctgtcttcaggcagcaagcagagcagttgctaagctcttccactctgtctgcggctgacttgcttgccaaagctcttgcaaaggcagttggttacacggacataaagaaaaggtcattgttgtcttcaatggaggattacgctacactacatcttcaaactggcagacagatgtggtcacctgggtttgcttttactatattgaaaaggttcatgccagaagagaaacttgcagatgtaaagggtgcaaccctcacggctgatggaacgggggttgtatttgatgttcctgcagcagatgttgaagattacattcaagcttcggagaatgccgcacaggtgacaattgatgaagtccagcaattgccacccttgcaagagaagcagcagcagcagtcaagaggcaactcggggggaggaagatttggccgtggaggcggcggcaatagatttaacaggaggaattagaagctgctgcaatcttaacggacgtttcagtgacgtagttttgaggaagagggggagggaatattctcagttttggctgcaattgtatcgggttttgtttatttgttagcgttcgtcaacgagaatacgacacacatttttgccaacgcaagaattcgcgtttatctactcgaaatcaaccaacgtgttattactaagtaaagctataaacctattgttttaacttgacatggatgctgactcggtctcctttggtcagaaagtgtagtttctattttttttctgcgtcgtgtcagacgttttgatgtttaccgtttttttttaaaaaagcgtattg

SEQ ID NO: 22211 - DNA, 1174 bp, Zea Mays
caggttttggttgctacaaatgtggcggctcgtggtctggatattaatgatgtgcagcttatcattcagcttacatacaccggtcaggtcggacagggagagcaggtaatactggtgttgctgtcatgctttatgagcccagatataagtacagtgtcagcagactagaaagggaatctggggttaagttcgaacatatctctgcaccacaacctactgatgtagcacaatctgctggcagtgaagctgcagatgccattgcgagtgtgtcagacagtgttattcctgtcttcaggcagcaagcagagcagttgctaagctcttccactctgtctgcggctgacttgcttgccaaagctcttgcaaaggcagttggttacacggacataaagaaaaggtcattgttgtcttcaatggaggattacgctacactacatcttcaaactggcagacagatgtggtcacctgggtttgcttttactatattgaaaaggttcatgccagaagagaaacttgcagatgtaaagggtgcaaccctcacggctgatggaacgggggttgtatttgatgttcctgcagcagatgttgaagattacattcaagcttcggagaatgccgcacaggtgacaattgatgaagtccagcaattgccacccttgcaagagaagcagcagcagcagtcaagaggcaactcggggggaggaagatttggccgtggaggtggcgggagattctctggtggtggccgtgggggcggcttcggtggtggcggaagaggcagaggtggtggtggcggcagggggaggcggcggcaatagatttaacaggaggaattagaagctgctgcaatcttaacggacgtttcagtgacgtagttttgaggaagagggggagggaatattctcagttttggctgcaattgtatcgggttttgtttatttgttagcgttcgtcaacgagaatacgacacacatttttgccaacgcaagaattcgcgtttatctactcgaaatcaaccaacgtgttattactaagtaaagctataaacctattgttttaacttgacatggatgctgactcggtctcctttggtcagaaagtgtagtttctattttttttctgcgtcgtgtcagacgttttgatgtttaccgtttttttttaaaaaagcgtattg

SEQ ID NO: 22212 - DNA, 1106 bp, Zea Mays
accctgcgcccctctcttgttctccgtttccccgcggcgtactcttcctgctcttcctccccctctgtttatctctctctcggtcctcccgtgtccatcgcgtgcgctctgtctccggtggcgccgcctccgccaccctgcaccaggtagccataccttcgccggagacgagcgcccaccagattcgtggatatgtctgataatgagaaattggtgggggagggaaccacccgccgaggggcggactgggaagttgtcactctcacagcatctgcctatgaagcagcgccagggcctgttggaacggaagtaaagcctgttaacgaagatcaagagcgtagttcatccgatgcactgctcatgtctgaccactttgtgtttccgccgagtgaacacgagaacctgccaatacaaaccagttttgatgagatacatgctgagaaggatgtgcagaaacctagtaccagtgtggaggattatagtatcaagaatgatgttgggtctgagagagttcagtttgacgatgaagggaaacacctctcagatgatgatgtggagatgaaagatgacacccctgggtacggttcctctcacgctgaagatgatgcacatggttttgttgcccatggtgatggcattgagtctggtgaagattttgatgaaaaatcaggccaccctttagagctctcagacagcaagagctgtgatactggtgcctcttgcaaatgttggttgaagaagcatatgacatgcctgtataaccaaacaaaggaaacaaatgctatctggtctgtggtggttgcagctgcactagttggtattgtgatcttgggacgttggcacaaagataaattccaccttaaccagcttaagtggtgctctggctcagcagtgaggtgcgcccgtacagctgggaaaggataatagggggcgattgcaggcccaagccatcagcgtgtgcaacttaacagattttaggaatgtcatccaaggaaatgcaaacttagaatagtggccgttcagggaagttggaaattttgaaggcattcaggggatcaatataaatttcagtggcaatgaggaatttattcatattctagcgtgag

SEQ ID NO: 22213 - DNA, 1629 bp, Zea Mays
accctgcgcccctctcttgttctccgtttccccgcggcgtactcttcctgctcttcctccccctctgtttatctctctctcggtcctcccgtgtccatcgcgtgcgctctgtctccggtggcgccgcctccgccaccctgcaccagatcagattcgtggatatgtctgataatgagaaattggtgggggagggaaccacccgccgaggggcggactgggaagttgtcactctcacagcatctgcctatgaagcagcgccagggcctgttggaacggaagtaaagcctgttaacgaagatcaagagcgtagttcatccgatgcactgctcatgtctgaccactttgtgtttccgccgagtgaacacgagaacctgccaatacaaaccagttttgatgagatacatgctgagaaggatgtgcagaaacctagtaccagtgtggaggattatagtatcaagaatgatgttgggtctgagagagttcagtttgacgatgaagggaaacacctctcagatgatgatgtggagatgaaagatgacacccctgggtacggttcctctcacgctgaagatgatgcacatggttttgttgcccatggtgatggcattgagtctggtgaagattttgatgaaaaatcaggccaccctttagagctctcagacagcaagagctgtgatactggtgcctcttgcaaatgttggttgaagaagcatatgacatgcctgtataaccaaacaaaggaaacaaatgctatctggtctgtggtggttgcagctgcactagttggtattgtgatcttgggacgttggcacaaagataaattccaccttaaccagcttaagtggtgctctggctcagcagtgaggtgcgcccgtacagctgggaaaggataatagggggcgattgcaggcccaagccatcagcgtgtgcaacttaacagattttaggaatgtcatccaaggaaatgcaaacttagaatagtggccgttcagggaagttggaaattttgaaggcattcaggggatcaatataaatttcagtggcaatgaggaatttattcatattctagcgtgaggattagcctttcacttttcaccagaaccaagaggatgatcaacaattggcttgttgaaaactcagatgagtcaattcaactgtcaccaaaatggttttggaatattgttgtgacggtgacgaaaaggagtatgttcaatgtaataatatgttcaactggaatttcacttgccacctacaatgagtgcctcgtgggcttctaagtcaaactcactcctgccatacacattatcttacagtttttcttgcaacctggcacatgatttttggttcctggcttcctgctacttgctgtggtgtatcatatatgttgactgatggctgtagaacatagtacaattgcatactgcaaagtctgttgaaattttggtggttctgcgagaacaattcacgtgcgattgtgaaaatggaggacaaggaaagtttgtttggctcttatttgttgttactcctgagtattgaaatattgcttaggtctagtttggaaactccattttttaagagatttctatcttttaaagagaaaatgaattaatttctattgagaaaaagaaa

SEQ ID NO: 22214 - DNA, 1388 bp, Zea Mays
accctgcgcccctctcttgttctccgtttccccgcggcgtactcttcctgctcttcctccccctctgtttatctctctctcggtcctcccgtgtccatcgcgtgcgctctgtctccggtggcgccgcctccgccaccctgcaccagatcagattcgtggatatgtctgataatgagaaattggtgggggagggaaccacccgccgaggggcggactgggaagttgtcactctcacagcatctgcctatgaagcagcgccagggcctgttggaacggaagtaaagcctgttaacgaagatcaagagcgtagttcatccgatgcactgctcatgtctgaccactttgtgtttccgccgagtgaacacgagaacctgccaatacaaaccagttttgatgagatacatgctgagaaggatgtgcagaaacctagtaccagtgtggaggattatagtatcaagaatgatgttgggtctgagagagttcagtttgacgatgaagggaaacacctctcagatgatgatgtggagatgaaagatgacacccctgggtacggttcctctcacgctgaagatgatgcacatggttttgttgcccatggtgatggcattgagtctggtgaagattttgatgaaaaatcaggccaccctttagagctctcagacagcaagagctgtgatactggtgcctcttgcaaatgttggttgaagaagcatatgacatgcctgtataaccaaacaaaggaaacaaatgctatctggtctgtggtggttgcagctgcactagttggtattgtgatcttgggacgttggcacaaagataaattccaccttaaccagcttaagtggtgctctggctcagcagtgagaggatgatcaacaattggcttgttgaaaactcagatgagtcaattcaactgtcaccaaaatggttttggaatattgttgtgacggtgacgaaaaggagtatgttcaatgtaataatatgttcaactggaatttcacttgccacctacaatgagtgcctcgtgggcttctaagtcaaactcactcctgccatacacattatcttacagtttttcttgcaacctggcacatgatttttggttcctggcttcctgctacttgctgtggtgtatcatatatgttgactgatggctgtagaacatagtacaattgcatactgcaaagtctgttgaaattttggtggttctgcgagaacaattcacgtgcgattgtgaaaatggaggacaaggaaagtttgtttggctcttatttgttgttactcctgagtattgaaatattgcttaggtctagtttggaaactccattttttaagagatttctatcttttaaagagaaaatgaattaatttctattgagaaaaagaaa

SEQ ID NO: 22215 - DNA, 1665 bp, Zea Mays
accctgcgcccctctcttgttctccgtttccccgcggcgtactcttcctgctcttcctccccctctgtttatctctctctcggtcctcccgtgtccatcgcgtgcgctctgtctccggtggcgccgcctccgccaccctgcaccaggtagccataccttcgccggagacgagcgcccaccagatcagattcgtggatatgtctgataatgagaaattggtgggggagggaaccacccgccgaggggcggactgggaagttgtcactctcacagcatctgcctatgaagcagcgccagggcctgttggaacggaagtaaagcctgttaacgaagatcaagagcgtagttcatccgatgcactgctcatgtctgaccactttgtgtttccgccgagtgaacacgagaacctgccaatacaaaccagttttgatgagatacatgctgagaaggatgtgcagaaacctagtaccagtgtggaggattatagtatcaagaatgatgttgggtctgagagagttcagtttgacgatgaagggaaacacctctcagatgatgatgtggagatgaaagatgacacccctgggtacggttcctctcacgctgaagatgatgcacatggttttgttgcccatggtgatggcattgagtctggtgaagattttgatgaaaaatcaggccaccctttagagctctcagacagcaagagctgtgatactggtgcctcttgcaaatgttggttgaagaagcatatgacatgcctgtataaccaaacaaaggaaacaaatgctatctggtctgtggtggttgcagctgcactagttggtattgtgatcttgggacgttggcacaaagataaattccaccttaaccagcttaagtggtgctctggctcagcagtgaggtgcgcccgtacagctgggaaaggataatagggggcgattgcaggcccaagccatcagcgtgtgcaacttaacagattttaggaatgtcatccaaggaaatgcaaacttagaatagtggccgttcagggaagttggaaattttgaaggcattcaggggatcaatataaatttcagtggcaatgaggaatttattcatattctagcgtgaggattagcctttcacttttcaccagaaccaagaggatgatcaacaattggcttgttgaaaactcagatgagtcaattcaactgtcaccaaaatggttttggaatattgttgtgacggtgacgaaaaggagtatgttcaatgtaataatatgttcaactggaatttcacttgccacctacaatgagtgcctcgtgggcttctaagtcaaactcactcctgccatacacattatcttacagtttttcttgcaacctggcacatgatttttggttcctggcttcctgctacttgctgtggtgtatcatatatgttgactgatggctgtagaacatagtacaattgcatactgcaaagtctgttgaaattttggtggttctgcgagaacaattcacgtgcgattgtgaaaatggaggacaaggaaagtttgtttggctcttatttgttgttactcctgagtattgaaatattgcttaggtctagtttggaaactccattttttaagagatttctatcttttaaagagaaaatgaattaatttctattgagaaaaagaaa

SEQ ID NO: 22216 - DNA, 2018 bp, Zea Mays
cgcaaagacaggcacccaccaagaataggcgtttgtcgtgtctcgtgcccgtgcctgtgaacctctcacgtgccgtgccggaatctcgcagccatcgatcgatccagcagatgtgccagccgccgcggccgcgccaagcccaagccgagctgacgatcctgatgcggttgaaaatttccacgaacatatagatcctcatcgtcgaccccatccgtggtgctcccggtgcgccaggctaccagagtccgacgcagacgtagctcccggccacagcagagcccacgccttgagcccttgacgcgctccgtgtgagtggagcgtacgggcgccggccggcggccagagaggaaacggatctaggaggctcagctgagtcgaggagatggaccgcaaagatgtcgggatcctcgccatggacatctacttcccgccctcctgcgtgcagcaggaggcacttgaggcccatgatggggcgagcaaagggaagtacaccattgggcttgggcaagattgcatggccttttgcagcgaggtggaggatgtcatctcaatgagtttgacggttgtcaattctctgctgaaaaaatacaagattgatcccaagttaatcggtcgcttggaggttggaagtgaaacagttatagacaaaagtaaatccatcaaaacttggctgatgcagatctttgaggaaagtggtaacagtgacattgaaggtgttgactccagcaatgcatgttatggcgggacagcagccctactgaattgtgtgaattgggtcgaaagtaattcctgggatggccgttatggtcttgtcgtttgcacggatagcgcggtttatgccgaagggccagctcgtccaacaggaggtgctgctgctatagcaatgctcattggtcctaatgctccaatttccttcgagagcaaatatagagcttctcacatggctcatgtctatgatttctacaaacctgatcttgcaagtgaatatccggttgttgatggtaaactatcccaaacatgctacctaatggctctagactcatgctacagacagttctgcaacaagtatgagaagattgcgggtaaacaattctcaatttgtgatgcagaatattttgtgttccattctccatacaacaagctcgtgcagaagagtttcgctcgactttattacaatgactttttgcgcaactgcagctctgttgatgatgatgctaaagagaagctccagtctttttcaaatttgactggtgaagagagctaccagagtcgcgacttggaaaaggcctcacaacaggtcgcgaagcacctccatgacatcaaagttcagccatcgactctgcttccgaaacaaattgaatgggcaaagaattgtgatgttctcttacggcagtggtttgacatccactatgttttcattgaggctaaacaatggccagcatcccttcagcctatcaaacattgcttcagttcttgatgtcaccgagaagcttcagtcaagacatgagactttgcctgagaaattcgttgagacactgaagctgatggaacaccgatacggcgcaaaggacttcgagacgagcagagacacgagcctactgcagccgggcacattctacctcaccaaggtcgactccatgtaccggaggttctattcccagaagctgtccgaggaaacaggcggcgggaaaaccaagtgctgcaacggcctcgcaaatggccactagtggtcgcccagcactgttgctcatcattctcagtattttgataatgctcatggttagcgtttagtctagcgtgtttctgaaataatataattgttctttgaagctgtcccaccccacctagatcagctagttttttattttaatattttattcttctgaacattgaaattcatcagtctctacattgtttctctttgtttcttcttttagtactctcttcgttccaaattctaaattacgtacataatgtttgctatgtctaatagtaaaaaaaaagtcaacaccttataa

SEQ ID NO: 22217 - DNA, 2014 bp, Zea Mays
gtcgtgtctcgtgcccgtgcctgtgaacctctcacgtgccgtgccggaatctcgcagccatcgatcgatccagcagatgtgccagccgccgcggccgcgccaagcccaagccgagctgacgatcctgatgcggttgaaaatttccacgaacatatagatcctcatcgtcgaccccatccgtggtgctcccggtgcgccaggctaccagagtccgacgcagacgtagctcccggccacagcagagcccacgccttgagcccttgacgcgctccgtgtgagtggagcgtacgggcgccggccggcggccagagaggaaacggatctaggaggctcagctgagtcgaggagatggaccgcaaagatgtcgggatcctcgccatggacatctacttcccgccctcctgcgtgcagcaggaggcacttgaggcccatgatggggcgagcaaagggaagtacaccattgggcttgggcaagattgcatggccttttgcagcgaggtggaggatgtcatctcaatgagtttgacggttgtcaattctctgctgaaaaaatacaagattgatcccaagttaatcggtcgcttggaggttggaagtgaaacagttatagacaaaagaaagtggtaacagtgacattgaaggtgttgactccagcaatgcatgttatggcgggacagcagccctactgaattgtgtgaattgggtcgaaagtaattcctgggatggccgttatggtcttgtcgtttgcacggatagcgcggtttatgccgaagggccagctcgtccaacaggaggtgctgctgctatagcaatgctcattggtcctaatgctccaatttccttcgagagcaaatatagagcttctcacatggctcatgtctatgatttctacaaacctgatcttgcaagtgaatatccggttgttgatggtaaactatcccaaacatgctacctaatggctctagactcatgctacagacagttctgcaacaagtatgagaagattgcgggtaaacaattctcaatttgtgatgcagaatattttgtgttccattctccatacaacaagctcgtgcagaagagtttcgctcgactttattacaatgactttttgcgcaactgcagctctgttgatgatgatgctaaagagaagctccagtctttttcaaatttgactggtgaagagagctaccagagtcgcgacttggaaaaggcctcacaacaggtcgcgaagcacctccatgacatcaaagttcagccatcgactctgcttccgaaacaaattggtaacatgtatactgcatccctttatgctgcattagcatctgtgctatataacaagcatgatagtctgaatgggcaaagaattgtgatgttctcttacggcagtggtttgacatccactatgttttcattgaggctaaacaatggccagcatcccttcagcctatcaaacattgcttcagttcttgatgtcaccgagaagcttcagtcaagacatgagactttgcctgagaaattcgttgagacactgaagctgatggaacaccgatacggcgcaaaggacttcgagacgagcagagacacgagcctactgcagccgggcacattctacctcaccaaggtcgactccatgtaccggaggttctattcccagaagctgtccgaggaaacaggcggcgggaaaaccaagtgctgcaacggcctcgcaaatggccactagtggtcgcccagcactgttgctcatcattctcagtattttgataatgctcatggttagcgtttagtctagcgtgtttctgaaataatataattgttctttgaagctgtcccaccccacctagatcagctagttttttattttaatattttattcttctgaacattgaaattcatcagtctctacattgtttctctttgtttcttcttttagtactctcttcgttccaaattctaaattacgtacataatgtttgctatgtctaatagtaaaaaaaaagtcaacaccttataa

SEQ ID NO: 22218 - DNA, 1919 bp, Zea Mays
gtcgtgtctcgtgcccgtgcctgtgaacctctcacgtgccgtgccggaatctcgcagccatcgatcgatccagcagatgtgccagccgccgcggccgcgccaagcccaagccgagctgacgatcctgatgcggttgaaaatttccacgaacatatagatcctcatcgtcgaccccatccgtggtgctcccggtgcgccaggctaccagagtccgacgcagacgtagctcccggccacagcagagcccacgccttgagcccttgacgcgctccgtgtgagtggagcgtacgggcgccggccggcggccagagaggaaacggatctaggaggctcagctgagtcgaggagatggaccgcaaagatgtcgggatcctcgccatggacatctacttcccgccctcctgcgtgcagcaggaggcacttgaggcccatgatggggcgagcaaagggaagtacaccattgggcttgggcaagattgcatggccttttgcagcgaggtggaggatgtcatctcaatgagtttgacggttgtcaattctctgctgaaaaaatacaagattgatcccaagttaatcggtcgcttggaggttggaagtgaaacagttatagacaaaagtaaatccatcaaaacttggctgatgcagatctttgaggaaagtggtaacagtgacattgaaggtgttgactccagcaatgcatgttatggcgggacagcagccctactgaattgtgtgaattgggtcgaaagtaattcctgggatggccgttatggtcttgtcgtttgcacggatagcgcggtttatgccgaagggccagctcgtccaacaggaggtgctgctgctatagcaatgctcattggtcctaatgctccaatttccttcgagagcaaatatagagcttctcacatggctcatgtctatgatttctacaaacctgatcttgcaagtgaatatccggttgttgatggtaaactatcccaaacatgctacctaatggctctagactcatgctacagacagttctgcaacaagtatgagaagattgcgggtaaacaattctcaatttgtgatgcagaatattttgtgttccattctccatacaacaagctcgtgcagaagagtttcgctcgactttattacaatgactttttgcgcaactgcagctctgttgatgatgatgctaaagagaagctccagtctttttcaaatttgactggtgaagagagctaccagagtcgcgacttggaaaaggcctcacaacaggtcgcgaagcacctccatgacatcaaagttcagccatcgactctgcttccgaaacaaattggctaaacaatggccagcatcccttcagcctatcaaacattgcttcagttcttgatgtcaccgagaagcttcagtcaagacatgagactttgcctgagaaattcgttgagacactgaagctgatggaacaccgatacggcgcaaaggacttcgagacgagcagagacacgagcctactgcagccgggcacattctacctcaccaaggtcgactccatgtaccggaggttctattcccagaagctgtccgaggaaacaggcggcgggaaaaccaagtgctgcaacggcctcgcaaatggccactagtggtcgcccagcactgttgctcatcattctcagtattttgataatgctcatggttagcgtttagtctagcgtgtttctgaaataatataattgttctttgaagctgtcccaccccacctagatcagctagttttttattttaatattttattcttctgaacattgaaattcatcagtctctacattgtttctctttgtttcttcttttagtactctcttcgttccaaattctaaattacgtacataatgtttgctatgtctaatagtaaaaaaaaagtcaacaccttataa

SEQ ID NO: 22219 - DNA, 1914 bp, Zea Mays
gtctcgtgcccgtgcctgtgaacctctcacgtgccgtgccggaatctcgcagccatcgatcgatccagcagatgtgccagccgccgcggccgcgccaagcccaagccgagctgacgatcctgatgcggttgaaaatttccacgaacatatagatcctcatcgtcgaccccatccgtggtgctcccggtgcgccaggctaccagagtccgacgcagacgtagctcccggccacagcagagcccacgccttgagcccttgacgcgctccgtgtgagtggagcgtacgggcgccggccggcggccagagaggaaacggatctaggaggctcagctgagtcgaggagatggaccgcaaagatgtcgggatcctcgccatggacatctacttcccgccctcctgcgtgcagcaggaggcacttgaggcccatgatggggcgagcaaagggaagtacaccattgggcttgggcaagattgcatggccttttgcagcgaggtggaggatgtcatctcaatgaggaaagtggtaacagtgacattgaaggtgttgactccagcaatgcatgttatggcgggacagcagccctactgaattgtgtgaattgggtcgaaagtaattcctgggatggccgttatggtcttgtcgtttgcacggatagcgcggtttatgccgaagggccagctcgtccaacaggaggtgctgctgctatagcaatgctcattggtcctaatgctccaatttccttcgagagcaaatatagagcttctcacatggctcatgtctatgatttctacaaacctgatcttgcaagtgaatatccggttgttgatggtaaactatcccaaacatgctacctaatggctctagactcatgctacagacagttctgcaacaagtatgagaagattgcgggtaaacaattctcaatttgtgatgcagaatattttgtgttccattctccatacaacaagctcgtgcagaagagtttcgctcgactttattacaatgactttttgcgcaactgcagctctgttgatgatgatgctaaagagaagctccagtctttttcaaatttgactggtgaagagagctaccagagtcgcgacttggaaaaggcctcacaacaggtcgcgaagcacctccatgacatcaaagttcagccatcgactctgcttccgaaacaaattggtaacatgtatactgcatccctttatgctgcattagcatctgtgctatataacaagcatgatagtctgaatgggcaaagaattgtgatgttctcttacggcagtggtttgacatccactatgttttcattgaggctaaacaatggccagcatcccttcagcctatcaaacattgcttcagttcttgatgtcaccgagaagcttcagtcaagacatgagactttgcctgagaaattcgttgagacactgaagctgatggaacaccgatacggcgcaaaggacttcgagacgagcagagacacgagcctactgcagccgggcacattctacctcaccaaggtcgactccatgtaccggaggttctattcccagaagctgtccgaggaaacaggcggcgggaaaaccaagtgctgcaacggcctcgcaaatggccactagtggtcgcccagcactgttgctcatcattctcagtattttgataatgctcatggttagcgtttagtctagcgtgtttctgaaataatataattgttctttgaagctgtcccaccccacctagatcagctagttttttattttaatattttattcttctgaacattgaaattcatcagtctctacattgtttctctttgtttcttcttttagtactctcttcgttccaaattctaaattacgtacataatgtttgctatgtctaatagtaaaaaaaaagtcaacaccttataa

SEQ ID NO: 22220 - DNA, 1900 bp, Zea Mays
ggaatctcgcagccatcgatcgatccagcagatgtgccagccgccgcggccgcgccaagcccaagccgagctgacgatcctgatgcggttgaaaatttccacgaacatatagatcctcatcgtcgaccccatccgtggtgctcccggtgcgccaggctaccagagtccgacgcagacgtagctcccggccacagcagagcccacgccttgagcccttgacgcgctccgtgtgagtggagcgtacgggcgccggccggcggccagagaggaaacggatctaggaggctcagctgagtcgaggagatggaccgcaaagatgtcgggatcctcgccatggacatctacttcccgccctcctgcgtgcagcagtttgacggttgtcaattctctgctgaaaaaatacaagattgatcccaagttaatcggtcgcttggaggttggaagtgaaacagttatagacaaaagtaaatccatcaaaacttggctgatgcagatctttgaggaaagtggtaacagtgacattgaaggtgttgactccagcaatgcatgttatggcgggacagcagccctactgaattgtgtgaattgggtcgaaagtaattcctgggatggccgttatggtcttgtcgtttgcacggatagcgcggtttatgccgaagggccagctcgtccaacaggaggtgctgctgctatagcaatgctcattggtcctaatgctccaatttccttcgagagcaaatatagagcttctcacatggctcatgtctatgatttctacaaacctgatcttgcaagtgaatatccggttgttgatggtaaactatcccaaacatgctacctaatggctctagactcatgctacagacagttctgcaacaagtatgagaagattgcgggtaaacaattctcaatttgtgatgcagaatattttgtgttccattctccatacaacaagctcgtgcagaagagtttcgctcgactttattacaatgactttttgcgcaactgcagctctgttgatgatgatgctaaagagaagctccagtctttttcaaatttgactggtgaagagagctaccagagtcgcgacttggaaaaggcctcacaacaggtcgcgaagcacctccatgacatcaaagttcagccatcgactctgcttccgaaacaaattggtaacatgtatactgcatccctttatgctgcattagcatctgtgctatataacaagcatgatagtctgaatgggcaaagaattgtgatgttctcttacggcagtggtttgacatccactatgttttcattgaggctaaacaatggccagcatcccttcagcctatcaaacattgcttcagttcttgatgtcaccgagaagcttcagtcaagacatgagactttgcctgagaaattcgttgagacactgaagctgatggaacaccgatacggcgcaaaggacttcgagacgagcagagacacgagcctactgcagccgggcacattctacctcaccaaggtcgactccatgtaccggaggttctattcccagaagctgtccgaggaaacaggcggcgggaaaaccaagtgctgcaacggcctcgcaaatggccactagtggtcgcccagcactgttgctcatcattctcagtattttgataatgctcatggttagcgtttagtctagcgtgtttctgaaataatataattgttctttgaagctgtcccaccccacctagatcagctagttttttattttaatattttattcttctgaacattgaaattcatcagtctctacattgtttctctttgtttcttcttttagtactctcttcgttccaaattctaaattacgtacataatgtttgctatgtctaatagtaaaaaaaaagtcaacaccttataa

SEQ ID NO: 22221 - DNA, 1951 bp, Zea Mays
ggaatctcgcagccatcgatcgatccagcagatgtgccagccgccgcggccgcgccaagcccaagccgagctgacgatcctgatgcggttgaaaatttccacgaacatatagatcctcatcgtcgaccccatccgtggtgctcccggtgcgccaggctaccagagtccgacgcagacgtagctcccggccacagcagagcccacgccttgagcccttgacgcgctccgtgtgagtggagcgtacgggcgccggccggcggccagagaggaaacggatctaggaggctcagctgagtcgaggagatggaccgcaaagatgtcgggatcctcgccatggacatctacttcccgccctcctgcgtgcagcaggaggcacttgaggcccatgatggggcgagcaaagggaagtacaccattgggcttgggcaagattgcatggccttttgcagcgaggtggaggatgtcatctcaatgagtttgacggttgtcaattctctgctgaaaaaatacaagattgatcccaagttaatcggtcgcttggaggttggaagtgaaacagttatagacaaaagtaaatccatcaaaacttggctgatgcagatctttgaggaaagtggtaacagtgacattgaaggtgttgactccagcaatgcatgttatggcgggacagcagccctactgaattgtgtgaattgggtcgaaagtaattcctgggatggccgttatggtcttgtcgtttgcacggatagcgcggtttatgccgaagggccagctcgtccaacaggaggtgctgctgctatagcaatgctcattggtcctaatgctccaatttccttcgagagcaaatatagagcttctcacatggctcatgtctatgatttctacaaacctgatcttgcaagtgaatatccggttgttgatggtaaactatcccaaacatgctacctaatggctctagactcatgctacagacagttctgcaacaagtatgagaagattgcgggtaaacaattctcaatttgtgatgcagaatattttgtgttccattctccatacaacaagctctgttgatgatgatgctaaagagaagctccagtctttttcaaatttgactggtgaagagagctaccagagtcgcgacttggaaaaggcctcacaacaggtcgcgaagcacctccatgacatcaaagttcagccatcgactctgcttccgaaacaaattggtaacatgtatactgcatccctttatgctgcattagcatctgtgctatataacaagcatgatagtctgaatgggcaaagaattgtgatgttctcttacggcagtggtttgacatccactatgttttcattgaggctaaacaatggccagcatcccttcagcctatcaaacattgcttcagttcttgatgtcaccgagaagcttcagtcaagacatgagactttgcctgagaaattcgttgagacactgaagctgatggaacaccgatacggcgcaaaggacttcgagacgagcagagacacgagcctactgcagccgggcacattctacctcaccaaggtcgactccatgtaccggaggttctattcccagaagctgtccgaggaaacaggcggcgggaaaaccaagtgctgcaacggcctcgcaaatggccactagtggtcgcccagcactgttgctcatcattctcagtattttgataatgctcatggttagcgtttagtctagcgtgtttctgaaataatataattgttctttgaagctgtcccaccccacctagatcagctagttttttattttaatattttattcttctgaacattgaaattcatcagtctctacattgtttctctttgtttcttcttttagtactctcttcgttccaaattctaaattacgtacataatgtttgctatgtctaatagtaaaaaaaaagtcaacaccttataa

SEQ ID NO: 22222 - DNA, 1800 bp, Zea Mays
gcccacgccttgagcccttgacgcgctccgtgtgagtggagcgtacgggcgccggccggcggccagagaggaaacggatctaggaggctcagctgagtcgaggagatggaccgcaaagatgtcgggatcctcgccatggacatctacttcccgccctcctgcgtgcagcaggaggcacttgaggcccatgatggggcgagcaaagggaagtacaccattgggcttgggcaagattgcatggccttttgcagcgaggtggaggatgtcatctcaatgagtttgacggttgtcaattctctgctgaaaaaatacaagattgatcccaagttaatcggtcgcttggaggttggaagtgaaacagttatagacaaaagtaaatccatcaaaacttggctgatgcagatctttgaggaaagtggtaacagtgacattgaaggtgttgactccagcaatgcatgttatggcgggacagcagccctactgaattgtgtgaattgggtcgaaagtaattcctgggatggccgttatggtcttgtcgtttgcacggatagcgcggtttatgccgaagggccagctcgtccaacaggaggtgctgctgctatagcaatgctcattggtcctaatgctccaatttccttcgagagcaaatatagagcttctcacatggctcatgtctatgatttctacaaacctgatcttgcaagtgaatatccggttgttgatggtaaactatcccaaacatgctacctaatggctctagactcatgctacagacagttctgcaacaagtatgagaagattgcgggtaaacaattctcaatttgtgatgcagaatattttgtgttccattctccatacaacaagaagagtttcgctcgactttattacaatgactttttgcgcaactgcagctctgttgatgatgatgctaaagagaagctccagtctttttcaaatttgactggtgaagagagctaccagagtcgcgacttggaaaaggcctcacaacaggtcgcgaagcacctccatgacatcaaagttcagccatcgactctgcttccgaaacaaattggtaacatgtatactgcatccctttatgctgcattagcatctgtgctatataacaagcatgatagtctgaatgggcaaagaattgtgatgttctcttacggcagtggtttgacatccactatgttttcattgaggctaaacaatggccagcatcccttcagcctatcaaacattgcttcagttcttgatgtcaccgagaagcttcagtcaagacatgagactttgcctgagaaattcgttgagacactgaagctgatggaacaccgatacggcgcaaaggacttcgagacgagcagagacacgagcctactgcagccgggcacattctacctcaccaaggtcgactccatgtaccggaggttctattcccagaagctgtccgaggaaacaggcggcgggaaaaccaagtgctgcaacggcctcgcaaatggccactagtggtcgcccagcactgttgctcatcattctcagtattttgataatgctcatggttagcgtttagtctagcgtgtttctgaaataatataattgttctttgaagctgtcccaccccacctagatcagctagttttttattttaatattttattcttctgaacattgaaattcatcagtctctacattgtttctctttgtttcttcttttagtactctcttcgttccaaattctaaattacgtacataatgtttgctatgtctaatagtaaaaaaaaagtcaacaccttataa

SEQ ID NO: 22223 - DNA, 1665 bp, Zea Mays
ggactttcctgcgtctaaggattgtgtttctctagaaattgacggaagtatttggctagatgggtctcatgggtggaattgtcgccacttgttgggaggcacttgaggcccatgatggggcgagcaaagggaagtacaccattgggcttgggcaagattgcatggccttttgcagcgaggtggaggatgtcatctcaatgagtttgacggttgtcaattctctgctgaaaaaatacaagattgatcccaagttaatcggtcgcttggaggttggaagtgaaacagttatagacaaaagtaaatccatcaaaacttggctgatgcagatctttgaggaaagtggtaacagtgacattgaaggtgttgactccagcaatgcatgttatggcgggacagcagccctactgaattgtgtgaattgggtcgaaagtaattcctgggatggccgttatggtcttgtcgtttgcacggatagcgcggtttatgccgaagggccagctcgtccaacaggaggtgctgctgctatagcaatgctcattggtcctaatgctccaatttccttcgagagcaaatatagagcttctcacatggctcatgtctatgatttctacaaacctgatcttgcaagtgaatatccggttgttgatggtaaactatcccaaacatgctacctaatggctctagactcatgctacagacagttctgcaacaagtatgagaagattgcgggtaaacaattctcaatttgtgatgcagaatattttgtgttccattctccatacaacaagctcgtgcagaagagtttcgctcgactttattacaatgactttttgcgcaactgcagctctgttgatgatgatgctaaagagaagctccagtctttttcaaatttgactggtgaagagagctaccagagtcgcgacttggaaaaggcctcacaacaggtcgcgaagcacctccatgacatcaaagttcagccatcgactctgcttccgaaacaaattgaatgggcaaagaattgtgatgttctcttacggcagtggtttgacatccactatgttttcattgaggctaaacaatggccagcatcccttcagcctatcaaacattgcttcagttcttgatgtcaccgagaagcttcagtcaagacatgagactttgcctgagaaattcgttgagacactgaagctgatggaacaccgatacggcgcaaaggacttcgagacgagcagagacacgagcctactgcagccgggcacattctacctcaccaaggtcgactccatgtaccggaggttctattcccagaagctgtccgaggaaacaggcggcgggaaaaccaagtgctgcaacggcctcgcaaatggccactagtggtcgcccagcactgttgctcatcattctcagtattttgataatgctcatggttagcgtttagtctagcgtgtttctgaaataatataattgttctttgaagctgtcccaccccacctagatcagctagttttttattttaatattttattcttctgaacattgaaattcatcagtctctacattgtttctctttgtttcttcttttagtactctcttcgttccaaattctaaattacgtacataatgtttgctatgtctaatagtaaaaaaaaagtcaacaccttataa

SEQ ID NO: 22224 - DNA, 1666 bp, Zea Mays
catgggtggaattgtcgccacttgttgggaggcacttgaggcccatgatggggcgagcaaagggaagtacaccattgggcttgggcaagattgcatggccttttgcagcgaggtggaggatgtcatctcaatgagtttgacggttgtcaattctctgctgaaaaaatacaagattgatcccaagttaatcggtcgcttggaggttggaagtgaaacagttatagacaaaagtaaatccatcaaaacttggctgatgcagatctttgaggaaagtggtaacagtgacattgaaggtgttgactccagcaatgcatgttatggcgggacagcagccctactgaattgtgtgaattgggtcgaaagtaattcctgggatggccgttatggtcttgtcgtttgcacggatagcgcggtttatgccgaagggccagctcgtccaacaggaggtgctgctgctatagcaatgctcattggtcctaatgctccaatttccttcgagagcaaatatagagcttctcacatggctcatgtctatgatttctacaaacctgatcttgcaagtgaatatccggttgttgatggtaaactatcccaaacatgctacctaatggctctagactcatgctacagacagttctgcaacaagtatgagaagattgcgggtaaacaattctcaatttgtgatgcagaatattttgtgttccattctccatacaacaagctcgtgcagaagagtttcgctcgactttattacaatgactttttgcgcaactgcagctctgttgatgatgatgctaaagagaagctccagtctttttcaaatttgactggtgaagagagctaccagagtcgcgacttggaaaaggcctcacaacaggtcgcgaagcacctccatgacatcaaagttcagccatcgactctgcttccgaaacaaattggtaacatgtatactgcatccctttatgctgcattagcatctgtgctatataacaagcatgatagtctgaatgggcaaagaattgtgatgttctcttacggcagtggtttgacatccactatgttttcattgaggctaaacaatggccagcatcccttcagcctatcaaacattgcttcagttcttgatgtcaccgagaagcttcagtcaagacatgagactttgcctgagaaattcgttgagacactgaagctgatggaacaccgatacggcgcaaaggacttcgagacgagcagagacacgagcctactgcagccgggcacattctacctcaccaaggtcgactccatgtaccggaggttctattcccagaagctgtccgaggaaacaggcggcgggaaaaccaagtgctgcaacggcctcgcaaatggccactagtggtcgcccagcactgttgctcatcattctcagtattttgataatgctcatggttagcgtttagtctagcgtgtttctgaaataatataattgttctttgaagctgtcccaccccacctagatcagctagttttttattttaatattttattcttctgaacattgaaattcatcagtctctacattgtttctctttgtttcttcttttagtactctcttcgttccaaattctaaattacgtacataatgtttgctatgtctaatagtaaaaaaaaagtcaacaccttataa

SEQ ID NO: 22225 - DNA, 98 bp, Zea Mays
ccggcaaaaagaatggatctatatatcttgtgtgaatcaaacacttctctgccgatagctattacaagtctaaactcctcgatgaggaaacatgatag

SEQ ID NO: 22226 - DNA, 1279 bp, Zea Mays
gaattgtctaggtggaaaatgaaataattggaaaatacctttcctcttctggacgttttcaacttttcatcgtttgatttgataaattagcattccagctcggtccccggtggctaaaaaggtaaaattctcacctttttgatagcttatgaaatttctcacttaaatttgtttcagaatattactgtcagtctggcaaaattaaggtgctgttttgaactaatacgtacgacagagcgttcttccagagtacattttcttggagcgggaggatttcataatccagtttcattgccttcgtttagtcctgctaagtttctgcatctcaagaaagtaaattcggaaaatagatagatcctcattctgtaggtttaaagaaagataccaaattacatgtgggattagagccagagcaaattaaagtgacctgtcttatgagtacacatataaccggacatatacatggtaaaattatagtcttcacgtctctgatgagtttttactgaaaatactagaatcacatcagattattatagtactacaaaaaaaacaactaccagcattccaaccattattaggtacacaataccacacaacagatagtaaaccaatgctagctaccgcaattttgggagactaccggcgcccatgggcggaaccaggcagcacccccgctggtttctccctcccactcccctgcctcgctgtcatcggagcgctctgccgagtggctcgcgcgggcacaaggatggcggcagcagggaacagctctgctctgctctcccctctcatcctcgcccttgcccagccttgccctcgcccggctccatccgtcgtagggcatgtgctcgcatgccgcagctgtgagcggcgagccctcttctagacgtgcccctcggtgacggcatttcggagtctgtgtcagggtggtgcatgacagccggcaggaagctatgccggtggccagggttcgacggatctgagcctgtcggtctggatctggccctccctcaccggatctacgtcatggaggtggtggtccttgcaggaagaaggggtgggcctccttgcgcgtagtgaggcgcgtctagtggactagtgaggtgcgccggcacggctacgcggccggccggtttggcgtcgacgggccctacactcgtttggtggcatggcggtggcgaccagtggctcgggcaagcgcgggtttgaggctgaggcggcgtgcgacccgaggcttggccgtgtgttggagaatattttgggcgaaagccccggcaat

SEQ ID NO: 22227 - DNA, 3163 bp, Zea Mays
ggcccgcgcgctaacgggagaccgagagaacccacaggccacaacggcatcggcaacgaggcagcccagccccagaagccgccccgagccccgcagattaccggcggtcggcgcaagtctgaactcccccacccaatctccgccacggccgacgggagagggcagggacggagagaaagagatgggcgtggggggcagcttctgggacctgctgaagccctgcgcgcggcacgagggcgcggggtacctacgcgggcgccgcgtcgccgtcgacctctccttctgggtcgtctcccacaccaccgccatccgggcgcgcttgccgcgggcacggagcccgcacctccggaccaccttcttccgcaccctctccctcttcgccaagatgggcgcgttccctgtgttcgtggtggacggcgagccgtcgccgctcaagtcgcaggcgagggcggcccgcttcttccgaggctccgggatggacctggccgcgttgccggtcactgaggcagagtccagtgcggccgcggcaccggtcaaaaagaggaatgctgcattcacgcgagccgttgaggagtgcgtggaactgcttgaatatcttggaatgcctgtattgagggcaaacggtgaagctgaagccctttgcgctcagctgaatagtgaaggtcatgtagatgcttgcatcactgcagacagtgatgctttcctctatggggctaagaccgtcgtaaaggtcctcagatcgaattgcaaggaaccatttgagtgctaccacatagcagacattgagtctggtcttggattaaagaggaagcaaatggtggccatggcgctccttattggcagtgatcatgatttgcatggggtgcctggttttggcctggagactgcacttcgttttgtgcagttatttgatgaggatgaaattttagataagttacatgaaattggtagaggggtgtatccattcgtagaaggatttgacaatgcacatattgatgatctcccatcatcgtccacaaaaagcccagttgttaaattgccgcactgctcacaatgtggccacccaggcagcaagaaaaatcatagcaaggatggctgcaattattgtttggtggattcattagagaattgcatggaaaaaccaactggattcaaatgtgaatgtcctagttgtgacgaggttggatttatattcatttaattatccaaatcctgttgattctgatgccttacagcacgtgagctaaaggaacaaagacgacatgaaaattggcaaatcaaggtctgcaagagaatagctgctgagacaaattttcctaacgacgagatcattaaattgtatctaagtgataacaatctggttgaagaaaagggtgttcccttgcttacttggaataaacctgatgttgaagctttggtagacttattaagttacaagcagaattgggagccatcttatattcgccaaagcatgctccctatgttatcaaccatatacttaagagaggttgcatcatctccatctacaccattgctcctttgtgaccaatatgaatttgattcaattcaacggattaagataaagcacggtcacccgtattacttggtaaaatggaagagagctacccgtggtatgaattctattatgtctagcaacaagccagtaatggagggagagacaagtagcgaggtagtgttgttggatgaagacgacgatttggatgcagtggtttgcgagtctcctgagttattagacgaacctgatgttccacaagtgcttattgatgatggctgctgctttgtattgacggatgaagacattcaacttgttggtgctgcttttcctaaggaaacagcaaggtttcaggaagaacagaggctgaaagaagcacgatcaagatcacggaaatccaaatcaagcttagcagacagtgcgtgcaagacacctgaaggcccgagacctagcggggtgcagcttagcatcacagagttctaccgctcgaagaaagcgcagaacgtagaatctgggaagaagccggcgggagaagggcacgccgcgaggggaggctcgagaaaatcgtccgacagggacctcgacaagagcctgccgaagtctgttcggcgccgcctcctcttcgattgctgaggactaggtagcctggcttttttttggtgagcactgcactgtaatcttggtgccactgctgtagatgacctagggaatgccttaacctattttagccggtgtagattgcgcgcggcccattttgtacagggaacagagcatcgtctttgtctaagaggaaatgaagcaggtcttagttcggaatggtcatctgaacctcatctttgtctaagtgcttgggaactcagcttcgattctaggaatgggatgcgtgccgctgctagagcaatagcttttttgttttatgtctgcttttgtgccggacaatagctgacagaattgatgtgatactacagtatgcacaacttttactcccttagttccaaatttagtttcaaaaattatgagatggtctggttgttttgatttttttttaatctctagatacattttgcttatcactttttgtaatgatcttttttcatggacacgttggctcaacctttgccccgctgcgacatgatctggcggccatgagcccatgacaaccatgagcacaacgatggagcatgtatggtgtgggagacgcggtaacagttagcgccgattcgcgactgtttcggctagacagacagccataataacaagtgaactcttcacttccagcgtcagatgccacggccagacccagacgtagccctggccgccgggccaccaaataaactgcccatgccagggttcagttcagctcactcagcagcacacagcagttccatcgatgcagggagaaggaaggaaaaaggaaggctcaacaaaagcaagtcctcaggtttggacctgaacaagaatcagccaaagtccaagtccgtgtcggatttggcagggcggagaccgtgagtcatctaatccttggtacatcaagatgatttgatcttgtgtccaatatgatgaatcatgaatggtatgacagacgaattgtagtggttgttggataaatgtgggcttagcccaattaattaatattcaataatatttaat

SEQ ID NO: 22228 - DNA, 3071 bp, Zea Mays
ccacaacggcatcggcaacgaggcagcccagccccagaagccgccccgagccccgcagattaccggcggtcggcgcaagtctgaactcccccacccaatctccgccacggccgacgggagagggcagggacggagagaaagagatgggcgtggggggcagcttctgggacctgctgaagccctgcgcgcggcacgagggcgcggggtacctacgcgggcgccgcgtcgccgtcgacctctccttctgggtcgtctcccacaccaccgccatccgggcgcgcttgccgcgggcacggagcccgcacctccggaccaccttcttccgcaccctctccctcttcgccaagatgggcgcgttccctgtgttcgtggtggacggcgagccgtcgccgctcaagtcgcaggcgagggcggcccgcttcttccgaggctccgggatggacctggccgcgttgccggtcactgaggcagagtccagtgcggccgcggcaccggtcaaaaagaggaatgctgcattcacgcgagccgttgaggagtgcgtggaactgcttgaatatcttggaatgcctgtattgagggcaaacggtgaagctgaagccctttgcgctcagctgaatagtgaaggtcatgtagatgcttgcatcactgcagacagtgatgctttcctctatggggctaagaccgtcgtaaaggtcctcagatcgaattgcaaggaaccatttgagtgctaccacatagcagacattgagtctggtcttggattaaagaggaagcaaatggtggccatggcgctccttattggcagtgatcatgatttgcatggggtgcctggttttggcctggagactgcacttcgttttgtgcagttatttgatgaggatgaaattttagataagttacatgaaattggtagaggggtgtatccattcgtagaaggatttgacaatgcacatattgatgatctcccatcatcgtccacaaaaagcccagttgttaaattgccgcactgctcacaatgtggccacccaggcagcaagaaaaatcatagcaaggatggctgcaattattgtttggtggattcattagagaattgcatggaaaaaccaactggattcaaatgtgaatgtcctagttgtgacgaggcacgtgagctaaaggaacaaagacgacatgaaaattggcaaatcaaggtctgcaagagaatagctgctgagacaaattttcctaacgacgagatcattaaattgtatctaagtgataacaatctggttgaagaaaagggtgttcccttgcttacttggaataaacctgatgttgaagctttggtagacttattaagttacaagcagaattgggagccatcttatattcgccaaagcatgctccctatgttatcaaccatatacttaagagaggttgcatcatctccatctacaccattgctcctttgtgaccaatatgaatttgattcaattcaacggattaagataaagcacggtcacccgtattacttggtaaaatggaagagagctacccgtggtatgaattctattatgtctagcaacaagccagtaatggagggagagacaagtagcgaggtagtgttgttggatgaagacgacgatttggatgcagtggtttgcgagtctcctgagttattagacgaacctgatgttccacaagtgcttattgatgatggctgctgctttgtattgacggatgaagacattcaacttgttggtgctgcttttcctaaggaaacagcaaggtttcaggaagaacagaggctgaaagaagcacgatcaagatcacggaaatccaaatcaagcttagcagacagtgcgtgcaagacacctgaaggcccgagacctagcggggtgcagcttagcatcacagagttctaccgctcgaagaaagcgcagaacgtagaatctgggaagaagccggcgggagaagggcacgccgcgaggggaggctcgagaaaatcgtccgacagggacctcgacaagagcctgccgaagtctgttcggcgccgcctcctcttcgattgctgaggactaggtagcctggcttttttttggtgagcactgcactgtaatcttggtgccactgctgtagatgacctagggaatgccttaacctattttagccggtgtagattgcgcgcggcccattttgtacagggaacagagcatcgtctttgtctaagaggaaatgaagcaggtcttagttcggaatggtcatctgaacctcatctttgtctaagtgcttgggaactcagcttcgattctaggaatgggatgcgtgccgctgctagagcaatagcttttttgttttatgtctgcttttgtgccggacaatagctgacagaattgatgtgatactacagtatgcacaacttttactcccttagttccaaatttagtttcaaaaattatgagatggtctggttgttttgatttttttttaatctctagatacattttgcttatcactttttgtaatgatcttttttcatggacacgttggctcaacctttgccccgctgcgacatgatctggcggccatgagcccatgacaaccatgagcacaacgatggagcatgtatggtgtgggagacgcggtaacagttagcgccgattcgcgactgtttcggctagacagacagccataataacaagtgaactcttcacttccagcgtcagatgccacggccagacccagacgtagccctggccgccgggccaccaaataaactgcccatgccagggttcagttcagctcactcagcagcacacagcagttccatcgatgcagggagaaggaaggaaaaaggaaggctcaacaaaagcaagtcctcaggtttggacctgaacaagaatcagccaaagtccaagtccgtgtcggatttggcagggcggagaccgtgagtcatctaatccttggtacatcaagatgatttgatcttgtgtccaatatgatgaatcatgaatggtatgacagacgaattgtagtggttgttggataaatgtgggcttagcccaattaattaatattcaataatatttaat

SEQ ID NO: 22229 - DNA, 3063 bp, Zea Mays
caacggcatcggcaacgaggcagcccagccccagaagccgccccgagccccgcagattaccggcggtcggcgcaagtctgaactcccccacccaatctccgccacggccgacgggagagggcagggacggagagaaagagatgggcgtggggggcagcttctgggacctgctgaagccctgcgcgcggcacgagggcgcggggtacctacgcgggcgccgcgtcgccgtcgacctctccttctgggtcgtctcccacaccaccgccatccgggcgcgcttgccgcgggcacggagcccgcacctccggaccaccttcttccgcaccctctccctcttcgccaagatgggcgcgttccctgtgttcgtggtggacggcgagccgtcgccgctcaagtcgcaggcgagggcggcccgcttcttccgaggctccgggatggacctggccgcgttgccggtcactgaggcagagtccagtgcggccgcggcaccggtcaaaaagaggaatgctgcattcacgcgagccgttgaggagtgcgtggaactgcttgaatatcttggaatgcctgtattgagggcaaacggtgaagctgaagccctttgcgctcagctgaatagtgaaggtcatgtagatgcttgcatcactgcagacagtgatgctttcctctatggggctaagaccgtcgtaaaggtcctcagatcgaattgcaaggaaccatttgagtgctaccacatagcagacattgagtctggtcttggattaaagaggaagcaaatggtggccatggcgctccttattggcagtgatcatgatttgcatggggtgcctggttttggcctggagactgcacttcgttttgtgcagttatttgatgaggatgaaattttagataagttacatgaaattggtagaggggtgtatccattcgtagaaggatttgacaatgcacatattgatgatctcccatcatcgtccacaaaaagcccagttgttaaattgccgcactgctcacaatgtggccacccaggcagcaagaaaaatcatagcaaggatggctgcaattattgtttggtggattcattagagaattgcatggaaaaaccaactggattcaaatgtgaatgtcctagttgtgacgaggcacgtgagctaaaggaacaaagacgacatgaaaattggcaaatcaaggtctgcaagagaatagctgctgagacaaattttcctaacgacgagatcattaaattgtatctaagtgataacaatctggttgaagggtgttcccttgcttacttggaataaacctgatgttgaagctttggtagacttattaagttacaagcagaattgggagccatcttatattcgccaaagcatgctccctatgttatcaaccatatacttaagagaggttgcatcatctccatctacaccattgctcctttgtgaccaatatgaatttgattcaattcaacggattaagataaagcacggtcacccgtattacttggtaaaatggaagagagctacccgtggtatgaattctattatgtctagcaacaagccagtaatggagggagagacaagtagcgaggtagtgttgttggatgaagacgacgatttggatgcagtggtttgcgagtctcctgagttattagacgaacctgatgttccacaagtgcttattgatgatggctgctgctttgtattgacggatgaagacattcaacttgttggtgctgcttttcctaaggaaacagcaaggtttcaggaagaacagaggctgaaagaagcacgatcaagatcacggaaatccaaatcaagcttagcagacagtgcgtgcaagacacctgaaggcccgagacctagcggggtgcagcttagcatcacagagttctaccgctcgaagaaagcgcagaacgtagaatctgggaagaagccggcgggagaagggcacgccgcgaggggaggctcgagaaaatcgtccgacagggacctcgacaagagcctgccgaagtctgttcggcgccgcctcctcttcgattgctgaggactaggtagcctggcttttttttggtgagcactgcactgtaatcttggtgccactgctgtagatgacctagggaatgccttaacctattttagccggtgtagattgcgcgcggcccattttgtacagggaacagagcatcgtctttgtctaagaggaaatgaagcaggtcttagttcggaatggtcatctgaacctcatctttgtctaagtgcttgggaactcagcttcgattctaggaatgggatgcgtgccgctgctagagcaatagcttttttgttttatgtctgcttttgtgccggacaatagctgacagaattgatgtgatactacagtatgcacaacttttactcccttagttccaaatttagtttcaaaaattatgagatggtctggttgttttgatttttttttaatctctagatacattttgcttatcactttttgtaatgatcttttttcatggacacgttggctcaacctttgccccgctgcgacatgatctggcggccatgagcccatgacaaccatgagcacaacgatggagcatgtatggtgtgggagacgcggtaacagttagcgccgattcgcgactgtttcggctagacagacagccataataacaagtgaactcttcacttccagcgtcagatgccacggccagacccagacgtagccctggccgccgggccaccaaataaactgcccatgccagggttcagttcagctcactcagcagcacacagcagttccatcgatgcagggagaaggaaggaaaaaggaaggctcaacaaaagcaagtcctcaggtttggacctgaacaagaatcagccaaagtccaagtccgtgtcggatttggcagggcggagaccgtgagtcatctaatccttggtacatcaagatgatttgatcttgtgtccaatatgatgaatcatgaatggtatgacagacgaattgtagtggttgttggataaatgtgggcttagcccaattaattaatattcaataatatttaat

SEQ ID NO: 22230 - DNA, 1807 bp, Zea Mays
ccggcggtcggcgcaagtctgaactcccccacccaatctccgccacggccgacgggagagggcagggacggagagaaagagatgggcgtggggggcagcttctgggacctgctgaagccctgcgcgcggcacgagggcgcggggtacctacgcgggcgccgcgtcgccgtcgacctctccttctgggtcgtctcccacaccaccgccatccgggcgcgcttgccgcgggcacggagcccgcacctccggaccaccttcttccgcaccctctccctcttcgccaagatgggcgcgttccctgtgttcgtggtggacggcgagccgtcgccgctcaagtcgcaggcgagggcggcccgcttcttccgaggctccgggatggacctggccgcgttgccggtcactgaggcagagtccagtgcggccgcggcaccggtcaaaaagaggaatgctgcattcacgcgagccgttgaggagtgcgtggaactgcttgaatatcttggaatgcctgtattgagggcaaacggtgaagctgaagccctttgcgctcagctgaatagtgaaggtcatgtagatgcttgcatcactgcagacagtgatgctttcctctatggggctaagaccgtcgtaaaggtcctcagatcgaattgcaaggaaccatttgagtgctaccacatagcagacattgagtctggtcttggattaaagaggaagcaaatggtggccatggcgctccttattggcagtgatcatgatttgcatggggtgcctggttttggcctggagactgcacttcgttttgtgcagttatttgatgaggatgaaattttagataagttacatgaaattggtagaggggtgtatccattcgtagaaggatttgacaatgcacatattgatgatctcccatcatcgtccacaaaaagcccagttgttaaattgccgcactgctcacaatgtggccacccaggcagcaagaaaaatcatagcaaggatggctgcaattattgtttggtggattcattagagaattgcatggaaaaaccaactggattcaaatgtgaatgtcctagttgtgacgaggcacgtgagctaaaggaacaaagacgacatgaaaattggcaaatcaaggtctgcaagagaatagctgctgagacaaattttcctaacgacgagatcattaaattgtatctaagtgataacaatctggttgaagaaaagggtgttcccttgcttacttggaataaacctgatgttgaagctttggtagacttattaagttacaagcagaattgggagccatcttatattcgccaaagcatgctccctatgttatcaaccatatacttaagagaggttgcatcatctccatctacaccattgctcctttgtgaccaatatgaatttgattcaattcaacggattaagataaagcacggtcacccgtattacttggtaaaatggaagagagctacccgtggtatgaattctattatgtctagcaacaagccagtaatggagggagagacaagtagcgaggtagtgttgttggatgaagacgacgatttggatgcagtggtttgcgagtctcctgagttattagacgaacctgatgttccacaagtgcttattgatgatggctgctgctttgtattgacggatgaagacattcaacttgttggtgctgcttttcctaaggaaacagcaaggtttcaggaagaacagcatggtgtttcatcgtttatttgtggctgtttaattgaagaaacatccactggggtgaattttgttcactctagctcacacatcc

SEQ ID NO: 22231 - DNA, 737 bp, Zea Mays
actttctcccctgtgtcccgttgctaaaagcttaaagagaaaaaccaaatcggacagtactgtggcccagcagcgcgcgcggggggcgtacgccggcggcgagatcctgcggtggcggggggatggcggcaaggaggcggggcccggcggagtggtggcgctagcggagtgcagctgctgggtgggtgtgtgaggggtttcggggtagttgggtgacaaggacatgaaggcgctgcggcgatccagcacctcgtcctccccgtcgtcctcctcctcgccgacggccgcgtcctccccgccgtcctcatcgtggatccacatccggtcgctcctcgtcgccgccgcgtcctcgtcctcatcctcgtcgtcctcgccgcactcggatcggggtggtattaaatctccatggtcccgaaggaaaagaaaacgagcactttctcgtgaacagtgggagagtctgttttcagcaaatgggaagcttcgtgatggtgggaagaagtttctcaagaaagttcgcagcggtggcattgagccaagcattaggagtgaagtttggcccttcttactaggagtctatgatttgaatagctctgaagaggaaaggaactctgttaagataaagaaaagtgttcatttggctcgatgtaccatgtccgtatttccatgaagcaagagtgtgagactaagaaatatcatggagcacttgagcagaatccattgactttatctgtttagta

SEQ ID NO: 22232 - DNA, 2713 bp, Zea Mays
actttctcccctgtgtcccgttgctaaaagcttaaagagaaaaaccaaatcggacagtactgtggcccagcagcgcgcgcggggggcgtacgccggcggcgagatcctgcggtggcggggggatggcggcaaggaggcggggcccggcggagtggtggcgctagcggagtgcagctgctgggtgggtgtgtgaggggtttcggggtagttgggtgacaaggacatgaaggcgctgcggcgatccagcacctcgtcctccccgtcgtcctcctcctcgccgacggccgcgtcctccccgccgtcctcatcgtggatccacatccggtcgctcctcgtcgccgccgcgtcctcgtcctcatcctcgtcgtcctccgcgccggctgcgtcggggagcgcggtggctgtggtgtcggctgcggccgccgccccgtcttcttcctcgccggcgtcgtcctcgccgcactcggatcggtgggtttctcccttcggatgggcgaaaggaggctccattagggcttgaaatgcctctcatattcggttcttgttacatgagcttcatttggctgctgctgatctggttccgatccgtggaccctgaccgagcttgctgtgttgtaatctgtggtctggatgcagcctaggggtggtattaaatctccatggtcccgaaggaaaagaaaacgagcactttctcgtgaacagtgggagagtctgttttcagcaaatgggaagcttcgtgatggtgggaagaagtttctcaagaaagttcgcagcggtggcattgagccaagcattaggagtgaagtttggcccttcttactaggagtctatgatttgaatagctctgaagaggaaaggaactctgttaagataaagaaaaggaaagagtatgaaaagctgaggaggcagtgccaacaaattctgaatggctacaagggaaattcgttgaaggcaataactgaagttaataatgaggtgtgttctagtttagaaggtactgctgatggatcagaatcaccttgttttgaagatgccaatgctatacgtgctcctgtttcactcgaggagctgaagcctgaacagaatgaagttgaccaaccagagaacattccctgtgctgttgttgaatgtattgaagaagatgcagatgagttagcttatgcatatccatgcatagcagagtcagaatcatctgattctgaatcatccgatgaggatgaccctggaaggatgtccgtgtctggcgaggagaactgtgatccagatcctaaatttatcaggagcacttcattcaaggcagatctttttaggtctagcagaaccccagaggacttcgccacatggcaacgcattataaggttggatgccatccgatcaaacagtgaatggattatgttctccggcaaccaggctgaagttcccaaggagagagcattgcagtctgcagcatctgttgggttgaaagattatgatcacttagagcccagtatgatttatcacgcggctcgattagttgggttgcttgaagcatatgcggtgtatgatccagagattggctactgccaaggtatgagtgatctgttgtcacctatcattgcggtaatggaggaggacgatgaggcattttggtgttttgtgggtttcatgaggaaagcaaggcacaacttcaggctcgatgaggtcggaataagaaggcagttgaagatcgtctctcagattatcaagcgcaaagattcacacctgtataggcatctgcagaagttgcaggctgaggactgtttctttgtgtacagaatggtggtagttctcttcaggagagagctcacttttgagcagactgtgtgcttgtgggaggttatgtgggctgaccaggcagctatacgagccgggatcgggaggtccacctggggaaggataagactgcgtgctcccccaactgacgacttgctactctatgccatcgccgcttgtgtcctgcagaggaggaagctaataattgagaagtatagcagcatggacgagatactgcgagagtgcaacagcatggctgggcagctcgacgtctggaggctgctagatgatgcacatgacctggttgttaaccttcacgataaaatctgatctggtggtgagtgctgctctttgctctaacggcggagcaggtgtaagcctcaacagaaggaaaaatattgtggttcctttaccacctactgaaagtattctattatctgctattcattcccagcacggaaccaacttctaggtatagagaatgttgttaacttagagtgaggactcgagtgtcctcgcaaagaaaatgctgaaagattgtttggtgttagtgaggcactgtaaactgttcgttgtttaacttgttataggcaaaaacagagtttcctgggatggcactccatcaattttatgcatacgcgctcaagttaactagtttgaaatgtgcaaggcagtatggtttctcaacgcaagatttgtttctcgtgcgtttgactggtgttaaattgtcaccaccagatcctgccgccaatttaaatgtgccattactagggaaacattgctaaaattccggcaccaaactggacaagggctgaatttgatttttacttcatccatttcaaattgtaagtcgtttctgctatacttacattctaaattgtaagcctgcctttatgtatctaaaatatagtttatatctagg

SEQ ID NO: 22233 - DNA, 1994 bp, Zea Mays
gtaagtactgtgtttattcattttccatccgtatcatccagatatagattgaatcacgggcattgagccaagcattaggagtgaagtttggcccttcttactaggagtctatgatttgaatagctctgaagaggaaaggaactctgttaagataaagaaaaggaaagagtatgaaaagctgaggaggcagtgccaacaaattctgaatggctacaagggaaattcgttgaaggcaataactgaagttaataatgaggtgtgttctagtttagaaggtactgctgatggatcagaatcaccttgttttgaagatgccaatgctatacgtgctcctgtttcactcgaggagctgaagcctgaacagaatgaagttgaccaaccagagaacattccctgtgctgttgttgaatgtattgaagaagatgcagatgagttagcttatgcatatccatgcatagcagagtcagaatcatctgattctgaatcatccgatgaggatgaccctggaaggatgtccgtgtctggcgaggagaactgtgatccagatcctaaatttatcaggagcacttcattcaaggcagatctttttaggtctagcagaaccccagaggacttcgccacatggcaacgcattataaggttggatgccatccgatcaaacagtgaatggattatgttctccggcaaccaggctgaagttcccaaggagagagcattgcagtctgcagcatctgttgggttgaaagattatgatcacttagagcccagtatgatttatcacgcggctcgattagttgggttgcttgaagcatatgcggtgtatgatccagagattggctactgccaaggtatgagtgatctgttgtcacctatcattgcggtaatggaggaggacgatgaggcattttggtgttttgtgggtttcatgaggaaagcaaggcacaacttcaggctcgatgaggtcggaataagaaggcagttgaagatcgtctctcagattatcaagcgcaaagattcacacctgtataggcatctgcagaagttgcaggctgaggactgtttctttgtgtacagaatggtggtagttctcttcaggagagagctcacttttgagcagactgtgtgcttgtgggaggttatgtgggctgaccaggcagctatacgagccgggatcgggaggtccacctggggaaggataagactgcgtgctcccccaactgacgacttgctactctatgccatcgccgcttgtgtcctgcagaggaggaagctaataattgagaagtatagcagcatggacgagatactgcgagagtgcaacagcatggctgggcagctcgacgtctggaggctgctagatgatgcacatgacctggttgttaaccttcacgataaaatctgatctggtggtgagtgctgctctttgctctaacggcggagcaggtgtaagcctcaacagaaggaaaaatattgtggttcctttaccacctactgaaagtattctattatctgctattcattcccagcacggaaccaacttctaggtatagagaatgttgttaacttagagtgaggactcgagtgtcctcgcaaagaaaatgctgaaagattgtttggtgttagtgaggcactgtaaactgttcgttgtttaacttgttataggcaaaaacagagtttcctgggatggcactccatcaattttatgcatacgcgctcaagttaactagtttgaaatgtgcaaggcagtatggtttctcaacgcaagatttgtttctcgtgcgtttgactggtgttaaattgtcaccaccagatcctgccgccaatttaaatgtgccattactagggaaacattgctaaaattccggcaccaaactggacaagggctgaatttgatttttacttcatccatttcaaattgtaagtcgtttctgctatacttacattctaaattgtaagcctgcctttatgtatctaaaatatagtttatatctagg

SEQ ID NO: 22234 - DNA, 481 bp, Zea Mays
ctggtacgaacatgaatgattatagcatatttaggcattgaactgcgcaatactactagtagtatgcgactacaatccaaaaccatccaaaccagcatatacatttgacgagtcttacagcgagtactaagaaaaagaaagaaaagagcacccaggaaaagagctaacagtacaagccaaagtatcacattcggcacctgatcgatacacatcaaagacagtaacatgaaaagcatatacccatgtcgaccgagtagtagcaacctgcaagcagaagcactttccatgtacagtagcgccagcccgccatgctattgctcacagtgagactgataccccaaccgacttctgaaccgcttgccggggcctcgccgtcacggccagcgccagcgggacggccatctcgcacgacagcttgagcacctccgacaggtcgacgggcgaggggagcagctcgaactcgtgcagcagcgtcgcgagc

SEQ ID NO: 22235 - DNA, 317 bp, Zea Mays
cctgcacgtcagggtgcagcacgagcctggccagcgcccactccatcagcacggcgacggtgtcagttccacggaacaccatttcctgcaaacaaaacaaaaaaaagggacgtaacgacgttcgcgtgtcatccataagaaaccgaagcatgcggtgcgaagatgctggaagaggttacactgggaagaggaagaggctacgctgggttcagttacacacccagaggacggcgatcatgtcagcgtcggtgagcctgtcgtcggccggcagcgagagcaggacgtcggtgaagtccacgacggcaggcggagcagag

SEQ ID NO: 22236 - DNA, 920 bp, Zea Mays
ctccgacctccccccgtttcaatcaaaatggaaaaaagtttcctcccttcccctctcttctgaatccggcatcaccatgcagaacaccgtcgcgaacccttccactgcggccgccgccgctgcggcagggaacggcggcgtccaagcatcgggggctggaggggagcggccggaggacgcgtcgaagcagaacctggcgcaggtgacgagctccatccagaagacgctgggcctgctccaccagctcaacctcaccgtctcctccttcaactctgcctcccagctccccctcctccagcgcctggcctacggaagcatcttcttgaggagcttgaacaagctttccctgaggacgtagaagcatacagggagatacgtgctacttctgctgctgaggcaaagcggttggctcagtcccagggtactttgcctaatggagatgtcaaagtgaaagctgagcattgagcgaatggtacgactacagagggcaagtttgttatctctgcttagttttggggatggctttgttaaccagaaacatgcatatctttctattgcacgtcccctgatcagtgaatgtgtacatactatcgtagcatgtgtggcccaatgtattcaacttaactaataacttcaaaaagatatccggagcatatcgaactacggatagctgagaccatttccttatttcttttcgttctttacaagaccattctgatactctgaaattgattgctccgaaacgcgagggtcctggagctttcaattggtgaacaattcctgaagcaggtaatgcattgctaaacaagtagaaggtgtaactgtctccacttatgaacgagaagatttttgtagtagcagttatctgatgccttgctaaattgtcgggtgattagtattgatacctacacgttgccgta

SEQ ID NO: 22237 - DNA, 1030 bp, Zea Mays
gacctccccccgtttcaatcaaaatggaaaaaagtttcctcccttcccctctcttctgaatccggcatcaccatgcagaacaccgtcgcgaacccttccactgcggccgccgccgctgcggcagaacctggcgcaggtgacgagctccatccagaagacgctgggcctgctccaccagctcaacctcaccgtctcctccttcaactctgcctcccagctccccctcctccagcgcctgaatgcgcttgtggcggagctcgacacgatgcagaaactcgccgaggggtgcaacatccaggtgcctatggagtttgatcgacgatgggaagaaccccgacgagttcactagggacgtgctcaacagctgcatcgtcaaaaaccagatcaccaagggcaagactgacgctttcaagggcctacggaagcatcttcttgaggagcttgaacaagctttccctgaggacgtagaagcatacagggagatacgtgctacttctgctgctgaggcaaagcggttggctcagtcccagggtactttgcctaatggagatgtcaaagtgaaagctgagcattgagcgaatggtacgactacagagggcaagtttgttatctctgcttagttttggggatggctttgttaaccagaaacatgcatatctttctattgcacgtcccctgatcagtgaatgtgtacatactatcgtagcatgtgtggcccaatgtattcaacttaactaataacttcaaaaagatatccggagcatatcgaactacggatagctgagaccatttccttatttcttttcgttctttacaagaccattctgatactctgaaattgattgctccgaaacgcgagggtcctggagctttcaattggtgaacaattcctgaagcaggtaatgcattgctaaacaagtagaaggtgtaactgtctccacttatgaacgagaagatttttgtagtagcagttatctgatgccttgctaaattgtcgggtgattagtattgatacctacacgttgccgta

SEQ ID NO: 22238 - DNA, 1018 bp, Zea Mays
gacctccccccgtttcaatcaaaatggaaaaaagtttcctcccttcccctctcttctgaatccggcatcaccatgcagaacaccgtcgcgaacccttccactgcggccgccgccgctgcggcagaacctggcgcaggtgacgagctccatccagaagacgctgggcctgctccaccagctcaacctcaccgtctcctccttcaactctgcctcccagctccccctcctccagcgcctgaatgcgcttgtggcggagctcgacacgatgcagaaactcgccgaggggtgcaacatccagtttgatcgacgatgggaagaaccccgacgagttcactagggacgtgctcaacagctgcatcgtcaaaaaccagatcaccaagggcaagactgacgctttcaagggcctacggaagcatcttcttgaggagcttgaacaagctttccctgaggacgtagaagcatacagggagatacgtgctacttctgctgctgaggcaaagcggttggctcagtcccagggtactttgcctaatggagatgtcaaagtgaaagctgagcattgagcgaatggtacgactacagagggcaagtttgttatctctgcttagttttggggatggctttgttaaccagaaacatgcatatctttctattgcacgtcccctgatcagtgaatgtgtacatactatcgtagcatgtgtggcccaatgtattcaacttaactaataacttcaaaaagatatccggagcatatcgaactacggatagctgagaccatttccttatttcttttcgttctttacaagaccattctgatactctgaaattgattgctccgaaacgcgagggtcctggagctttcaattggtgaacaattcctgaagcaggtaatgcattgctaaacaagtagaaggtgtaactgtctccacttatgaacgagaagatttttgtagtagcagttatctgatgccttgctaaattgtcgggtgattagtattgatacctacacgttgccgta

SEQ ID NO: 22239 - DNA, 1337 bp, Zea Mays
tcaaaaatgctctccgccgcgtcgctgtccttcgctagtcgctgccacatcttctctcctcgtccaaagactccaagcttctgtgacctctgttctgctgccgcctctggtccacatctctctacgccgccgccccgccgtccaccgataccgcagcgctgggaaggatcacgggggagcggagcgaggcgggggacccgcggttttgtcgcccggatggcggcggagcgatgacactggcggcgggtgcggcgcggcgttgggatgcggacgatctgcgatgtgtgcgagagcgcaccggcggtgctcttctgtgcggccgacgaggctgcgctttgccggccttgcgacgagaaggtacacatgtgcaacaagcttgctagtcggcatgtgagagttgggcttgcagaccctaataaactggcacgttgtgatatatgcgagaattcacctgctttcttctactgtgagatagatggcacctcactttgcctgagctgtgatatgactgttcatgttggtggcaaaagaacccatggtagatacctgctcctaaggcaaagggttgaagaagctacgattagtttccaggagataaaccgggccatatggatgacgtgcctatggagatcaaagatcctgaaaaccagagagagcaaaacacgcccaaggagcaaatggcaaaccaccataacgtcaatgatccagtctctgatggcaattgcgatggccagggtaacattgattcgaaaatgatcgatcttaatatgcgcccggctcgtactcatgggcaaggatcaaattcccagactcagggggtggatcttagtgtgaacaaccatgactctccaggggtggtgccaacaagtaattccgaaagagacgccatcaagtaaacattggaagattggaatgtacatttcaactacatattctgttctataggagctcctgggggcagaaatggggttattcagtggtctctctgttatcactagtaagcgtatttctggcagagttggagctaataactgcatctcaattcggcttgtcgtgccctagacggtattgctgtccaattgcattctctttgcgattgttagaactctgtatagaagcgcagcggctgccgcctgtgctctggagccggagtattgtgtgccattagaaactgtacaaaagattaatagaccgctcatttttctctggtcgcacaagttcaattcagttcatgcgtcgtgtatcgtgacacgtgttacaacaaggccacccgcttacacggtggaggcatttataagagttcgtggatatgaaataggatatggatttacagtgaa

SEQ ID NO: 22240 - DNA, 1092 bp, Zea Mays
atcatcataaaacaccaggacagacttgtggatgtagagcctgaggacatcattcatcaatgcttggaaggttgagggggcgttggtgaggccaaatggcatcaccaaaaactcaaattgctaccggtacacatgtgcaacaagcttgctagtcggcatgtgagagttgggcttgcagaccctaataaactggcacgttgtgatatatgcgagaattcacctgctttcttctactgtgagatagatggcacctcactttgcctgagctgtgatatgactgttcatgttggtggcaaaagaacccatggtagatacctgctcctaaggcaaagggttgaatttccaggagataaaccgggccatatggatgacgtgcctatggagatcaaagatcctgaaaaccagagagagcaaaacacgcccaaggagcaaatggcaaaccaccataacgtcaatgatccagtctctgatggcaattgcgatggccagggtaacattgattcgaaaatgatcgatcttaatatgcgcccggctcgtactcatgggcaaggatcaaattcccagactcagggggtggatcttagtgtgaacaaccatgactctccaggggtggtgccaacaagtaattccgaaagagacgccatcaagtaaacattggaagattggaatgtacatttcaactacatattctgttctataggagctcctgggggcagaaatggggttattcagtggtctctctgttatcactagtaagcgtatttctggcagagttggagctaataactgcatctcaattcggcttgtcgtgccctagacggtattgctgtccaattgcattctctttgcgattgttagaactctgtatagaagcgcagcggctgccgcctgtgctctggagccggagtattgtgtgccattagaaactgtacaaaagattaatagaccgctcatttttctctggtcgcacaagttcaattcagttcatgcgtcgtgtatcgtgacacgtgttacaacaaggccacccgcttacacggtggaggcatttataagagttcgtggatatgaaataggatatggatttacagtgaa

SEQ ID NO: 22241 - DNA, 1054 bp, Zea Mays
tgggactacaattgaaatccaatctggtacacatgtgcaacaagcttgctagtcggcatgtgagagttgggcttgcagaccctaataaactggcacgttgtgatatatgcgagaattcacctgatggcacctcactttgcctgagctgtgatatgactgttcatgttggtggcaaaagaacccatggtagatacctgctcctaaggcaaagggttgaagtaagtttttactctttagccggtctgggttgcttgttactccctgtatttatataattcttaagataggaagctacgattagtttccaggagataaaccgggccatatggatgacgtgcctatggagatcaaagatcctgaaaaccagagagagcaaaacacgcccaaggagcaaatggcaaaccaccataacgtcaatgatccagtctctgatggcaattgcgatggccagggtaacattgattcgaaaatgatcgatcttaatatgcgcccggctcgtactcatgggcaaggatcaaattcccagactcagggggtggatcttagtgtgaacaaccatgactctccaggggtggtgccaacaagtaattccgaaagagacgccatcaagtaaacattggaagattggaatgtacatttcaactacatattctgttctataggagctcctgggggcagaaatggggttattcagtggtctctctgttatcactagtaagcgtatttctggcagagttggagctaataactgcatctcaattcggcttgtcgtgccctagacggtattgctgtccaattgcattctctttgcgattgttagaactctgtatagaagcgcagcggctgccgcctgtgctctggagccggagtattgtgtgccattagaaactgtacaaaagattaatagaccgctcatttttctctggtcgcacaagttcaattcagttcatgcgtcgtgtatcgtgacacgtgttacaacaaggccacccgcttacacggtggaggcatttataagagttcgtggatatgaaataggatatggatttacagtgaa

SEQ ID NO: 22242 - DNA, 1063 bp, Zea Mays
atgcctggacagtttctctctctcgcttcgatagctaatttcgccgtcacccgccggacagacacggaggtacaggagcgagggggaaagtgggatggtagtgggggcatcatcggtgtccggcgccgcggcttccggaggtacctctggtacggctccgccgcggaaggggaagtcgtgcaagggctgcctttactactcgtcagtgctcaagtcccgcggctacaacccaatctgcgttgggatcccccgttccatcccccaagttcctaactacgtggtggatgagcctaaggaggacgcgacagcgcaggggcatgatctcaggcggttcaggtacgggtgcgcgggttactccatattcgtgaacagggacggccaaggtggtgagggcgagggcaagacgttgttgccgtattgcaggggcctcgagttattggtggacagcagattggtcgagagaaaaccatccgcagctgaacaagctccagcacatgttacaaaggatgcagctaccacccgctctcaccaacaaggacaacagagacctgcgaacttgtcgaggcaggaattcttggagaggaaagtttaagaagagtgctggactggtcgcttcaggggtcgcgaagaatctaaacaaaacggccaattatatcaaggaaaatattcatgacatattgtaccacgatcgtcgcccaccaaagtagtagccatgccgacttgctgagaacgaagcacagcagccccagctccgtcactgattatgcaaatggagccttccaggattccaacttcactcgctttacttgcataatcttgtaatttagggctgcatatgtacatgcaatttaacttgctgcttgtttgaagcggaaaatcagatttcgtttggtgtaatcggaagacgatgatattggttgaattttgactgaaaattcgagaaacagcatttctcgatgaaaatacacggtttctcggttgagaatgttagacagcgcaggcagacttgagaatgttagacagcgcaggcagacgcatcgcgtgctgctcgcaacaggggcga

SEQ ID NO: 22243 - DNA, 1069 bp, Zea Mays
atgcctggacagtttctctctctcgcttcgatagctaatttcgccgtcacccgccggacagacacggaggtacaggagcgagggggaaagtgggatggtagtgggggcatcatcggtgtccggcgccgcggcttccggaggtacctctggtacggctccgccgcggaaggggaagtcgtgcaagggctgcctttactactcgtcagtgctcaagtcccgcggctacaacccaatctgcgttgggatcccccgttccatcccccaagttcctaactacgtggtggatgagcctaaggaggacgcgacagcgcaggggcatgatctcaggcggttcaggtacgggtgcgcgggttactccatattcgtgaacagggacggccaaggtggtgagggcgagggcaagacgttgttgccgtattgcaggggcctcgagttattggtggacagcagattggtcgagagaaaaccatccgcagctgaacaagctccagcacatgttacaaaggatgcagctaccacccgctctcaccaacaaggacaacagagacctgcgaacttgtcgaggcaggaattcttggagaggaaagtttaagaagagtgctggactggtcgcttcaggggtcgcgaagaatctaaacaaaacggccaattatatcaaggaaaatattcatgacatattgtaccacgatcgtcgcccaccaaagtagtagccatgccgacttgctgagtcccagaacgaagcacagcagccccagctccgtcactgattatgcaaatggagccttccaggattccaacttcactcgctttacttgcataatcttgtaatttagggctgcatatgtacatgcaatttaacttgctgcttgtttgaagcggaaaatcagatttcgtttggtgtaatcggaagacgatgatattggttgaattttgactgaaaattcgagaaacagcatttctcgatgaaaatacacggtttctcggttgagaatgttagacagcgcaggcagacttgagaatgttagacagcgcaggcagacgcatcgcgtgctgctcgcaacaggggcga

SEQ ID NO: 22244 - DNA, 1141 bp, Zea Mays
atgcctggacagtttctctctctcgcttcgatagctaatttcgccgtcacccgccggacagacacggaggtacaggagcgagggggaaagtgggatggtagtgggggcatcatcggtgtccggcgccgcggcttccggaggtacctctggtacggctccgccgcggaaggggaagtcgtgcaagggctgcctttactactcgtcagtgctcaagtcccgcggctacaacccaatctgcgttgggatcccccgttccatcccccaagttcctaactacgtggtggatgagcctaaggaggacgcgacagcgcaggggcatgatctcaggcggttcaggtacgggtgcgcgggttactccatattcgtgaacagggacggccaaggtggtgagggcgagggcaagacgttgttgccgtattgcaggggcctcgagttattggtggacagcagattggtcgagagaaaaccatccgcagctgaacaagctccagcacatgttacaaaggatgcagcagctaccacccgctctcaccaacaaggacaacagagacctgcgaacttgtcgaggcaggaattcttggagaggaaagttactgtccatagcttttctctgtccccagcccccactaggatatattgccttgctgatgtatacggatggcacaggtttaagaagagtgctggactggtcgcttcaggggtcgcgaagaatctaaacaaaacggccaattatatcaaggaaaatattcatgacatattgtaccacgatcgtcgcccaccaaagtagtagccatgccgacttgctgagggcgcacgtcaaatactagtgtgtaaaaaaagaacgaaatggttaacctgctcctggcccagtgatcagttgaatgcgctgacggttgaatggtcgtctgtgctgccagatcccacggttgaatggtcgtctgtgctgccagatccacgacccagacctggtcttgttttctcctatgtctattgtcttgaccagggataaacaatagttcagtcttagatcatccaaatctactaacaccttaatgacttaatgtggatgtggagtacaactgaaagcagcgggtggtggcgggtgctctggctggtgtcatgctactctgaaaagtgttct

SEQ ID NO: 22245 - DNA, 1061 bp, Zea Mays
atgcctggacagtttctctctctcgcttcgatagctaatttcgccgtcacccgccggacagacacggaggtacaggagcgagggggaaagtgggatggtagtgggggcatcatcggtgtccggcgccgcggcttccggaggtacctctggtacggctccgccgcggaaggggaagtcgtgcaagggctgcctttactactcgtcagtgctcaagtcccgcggctacaacccaatctgcgttgggatcccccgttccatcccccaagttcctaactacgtggtggatgagcctaaggaggacgcgacagcgcaggggcatgatctcaggcggttcaggtacgggtgcgcgggttactccatattcgtgaacagggacggccaaggtggtgagggcgagggcaagacgttgttgccgtattgcaggggcctcgagttattggtggacagcagattggtcgagagaaaaccatccgcagctgaacaagctccagcacatgttacaaaggatgcagctaccacccgctctcaccaacaaggacaacagagacctgcgaacttgtcgaggcaggaattcttggagaggaaagtttaagaagagtgctggactggtcgcttcaggggtcgcgaagaatctaaacaaaacggccaattatatcaaggaaaatattcatgacatattgtaccacgatcgtcgcccaccaaagtagtagccatgccgacttgctgagggcgcacgtcaaatactagtgtgtaaaaaaagaacgaaatggttaacctgctcctggcccagtgatcagttgaatgcgctgacggttgaatggtcgtctgtgctgccagatcccacggttgaatggtcgtctgtgctgccagatccacgacccagacctggtcttgttttctcctatgtctattgtcttgaccagggataaacaatagttcagtcttagatcatccaaatctactaacaccttaatgacttaatgtggatgtggagtacaactgaaagcagcgggtggtggcgggtgctctggctggtgtcatgctactctgaaaagtgttct

SEQ ID NO: 22246 - DNA, 2767 bp, Zea Mays
gaagaacagagagttaaacaaacctatccgcgctgcaacagtgcggtgtttgaatccaatccagccagacagccgagaaagcgagcagccttgttcctatacactgtagtctagtttagctcccccctcaaaccactccacccggtccgtttcccgtcccacccgcgtcagcttcgtcttgctctgagctgccggcgacctgctagctaagctacctcgctcgcacctggagcctggtggcggtggccatggcggccctgctgggccttttcttcctgctgctgctccagctcggcccctcttcttgcagcaatgtgtacattgcgtacatgggagagaggagccccgagctgcgcccggctctggtccgggacgcgcaccacggcatgctcgccgccctccttggcagcgagcaggcggccagggacgccatcctttacagctacaggcacggcttctccgggttcgccgccacgctaacggacagccaggcggcgcggctcgccgattcgcctggggttgtgcgagtggtgcggaaccgtgttcttgacctgcacaccaccaggagctgggacttcatgcgagtgatgagtccgtcgcactcggctggaatcctctcaaacagtagactcggtgaggattccattattggtgtgctagacactggaatatggccagagtcggccagctttagagacgacggcatcggcgaggttccacggcggtggaaagggcgatgcgtcgccggggacaggttcaatgcttccaactgcaacaggaaaataataggcgcgaagtggtacatcagaggctacgaagccgagtacgggaagatgaacaccaccgacatctacgagttcatgtccgcgagagacgccgtcgggcacggcacgcacacggcctccactgccgccggcgctccggtagccgacgcgagcttcaggggcctcgccagcggcgtcgcgaggggaggggcgcccagggcaaggctggcggtctacaaggtgtgctgggccaccggagactgcacctccgcggacatcctcgctgcctttgacgacgccatacatgacggcgtcgacgtgctctcggtgtccctgggccaggcaccaccgctccctgcatacgtcgacgatgtcctgtccatcggatccttccacgctgtcgcgagagggatcgccgtggtctgctccgcagggaactccgggccttattcggagacggtgatcaactcggcgccgtggatcgtgaccgtcgctgccggcaccattgacaggactttcctcgcaaagatcgccctcggcaacaatagcacctacgcgggtcaaacgctctactctggagcgcatcctggaagaagcatgagcctagtctacgctgaagacattgcatctaacgacgcagacgatacagatgcaaggatccctgaattctactctagcgaagggaaaggtggtgctttgcttccaaacaagggctcagagatcagcttcggtggcggtggagaccgtcaggaaagctcgtggcgtcggtgtcatcttcgcccagttcttaactaaggacatcgcgtcttcattcgatgttccatgtgttcaagtagactaccaagttggaacagttatactcgcgtacactactagcatgagaaacccaacagttcagtttggctcagcaaaaacagttcttggagaagtgatcggcccagaagtcgcgtatttctcgtctcggggtccaagttctctgtccccctctgttctgaagccagacatcgctgctccaggcgtcaacattttggccgcatggactcccgccgccgccgtatcatcagccattggatccgtgagcttcaagatcgattcaggaacctccatgtcctgcccgcacatctcaggagtcgttgctctcctcagatcactgcatcccaactggagtcctgctgcagtaaaatcagcgcttgtcacaacagccagcgtccacgacacgtatgggtttgggatcgtgtccgaggcagcaccgtacagccaggcgaacccgttcgactacggaggtggtcacgtggatccgaaccgagctgcgtaccccggtctcgtgtacgacatgggggcgtctgactacgtgcgcttcctttgctccatgggctacaacgtctcggccatcagctccgtggctcagcagcgtgagactgagacctgccagcacgcgcccaagacgcagctggacctcaacctgccatccatcgccgtccccgagctgaggggcaggcttaccgtgtcaagaacggtcaccaacgtcggctcggcattgtcggagtacagggctcgcgtggaagctcctccaggggtggacgtctccgtgcgcccctcgctcctggccttcaactcgaccgtgaggaggctggcgttcaaggtgacgttccgggccaagctggtgaaggtgcaagggagatacaccttcggcagcctgacgtgggaggacggcgtgcacgccgtgaggatccctctggtggttcgcacgatggtcggcaggttctacgccaattcatgagctagttagttcgtgtttgtgtggtgctgtgtgttacctttcgctcaccaccggaccggtgatggtgagacggacaagatgtaacctgctaatttgttccgattctaatggcattggtgattggttggggttctttggctagaattcgaccactgattaagatgagcaaaactgaatcttttgtgtttgtaatagaccataacttcttcttgttcaatctagc

SEQ ID NO: 22247 - DNA, 2585 bp, Zea Mays
gaagaacagagagttaaacaaacctatccgcgctgcaacagtgcggtgtttgaatccaatccagccagacagccgagaaagcgagcagccttgttcctatacactgtagtctagtttagctcccccctcaaaccactccacccggtccgtttcccgtcccacccgcgtcagcttcgtcttgctctgagctgccggcgacctgctagctaagctacctcgctcgcacctggagcctggtggcggtggccatggcggccctgctgggccttttcttcctgctgctgctccagctcggcccctcttcttgcagcaatgtgtacattgcgtacatgggagagaggagccccgagctgcgcccggctctggtccgggacgcgcaccacggcatgctcgccgccctccttggcagcgagcaggcggccagggacgccatcctttacagctacaggcacggcttctccgggttcgccgccacgctaacggacagccaggcggcgcggctcgccgattcgcctggggttgtgcgagtggtgcggaaccgtgttcttgacctgcacaccaccaggagctgggacttcatgcgagtgatgagtccgtcgcactcggctggaatcctctcaaacagtagactcggtgaggattccattattggtgtgctagacactggaatatggccagagtcggccagctttagagacgacggcatcggcgaggttccacggcggtggaaagggcgatgcgtcgccggggacaggttcaatgcttccaactgcaacaggaaaataataggcgcgaagtggtacatcagaggctacgaagccgagtacgggaagatgaacaccaccgacatcctcgctgcctttgacgacgccatacatgacggcgtcgacgtgctctcggtgtccctgggccaggcaccaccgctccctgcatacgtcgacgatgtcctgtccatcggatccttccacgctgtcgcgagagggatcgccgtggtctgctccgcagggaactccgggccttattcggagacggtgatcaactcggcgccgtggatcgtgaccgtcgctgccggcaccattgacaggactttcctcgcaaagatcgccctcggcaacaatagcacctacgcgggtcaaacgctctactctggagcgcatcctggaagaagcatgagcctagtctacgctgaagacattgcatctaacgacgcagacgatacagatgcaagaagctgcactgcaggatccctgaattctactctagcgaagggaaaggtggtgctttgcttccaaacaagggctcagagatcagcttcggtggcggtggagaccgtcaggaaagctcgtggcgtcggtgtcatcttcgcccagttcttaactaaggacatcgcgtcttcattcgatgttccatgtgttcaagtagactaccaagttggaacagttatactcgcgtacactactagcatgagaaacccaacagttcagtttggctcagcaaaaacagttcttggagaagtgatcggcccagaagtcgcgtatttctcgtctcggggtccaagttctctgtccccctctgttctgaagccagacatcgctgctccaggcgtcaacattttggccgcatggactcccgccgccgccgtatcatcagccattggatccgtgagcttcaagatcgattcaggaacctccatgtcctgcccgcacatctcaggagtcgttgctctcctcagatcactgcatcccaactggagtcctgctgcagtaaaatcagcgcttgtcacaacagcgtccacgacacgtatgggtttgggatcgtgtccgaggcagcaccgtacagccaggcgaacccgttcgactacggaggtggtcacgtggatccgaaccgagctgcgtaccccggtctcgtgtacgacatgggggcgtctgactacgtgcgcttcctttgctccatgggctacaacgtctcggccatcagctccgtggctcagcagcgtgagactgagacctgccagcacgcgcccaagacgcagctggacctcaacctgccatccatcgccgtccccgagctgaggggcaggcttaccgtgtcaagaacggtcaccaacgtcggctcggcattgtcggagtacagggctcgcgtggaagctcctccaggggtggacgtctccgtgcgcccctcgctcctggccttcaactcgaccgtgaggaggctggcgttcaaggtgacgttccgggccaagctggtgaaggtgcaagggagatacaccttcggcagcctgacgtgggaggacggcgtgcacgccgtgaggatccctctggtggttcgcacgatggtcggcaggttctacgccaattcatgagctagttagttcgtgtttgtgtggtgctgtgtgttacctttcgctcaccaccggaccggtgatggtgagacggacaagatgtaacctgctaatttgttccgattctaatggcattggtgattggttggggttctttggctagaattcgaccactgattaagatgagcaaaactgaatcttttgtgtttgtaatagaccataacttcttcttgttcaatctagc

SEQ ID NO: 22248 - DNA, 2774 bp, Zea Mays
gaagaacagagagttaaacaaacctatccgcgctgcaacagtgcggtgtttgaatccaatccagccagacagccgagaaagcgagcagccttgttcctatacactgtagtctagtttagctcccccctcaaaccactccacccggtccgtttcccgtcccacccgcgtcagcttcgtcttgctctgagctgccggcgacctgctagctaagctacctcgctcgcacctggagcctggtggcggtggccatggcggccctgctgggccttttcttcctgctgctgctccagctcggcccctcttcttgcagcaatgtgtacattgcgtacatgggagagaggagccccgagctgcgcccggctctggtccgggacgcgcaccacggcatgctcgccgccctccttggcaggcggccagggacgccatcctttacagctacaggcacggcttctccgggttcgccgccacgctaacggacagccaggcggcgcggctcgccgattcgcctggggttgtgcgagtggtgcggaaccgtgttcttgacctgcacaccaccaggagctgggacttcatgcgagtgatgagtccgtcgcactcggctggaatcctctcaaacagtagactcggtgaggattccattattggtgtgctagacactggaatatggccagagtcggccagctttagagacgacggcatcggcgaggttccacggcggtggaaagggcgatgcgtcgccggggacaggttcaatgcttccaactgcaacaggaaaataataggcgcgaagtggtacatcagaggctacgaagccgagtacgggaagatgaacaccaccgacatctacgagttcatgtccgcgagagacgccgtcgggcacggcacgcacacggcctccactgccgccggcgctccggtagccgacgcgagcttcaggggcctcgccagcggcgtcgcgaggggaggggcgcccagggcaaggctggcggtctacaaggtgtgctgggccaccggagactgcacctccgcggacatcctcgctgcctttgacgacgccatacatgacggcgtcgacgtgctctcggtgtccctgggccaggcaccaccgctccctgcatacgtcgacgatgtcctgtccatcggatccttccacgctgtcgcgagagggatcgccgtggtctgctccgcagggaactccgggccttattcggagacggtgatcaactcggcgccgtggatcgtgaccgtcgctgccggcaccattgacaggactttcctcgcaaagatcgccctcggcaacaatagcacctacgcgggtcaaacgctctactctggagcgcatcctggaagaagcatgagcctagtctacgctgaagacattgcatctaacgacgcagacgatacagatgcaagaagctgcactgcaggatccctgaattctactctagcgaagggaaaggtggtgctttgcttccaaacaagggctcagagatcagcttcggtggcggtggagaccgtcaggaaagctcgtggcgtcggtgtcatcttcgcccagttcttaactaaggacatcgcgtcttcattcgatgttccatgtgttcaagtagactaccaagttggaacagttatactcgcgtacactactagcatgagaaacccaacagttcagtttggctcagcaaaaacagttcttggagaagtgatcggcccagaagtcgcgtatttctcgtctcggggtccaagttctctgtccccctctgttctgaagccagacatcgctgctccaggcgtcaacattttggccgcatggactcccgccgccgccgtatcatcagccattggatccgtgagcttcaagatcgattcaggaacctccatgtcctgcccgcacatctcaggagtcgttgctctcctcagatcactgcatcccaactggagtcctgctgcagtaaaatcagcgcttgtcacaacagccagcgtccacgacacgtatgggtttgggatcgtgtccgaggcagcaccgtacagccaggcgaacccgttcgactacggaggtggtcacgtggatccgaaccgagctgcgtaccccggtctcgtgtacgacatgggggcgtctgactacgtgcgcttcctttgctccatgggctacaacgtctcggccatcagctccgtggctcagcagcgtgagactgagacctgccagcacgcgcccaagacgcagctggacctcaacctgccatccatcgccgtccccgagctgaggggcaggcttaccgtgtcaagaacggtcaccaacgtcggctcggcattgtcggagtacagggctcgcgtggaagctcctccaggggtggacgtctccgtgcgcccctcgctcctggccttcaactcgaccgtgaggaggctggcgttcaaggtgacgttccgggccaagctggtgaaggtgcaagggagatacaccttcggcagcctgacgtgggaggacggcgtgcacgccgtgaggatccctctggtggttcgcacgatggtcggcaggttctacgccaattcatgagctagttagttcgtgtttgtgtggtgctgtgtgttacctttcgctcaccaccggaccggtgatggtgagacggacaagatgtaacctgctaatttgttccgattctaatggcattggtgattggttggggttctttggctagaattcgaccactgattaagatgagcaaaactgaatcttttgtgtttgtaatagaccataacttcttcttgttcaatctagc

SEQ ID NO: 22249 - DNA, 1024 bp, Zea Mays
ctcggctcacgaggtggacggccggatgatcgatgatgagaggcggggaagctcagcagaggatggcctccacgctccccgtccgcacgcacaggcacacggggcacggcatggcggcgccgcagagggacaggtgcctgcaggggaggagcaccacgaaggccggcctaaggcggcaacccaggcacgcgtggtctggcggcggcttggcgtagcgagggtccacgaatgccaacgccgacgactccgcctggccggtgtcgcccactttggcggcgagctcctcgaccgaccagctgcgcgtgcaggccgaccgcggcagcctgctcggagagcgccttggcctgccacgccgccgcctcgcctcgcaggcgcgctagctactccaccagctcggcgccacgccgcgcctcgcgctccgcctccgccacctagagggacaagtgcctgcaggggaggagcaccacggaggccagtctgcgacggtagcccaggcacgcgtggtctagcggcagcctggcgcggcgagggtccacgaatgtcgactactccgcctggaaggcggtggcgagctcctcgaccgacacccgcgccgcggccgcggcgtgctacagctgcgcgtgcagggcgaccgcggcggcttgctcagagagcaccttggcctgccacgccgccacctcgccgcggaggcgcgccagccgctattccagctctcgattgtttaacagtggtcggccttgaccagaatcgctggtgtggatggggaacggaggcgaccagcgtggacggcgatggtgcggatggggaacgaaggcgaccagcgtggacggcgatggtgcggatggggaatggaggcggtggtgtggacaacgaacggaggcggcggcagggaggtgacaaaaccctactggcgtgagaaacgaagaattggaggggtggagtggcgacgactcggcagaacgaggggcgggtcgacgcacacgagccgtcggatgatacggacggtaccgattgaccgaaggca

SEQ ID NO: 22250 - DNA, 1017 bp, Zea Mays
gaaaattaaagatgtaaggactgtgcagcaggcccttacctctcacttctgggtttatgatatccagatgattctctctctggctgagattgagcaatatttacaattatgggaggtaattgattcttttcagcttcaaaattcaaatgatcaacatgtgtggaattttagcagcaatggactgtatacctccaaatctgcctatagagcttttttcattggagcggaatcttttgatccctggaaaagaatttggaagagctgggcagcccctaagtgtaaggtctttgtttggctggccataaacaataaatgttggacagcggacagactcaaaaaaagagggcttgatcatcctgaaaattgtgttttatgtgaccaagaggacgaaactgtgcagcatattttatctaattgcgtcttcacaagacagttttggcatagtatcttaactccaattggtctctcttctgtgggtcctaaaagaagagattcatactttgttgaatggtggagaaagacttcatccaggattcctaagagaaaaagaaagggatttaatagtatggtaatccttggggcttggagtatttggaagcagcgaaacatgtgtgtttttgatggtgctcgaccctgcctttctaccttagaagacggatttaaggacgagatgagattgtgggttgctgctggagccaggaacctgcactctcttttcaaccctggataaaggaaagtcttgaagcctattgaaagactggggtgttagtgggttgtatgtgtctgtgttgtgtgtgttttgtgggtgtgagtgtgtgtttttgttttgtgtgtgttctgtttgtcccgggcctcaggccttttttcctctattttaattcaatgatacgcagccctcctgcgtattcgaaaaaaaaagttctattgtctagcagaaaactcatttgttgcaagcaaccaagcatggtgaaaatgtagaatatagcaaaaggaaaaaaatcaaacttgtgaacaaat

SEQ ID NO: 22251 - DNA, 176 bp, Zea Mays
tgtctatctacaagttcatttgcctttgaaagtctaactttcaagtcaactgaatccagcattgaaagctgctcctcaaaacttatctcaaagctagcaacaaaaatatcagctagcctgtaaacaggaaccgtatcaaggagcacctttgtcctaccaactgtcttctgcttctg

SEQ ID NO: 22252 - DNA, 2082 bp, Zea Mays
caggttcttggcagtgaaatattttttttaaaaaaagtcgaacgaattgaagatgatactaatggcaacgaacacaagacgtaacgcttatgaaaaattacataagtagaaaatgaacaaaaaccccattaaaatcaaaacagtgcgctaattttataaattatgcttgacggagttcttgccagctggtttctgaaaatttgtgcgctcgtgtctggtttcactggatactgccaaaacaagatccttttgtagagccagcgcaacatcttctcagttgcccactttcgaaatccttgactccttgagacctatatattttttttctttcaaaatgctcactttcgaaagctaacaaagttcaatccgccaactcatctatatgtacacaagtcgtctaagcaatgtgtccaagaatgtacccaagcataaacattccttttgtgctgtcacaatcacaactcaccgagtcacggctaggactgaccaaacaatggtctcagaaataaggcaacagcgcgcctttaccggtgacgacatgtagccatcaccgcctggacggcgcggcggcggcggcggcggcggcggctttcttccccctggcgccggggccgggagtccggccgtcaggctcggcgtgcgcctgcacggcccgcctgaggacctcgaccacctcgctcatggtgggccgctccttggcgttcttgagcaggcagctgtcggccagcttggcgatctcccgggcggccttcgccgagtactcgccgcggagcctggggtccatgatcatccggaagttgcggctgtccggcgggaactgggccacccactccagcagcttctgctccgccgccggtctgttccggtccagcgaccgccgtcccgtcaggatctcgtagagcaccacgccgaagctccacacgtcgctcttcgccgtcaggtgccccgtgtccatgtactccggcgcagcgtacccgtgcgtcccgacgacctgtaacaccgtatcacggggcagagctgtcaaaaccgaaacaaccctgcggcaatcactttccagggcgtgcaatcatgcatatgcgataaaagcgacagattgactgcttgatgctattttcaagccatgcgtcagcatggcgcataatgcaattgttcagtcacatgacagagccgtgcatgttcgcatagaaagaaagtgaaggcaccattgacaatggaagcccagggtcgtccgtcagctgtgcgtagatagagcaggtacactgcattgcctacgtatccggtcagctaaagcccgtctgccaacgactactataacaacctcagtaaggctaacacagaagactagcacgatgtcttcagtgcctgaccctgatcgaattgatggatacaacgtaccgcagtcgagacgtgagtgtttgctccagttggcccctccctggctaggccgaagtctgatagctttgctctgaagtccttgtccaatagaacgttggacgttttgaagtcccggtagattacctggccaaaatgcagaattaaggtattgagacaaggatcactttttttctgaatgaaaaagaaaacttgaaaacagataagaacagttcgtttcaaaaaaaaaaaacagataagaacagtactgtagcacttatgaaacaatggcatggcatagtctttaacgcaagtaacatgtgatgttccgatcttgcttgacggttcatatgctgcacaacagtcagctggaggactggtgctaggcaggctgaaaatgtttggtacagacagcacagctagaagagaaattggctacggtggctgtatgtcgttgccttgaacattgaactgtgctccccagaaatgtcaaagaagttggcttgctggaatctttgggggcaagtagtcaggatgacctttgctagttaggacgcttttccgtttggaaaaacatggaagataggctatcgtttggaggtaaactgaaagcgcacaatcaatagtgcaggtttgaaaagaacacctgattacctgaacttccaccccttcatgcaggtaagccaatccttctgcggcccccaagataac

SEQ ID NO: 22253 - DNA, 1988 bp, Zea Mays
caacagcgcaatatccaagtagctttacgagatttgggtgctccagaacaccaagaaactgtacttccgccaaccattgcttatgtccctgtcacaataacattaaaaagaaattgcaacctcttagaaaacttaagaatgatgtatagaaggatggtataaccatatatagatttcatgaagaaataaggaatcaagtaaggaacaaacttttcctgatagtatactaggttaatttacattctgatgagaattagtacagggaggtaacatatatagcacgatgcatcgtattcctaaggcaatcctttaattgattcagttcagacagcagcatcaattggaactaacacaggtggaatcagcttcctgatgaaaaaaatatatctttagcacctaaaacggcatcatcacttaattcactatgctccataaatctaagaatccactctgtattgctgaaaaacatcccaatacgcagagaaagaaagcaacaaaacgaattcgctattttcctcaaatcaataccatacatacctaatatatctactatttaccacttaccagtcaacattcacaaaatcaggagctcttcatccacaattataaacgatggatacaatgtattgtacaaaatgatagctgacttttcttcgtaagctggcataccaagatttggtgtctagtaaatagtagtcaactaaaattagtattgtgatcgtacaggttgcccaccaaagacctccattctatccagtggtctcctttgatcgagcaaattcaaaagtgaatttttgaatacagctacaagaccggttgacaccattttctggacatcatatctctcctcttgaacatgtaaaaggccatcaatggtttttatgcttacaaccagctcttttctgtatgatcgcaaataatcaccattcagaattgtccaaacactgttctctatagctggaaggttacagttgaccaaacagttatttctgtactccccctcacttagcttgttttatgaataaaatgccagtaaatatcacatacagcaggcagacagctaatcagtaattgattatttgcaaatgaactacaaatgtcagctgaaaaggattggtctccttatgaaatttactgatccccaatgatggactcaaaaactctatagatgctttcactaggtaaccattagtattaaaaacaatgttagttggtcttaacgtgtacccatggtccaactggaaaagcaacagagtgtactagtcaatgactatatcggacccttgaaaattctccatcgccccttctttttcctttcctgccaagattgtctatatctaaagaagtccaagcatcataaagaatgcataccagtatcaacaagcaccagatcaaccccccccccccccctaaatctaacactatgtaattacttcatctgtttcattcagttactcagcatcttggcctaatctggctaaatcgcacattgctgctgcagataaacagattcaaaacaggaaaaaaaaagtgaaacttacatggaagctaaacctgttatgtgttatgatcagattccatgtgttctgtcattttctcaatgctacgctatcggtccactgaacagcataaagtaaaacataaatgaaccacccctcctctcgttttcggggaaaatagtagtctggtagagatctgtgccattctaattcactgcaaactattacagtgacatggtatactgacagcctatcgataccaacagcgtaaatgtagcatccacagatccacttactgaattatgttctctagctacacagattatcacgggaaacaaagcagactgcttcgtttcaagggggaaaaaagcaaactattgtggagaaccgagtcaccgatggcatgtgaacgctcttggagataagccagagagacggcaacaggaggagtgatgaatcacgtatgaaggacaagcagaggacacggag

SEQ ID NO: 22254 - DNA, 1442 bp, Zea Mays
caccaatgcagccataactccgccccgatctatccgtcgcccctccaaaagcacgagagcgcaggaagtgagagaataaaaataataataataaggggaaataataagaaaaaaattctcgtgttcttcgaccggtggtggtggtgcgaacgcaaggcgaccaaggggaggcgagatgaggggggcgaagcggccgctcagcgtggtgacgtcgtgggtgcggcggcagccgcccaaggtgaaggctttcttggccgttgtcaccggcatggccgcgctcgtcgtcatccgcttcatcgtccacgaccatgacaacctcttcgtcgctgccgaggctgcgcacgcgctcggcataggcgtcctcatctacaagctcacaaaggagaagacatgtgccggactatccctcaagtctcaggatttaactgcgttatttctagctgttagactgtactgcagctttgtcatggagtatgacatccatacaattctggacagtgctacacttgtagccacactgtttgttatttatatgatacggttcaaactgaggtcaacttatatggtggacaaggataactttgcattgtactatgtggtgctaccatgtgctggactggcactacttgttcatccttcaacatctcataacattgtgaaccggatctcctgggcgttctgtgtttatttggaagctgtttcagtgcttccacaattacggttgatgcaaaatactaagatagttgaaccgtttacagctcactatgtatttgcgttgggggttgcaaggtttcttagctgcgcccactgggttctacagaagcaacaaattctgcaatgtaggttttggatacgcgtggccgtctgctgacagctctcggctatggtctgtggccgtctatggtgctgttttcagaaatcgtgcagacattcatccttgcagatttctgctactactatgtgaagagcctggttggtgggcagctggtgctacggcttccctcaggggtggtgtaagagaagtgcaagctgcagcagaatacaaaactttagtgcttcaccggttcatatgtacttttagtagtgcccaacctgggagccttttttagttgatgttacgagttatgactatatgtatggcaaaattgctgcaagggtcctcttaaaagataggttgatattgagactgtttatagctgcgcttttctggatacccaatctttgggtacttggcttctgccgtatgactgtcgtggtcttaggatcaggtggttaatggtctctttggattagacaattctagaatgctttcataaattgatattgatctatgcagaactggccacgtgaaaatcgtgggactaaggtcatcaggtcgtattcactttaacattgatattaccaagataggggttcctttctggcccattactaatctttag

SEQ ID NO: 22255 - DNA, 1061 bp, Zea Mays
ggagaaaccaaatcttgaataagaatcacgtggtttccaggactatccctcaagtctcaggatttaactgcgttatttctagctgttagactgtactgcagctttgtcatggagtatgacatccatacaattctggacagtgctacacttgtagccacactgtttgttatttatatgatacggttcaaactgaggtcaacttatatggtggacaaggataactttgcattgtactatgtggtgctaccatgtgctggactggcactacttgttcatccttcaacatctcataacattgtgaaccggatctcctgggcgttctgtgtttatttggaagctgtttcagtgcttccacaattacggttgatgcaaaatactaagatagttgaaccgtttacagctcactatgtatttgcgttgggggttgcaaggtttcttagctgcgcccactgggttctacaggttttggatacgcgtggccgtctgctgacagctctcggctatggtctgtggccgtctatggtgctgttttcagaaatcgtgcagacattcatccttgcagatttctgctactactatgtgaagagcctggttggtgggcagctggtgctacggcttccctcaggggtggtgtaagagaagtgcaagctgcagcagaatacaaaactttagtgcttcaccggttcatatgtacttttagtagtgcccaacctgggagccttttttagttgatgttacgagttatgactatatgtatggcaaaattgctgcaagggtcctcttaaaagataggttgatattgagactgtttatagctgcgcttttctggatacccaatctttgggtacttggcttctgccgtatgactgtcgtggtcttaggatcaggtggttaatggtctctttggattagacaattctagaatgctttcataaattgatattgatctatgcagaactggccacgtgaaaatcgtgggactaaggtcatcaggtcgtattcactttaacattgatattaccaagataggggttcctttctggcccattactaatctttag

SEQ ID NO: 22256 - DNA, 385 bp, Zea Mays
ccatgttgatccctaccttaaaaagtatgccctatgtgcagtgcagaagtatcaacctccagcaacaaggagccatgattgctctcggatggccatcttgggcatttgatgggattaactagcggcaccactgcagcatctttatgcttcaagcaaaagcataaaggaacgtcttacatacatgcaaggagatcaggaaataatcctcttgtcaatctaaagttttgtcctggttttctgctcactggatttattggccctgcagcttatatggtcttagttcccttcggacgccttatgatccataaaacatgccaattatattatattgttagttattctttttactgatcgcatgatcgtcgtatatatttgcttgttaaat

SEQ ID NO: 22257 - DNA, 282 bp, Zea Mays
aagtgaggtaagcgacaaccaccgtgtgtgcttgtgctgatggatggatgcctaccactctcccaccaccaccaccaccacgctggacgcgcgctgttttaacagctaattaaccgcaccgccaccgccgcccctgacgcaaacctgttcctgatttgattacggcgatagatggattaggttcgtctccctttttcctgtcgctgatgtcgatctgccaggcccccacccccaccccgtgaaacacgtatgccctgcacaggaggtaaacatgaggaatac

SEQ ID NO: 22258 - DNA, 96 bp, Zea Mays
ttctagattgattaatgttgtttccagaatcgtacgtatcgtcacattctgatcaacctacctccatgttttatagtgctctctcacacaggctag

SEQ ID NO: 22259 - DNA, 2018 bp, Zea Mays
atgcctcctgctaccagcgtactgccacggctccgctttcccgtcaactccctgttgctctgctgcacagcaatcgcctcgtttcatagtaaggaggaggaggttgaggcgaagatgatgcagcagatgcagcaggagcagtggaacgccgccgccgcggggctcctccggccgaccaagtcggcgccctgctcgcccatcaagccagcggcggcggcggccatgctgcggacccactccgactccttccacgtcgcgcacaaggtgcccgtcggcgacacgccctacgtgagagccaagcgcgtccagctggtggacaaggatccagagaaggcgatcgctctgttctggagtgcgatcaacgccggcgaccgcgttgacagcgcgctcaaggacatggccatcgtgatgaagcagcagaaccgcgccgaggaggccatcgaggccatcaagtcgctgcgaagccgatgctccgaccaggcgcaggagtccctcgacaacatcctcctcgatctctacaagagatgcgggcggctggacgaccaaatctcgctgctcaagcacaagttgcagcggatccaccagggccacgccttcaatggcaagcggaccaaaacggctcgctctcagggccgcaagttccagggcaatctgggatgggcgctgatgcagaaggagaactacacagaggcggagggggcgtaccgtcgtgcgctgctcatcgggccggacaacaacaagatgtgcaatctgggcatctgcctcatgaagcagggccgcgtgctcgaggccaaggatgtgctcaagcaggtacgccccgcgggggtcgatggtctgcgcggtgccgactctcacctcaaggcctacgagcgagcgcaagagatgctgcgggacctcgagaccaagctcgtcggccgcccgcgcgctgaccagctcgacacgaactggctctacgatgcgctgctgctgggatcgtcctcgagcatctggcagccgcagccgtgcatcgaccatttgctgccacctccggctccggcatcaatcccagccctggccccggcgccgcgcgaccacttcgccgatgaaaacgccggactcagcaagaagctggcggcgctccaggcgaacatgcttaatgtggacgcgcagcccttctactctctgcgggtgccgccgcttgcagcgaagcctcataacacgctgcctcagcagaagccacatagcacgctgcctcagcagcagcagcagaagaagaagccagctcctgtccatgatcccttgggcaacctgaagaggacacggtccagcaattgcatggacaaggcaggagcagtggtggacaaggcgcaaagcatcgacgagaacagcggcaggaggaagtcgctctcagctgaggacagatggccagagctgcccgaccacagcgcgttcgacgaggccctcgtcgcggatatcctgggcccggtgttcgacgacaaaccaacagctgctggaactaacggccacggcaagctgccggcgagctgcgacacgagcccagcagcgaaggagaagatcagcaagaggctgaggatcttccaggacatcacaaagacagtgaacaatttctgattcggtttcggttttcttcacgttcctactcacaacaggcaggctcgaggtggcgatacacagagaaggagaaagagcttgttctcctgagagctcctgtctggcaactaaattaaacagggattctattcagtttaaatttaatgctgattttgattcaatttattaacaccaaaataacagctgattctttttccacgaggctctccttgtaatagaactatagaagtgggctgctgcatctcgttctaatttcgtttcttttgaataacaaaaagttcatttataatcccgtgactcatctgttgttttttattttcactgcaatcgtgtattagctagcattgcagcttgcgtacctgttaatcgatggaattgatcgcatcaattgaaaatgacagccttat

SEQ ID NO: 22260 - DNA, 3223 bp, Zea Mays
caaaaccagcgcacgaacaccgtttcccaccccgctcgcagttccgcgaaccggtcgtccgctcgcaagcttttgccgcgatgcccgagcccgaacaagcagcgccgcgggcccgaggccgtccacgtcccactcgcagctcctccattcccgcgcgtccgctccaccgcaacgctccgcgaacccgttcccttcaaagcggtcacctcctcccccgacccctcgctggcgtcgcctcccatctcctgcctgcccttcacctcctgtccaccctccccctgtcgttcccgcaattccggctcacatgaccgtccgggccgcggccgtgctggtggccaccgccgcgctcgcgctcctgctcccgggatgggcggcggcggagtggagcctcacgaagaaaggcagcgtcgtcacctacgatgggcgctctctcatgatcgacggcaagcgggacctcttcttctccggcgccatccactaccctaggagcccgcctgagatgtggccgaagctgatcgagcgggccaaggagggcggcctcaacacgatcgagacgtacatattctggaatgcacacgagcctgagcctggcaagtacaattttgaaggcaggttcgacttgatcaagtacctcaagatgatccaggagcatgacatgtatgcaattgtgcgcatcgggcccttcatccaggcagaatggaaccatggtggtctgccgtattggcttagagagattgaccacataatattccgggcaaacaatgacccgtacaagaaagaaatggagaaattcgtgagattcatagtgcagaagttgaaggatgctgagttatttgcatcgcaaggaggacccatcattctaacacagattgagaatgagtatgggaacataaaaaaagatcatgcaacagatggtgacaagtacctcgagtgggcagctcaaatggccctcagcacacaaacaggagttccatggataatgtgcaagcagtcttcagctcctggtgaagtgatccctacatgcaatggaaggcattgtggagacacatggacacttcgcgacaaaaacaagcctatgctttggactgagaattggactcaacaattcagagcatatggcgatcaagtagctatgcgttcagctgaggacattgcatatgctgtgttacgattttttgcaaagggtgggtcattggttaactactacatgtaccacggaggaacaaattttggaaggactggcgcttcttatgtgctgactggatactatgatgaagctcccatggatgaatatggtatgtacaaggagcccaaatttgggcatctcagggacttgcacaacgtaataaggtcatatcaaaaagcattcctctgggggcaacattcgtctgagatattgggtcatgggtatgaggcacacatctttgagttgcctgaagaaaagctatgcctctctttcctttccaacaataacacgggcgaagacggaacagtgatcttccgaggggataagcactatgtgcctagccgttctgtctccattcttgctgggtgcaagaacgtagtttacaataccaagagagtgtttgtacaacacagtgaaaggtcattccatacctcagatgtaacaagcaagaataaccagtgggagatgttctcagaaacgatcccaaagtatcgtgatactaaagtcaggacaaaggaacccctggagcaatataaccaaaccaaggacgatactgactacttatggtacaccacaagctttcgcttggagtcggacgatttgccctttagaaatgacatccggcctgtgcttcaggtcaaaagtagtgcacacgcaatgatgggatttgctaatgatgctttcgtaggatgcgcgcgcggaaacaagcaggtgaagggtttcatgtttgaaaaaccggttgatctgaaagtaggtgtgaaccatgtcgtattgctgtcgtcaactatgggaatgaaggatagtggtggtgaacttgctgaagtaaagggcggcattcaggagtgcctaatccaaggtctcaacactgggacgttggatttacaagtcaatggctggggccataaagctgcactagaaggtgagtacaaggagatctactcagaaaaaggtttgggcaaagttcagtggaaaccggccgagaacgaccgggcagccacttggtataagagatactttgatgagccagatggagatgatcccgttgtacttgacatgagctcaatgagcaagggaatgatttttgtgaatggcgaaggagtgggtagatactgggtctcataccgaactcttgctggaactccttctcaagcagtgtaccatatcccgcgtcctttcttgaaatccaaggacaaccttttggttatcttcgaggaggagatgggcaagccggacggcatcctcgtgcagaccgtgacgagagacgacatatgcctgtttatctcggagcacaacccgggacagataaagacgtgggacacggatggtgacaagatcaagctcattgcagaggatcacagcaggcggggcaccttgacgtgcccccctgagaagacaatccaggaagttgtctttgccagcttcggcaacccggacggcatgtgcggcaacttcactgtaggcacttgccacactcccaatgcaaagcagatcgttgagaaggaatgcctcggcaagccatcctgcatgctgccggtggatcacacagtgtacggcgcggacatcaactgccaatcaacgactgccacgctaggggtgcaggtgagatgcggaggcggcaagaagggtgcctgagaacaagacggatgctgctaattgacgtttcagctcgtttgtttgttcgtcccttcggtttggcactgatgcttatgacccattggtctgccattgcaattgaaatgtggttggaacgtgcttgatcgggaactaacatgaaatgagtgaagggtagatgctgatctgaaaaatatgtgtgttcccccctctttccttccatgtcgtgttgtttcaggtaaccgtcacaatatatataggtggtcccctttggaatccggggattattccgtttgctgtatttttttctgtgaaaatgaactgattcctgtcaattttctatatgatttatgattcatctgaaattcctgagaccgatgttgaataatcatcatgcaatgagtgaagggtagatgttgaattatc

SEQ ID NO: 22261 - DNA, 3183 bp, Zea Mays
cgcagttccgcgaaccggtcgtccgctcgcaagcttttgccgcgatgcccgagcccgaacaagcagcgccgcgggcccgaggccgtccacgtcccactcgcagctcctccattcccgcgcgtccgctccaccgcaacgctccgcgaacccgttcccttcaaagcggtcacctcctcccccgacccctcgctggcgtcgcctcccatctcctgcctgcccttcacctcctgtccaccctccccctgtcgttcccgcaattccggctcacatgaccgtccgggccgcggccgtgctggtggccaccgccgcgctcgcgctcctgctcccgggatgggcggcggcggagtggagcctcacgaagaaaggcagcgtcgtcacctacgatgggcgctctctcatgatcgacggcaagcgggacctcttcttctccggcgccatccactaccctaggagcccgcctgagatgtggccgaagctgatcgagcgggccaaggagggcggcctcaacacgatcgagacgtacatattctggaatgcacacgagcctgagcctggcaagtacaattttgaaggcaggttcgacttgatcaagtacctcaagatgatccaggagcatgacatgtatgcaattgtgcgcatcgggcccttcatccaggcagaatggaaccatggtggtctgccgtattggcttagagagattgaccacataatattccgggcaaacaatgacccgtacaagaaagaaatggagaaattcgtgagattcatagtgcagaagttgaaggatgctgagttatttgcatcgcaaggaggacccatcattctaacacagattgagaatgagtatgggaacataaaaaaagatcatgcaacagatggtgacaagtacctcgagtgggcagctcaaatggccctcagcacacaaacaggagttccatggataatgtgcaagcagtcttcagctcctggtgaagtgatccctacatgcaatggaaggcattgtggagacacatggacacttcgcgacaaaaacaagcctatgctttggactgagaattggactcaacaattcagagcatatggcgatcaagtagctatgcgttcagctgaggacattgcatatgctgtgttacgattttttgcaaagggtgggtcattggttaactactacatgtaccacggaggaacaaattttggaaggactggcgcttcttatgtgctgactggatactatgatgaagctcccatggatgaatatggtatgtacaaggagcccaaatttgggcatctcagggacttgcacaacgtaataaggtcatatcaaaaagcattcctctgggggcaacattcgtctgagatattgggtcatgggtatgaggcacacatctttgagttgcctgaagaaaagctatgcctctctttcctttccaacaataacacgggcgaagacggaacagtgatcttccgaggggataagcactatgtgcctagccgttctgtctccattcttgctgggtgcaagaacgtagtttacaataccaagagagtgtttgtacaacacagtgaaaggtcattccatacctcagatgtaacaagcaagaataaccagtgggagatgttctcagaaacgatcccaaagtatcgtgatactaaagtcaggacaaaggaacccctggagcaatataaccaaaccaaggacgatactgactacttatggtacaccacaagctttcgcttggagtcggacgatttgccctttagaaatgacatccggcctgtgcttcaggtcaaaagtagtgcacacgcaatgatgggatttgctaatgatgctttcgatgcgcgcgcggaaacaagcaggtgaagggtttcatgtttgaaaaaccggttgatctgaaagtaggtgtgaaccatgtcgtattgctgtcgtcaactatgggaatgaaggatagtggtggtgaacttgctgaagtaaagggcggcattcaggagtgcctaatccaaggtctcaacactgggacgttggatttacaagtcaatggctggggccataaagctgcactagaaggtgagtacaaggagatctactcagaaaaaggtttgggcaaagttcagtggaaaccggccgagaacgaccgggcagccacttggtataagagatactttgatgagccagatggagatgatcccgttgtacttgacatgagctcaatgagcaagggaatgatttttgtgaatggcgaaggagtgggtagatactgggtctcataccgaactcttgctggaactccttctcaagcagtgtaccatatcccgcgtcctttcttgaaatccaaggacaaccttttggttatcttcgaggaggagatgggcaagccggacggcatcctcgtgcagaccgtgacgagagacgacatatgcctgtttatctcggagcacaacccgggacagataaagacgtgggacacggatggtgacaagatcaagctcattgcagaggatcacagcaggcggggcaccttgacgtgcccccctgagaagacaatccaggaagttgtctttgccagcttcggcaacccggacggcatgtgcggcaacttcactgtaggcacttgccacactcccaatgcaaagcagatcgttgagaaggaatgcctcggcaagccatcctgcatgctgccggtggatcacacagtgtacggcgcggacatcaactgccaatcaacgactgccacgctaggggtgcaggtgagatgcggaggcggcaagaagggtgcctgagaacaagacggatgctgctaattgacgtttcagctcgtttgtttgttcgtcccttcggtttggcactgatgcttatgacccattggtctgccattgcaattgaaatgtggttggaacgtgcttgatcgggaactaacatgaaatgagtgaagggtagatgctgatctgaaaaatatgtgtgttcccccctctttccttccatgtcgtgttgtttcaggtaaccgtcacaatatatataggtggtcccctttggaatccggggattattccgtttgctgtatttttttctgtgaaaatgaactgattcctgtcaattttctatatgatttatgattcatctgaaattcctgagaccgatgttgaataatcatcatgcaatgagtgaagggtagatgttgaattatc

SEQ ID NO: 22262 - DNA, 2551 bp, Zea Mays
atcgggcccttcatccaggcagaatggaaccatggtggtctgccgtattggcttagagagattgaccacataatattccgggcaaacaatgacccgtacaagaaagaaatggagaaattcgtgagattcatagtgcagaagttgaaggatgctgagttatttgcatcgcaaggaggacccatcattctaacacaggattgagaatgagtatgggaacataaaaaaagatcatgcaacagatggtgacaagtacctcgagtgggcagctcaaatggccctcagcacacaaacaggagttccatggataatgtgcaagcagtcttcagctcctggtgaagtgatccctacatgcaatggaaggcattgtggagacacatggacacttcgcgacaaaaacaagcctatgctttggactgagaattggactcaacaattcagagcatatggcgatcaagtagctatgcgttcagctgaggacattgcatatgctgtgttacgattttttgcaaagggtgggtcattggttaactactacatgtaccacggaggaacaaattttggaaggactggcgcttcttatgtgctgactggatactatgatgaagctcccatggatgaatatggtatgtacaaggagcccaaatttgggcatctcagggacttgcacaacgtaataaggtcatatcaaaaagcattcctctgggggcaacattcgtctgagatattgggtcatgggtatgaggcacacatctttgagttgcctgaagaaaagctatgcctctctttcctttccaacaataacacgggcgaagacggaacagtgatcttccgaggggataagcactatgtgcctagccgttctgtctccattcttgctgggtgcaagaacgtagtttacaataccaagagagtgtttgtacaacacagtgaaaggtcattccatacctcagatgtaacaagcaagaataaccagtgggagatgttctcagaaacgatcccaaagtatcgtgatactaaagtcaggacaaaggaacccctggagcaatataaccaaaccaaggacgatactgactacttatggtacaccacaagctttcgcttggagtcggacgatttgccctttagaaatgacatccggcctgtgcttcaggtcaaaagtagtgcacacgcaatgatgggatttgctaatgatgctttcgtaggatgcgcgcgcggaaacaagcaggtgaagggtttcatgtttgaaaaaccggttgatctgaaagtaggtgtgaaccatgtcgtattgctgtcgtcaactatgggaatgaaggatagtggtggtgaacttgctgaagtaaagggcggcattcaggagtgcctaatccaaggtctcaacactgggacgttggatttacaagtcaatggctggggccataaagctgcactagaaggtgagtacaaggagatctactcagaaaaaggtttgggcaaagttcagtggaaaccggccgagaacgaccgggcagccacttggtataagagatactttgatgagccagatggagatgatcccgttgtacttgacatgagctcaatgagcaagggaatgatttttgtgaatggcgaaggagtgggtagatactgggtctcataccgaactcttgctggaactccttctcaagcagtgtaccatatcccgcgtcctttcttgaaatccaaggacaaccttttggttatcttcgaggaggagatgggcaagccggacggcatcctcgtgcagaccgtgacgagagacgacatatgcctgtttatctcggagcacaacccgggacagataaagacgtgggacacggatggtgacaagatcaagctcattgcagaggatcacagcaggcggggcaccttgacgtgcccccctgagaagacaatccaggaagttgtctttgccagcttcggcaacccggacggcatgtgcggcaacttcactgtaggcacttgccacactcccaatgcaaagcagatcgttgagaaggaatgcctcggcaagccatcctgcatgctgccggtggatcacacagtgtacggcgcggacatcaactgccaatcaacgactgccacgctaggggtgcaggtgagatgcggaggcggcaagaagggtgcctgagaacaagacggatgctgctaattgacgtttcagctcgtttgtttgttcgtcccttcggtttggcactgatgcttatgacccattggtctgccattgcaattgaaatgtggttggaacgtgcttgatcgggaactaacatgaaatgagtgaagggtagatgctgatctgaaaaatatgtgtgttcccccctctttccttccatgtcgtgttgtttcaggtaaccgtcacaatatatataggtggtcccctttggaatccggggattattccgtttgctgtatttttttctgtgaaaatgaactgattcctgtcaattttctatatgatttatgattcatctgaaattcctgagaccgatgttgaataatcatcatgcaatgagtgaagggtagatgttgaattatc

SEQ ID NO: 22263 - DNA, 3188 bp, Zea Mays
aaaaaactgactctctctgatacaataaacacaactcaaatcgcatactctatttcgggctaaattgccaaatctcgagatccatgatccatccgaaaccccgcctcgccgcctcctctcgctttgccgtttccgaccgccaatgctgaggcgagccgacgctaccgcccacccgaatcctcgccgctgagggtgctctaggattggagtgctctggttggttgcatagacgctcgccgccgcctctcccgtgccccggcggccggcaccggccccgaccgcgaggctccgtcgccggcgatggcgtcgccggccggcggcgagtctccagcgaagcccgtcctcctgcatggcgacctcgacctctggatcctagaggcgcgcctgctccccaacatggacatgttctccgagcaggtccgccgctgcctcgccgtatgccgcccgcccacctcctgcgggaccaaccacccgcctgccgccgcgcgcggcggcggcggccgccaacaccaccaccggaagatcatcaccagaggcccctacgtcacgctgtccgtctccggcgccgtcgtggcgcgcaccgccgtcatccccaactcccaggaccccgtctgggaggagcgttttgccgtgccgctcgcgcaccgcgccgccgagctcgagttccaggtcaaggataacgataccttcggcgcgcagctcatcggcaccgtcaccgtccccgccgactgcgttgtgtcgggcaccgaggccgaggattggttccccgtcaaaggcaccaacggcaagccgtacaaacccgacaccgcgctgcgcctccgcttcacattccaccccatcgccaacaacccggcctaccgccacggcatccctggcgaccctggccacaggggcatcggggagtcctactacccgctccgccacggtggccaagtgacgctgtaccaggacgcgcacatcagggaaggggacctgccagagattgagctcgacgacggcaagacgttccagcacaactcgtgctgggaggacatctgccacgccatcctggaggcgcaccacatgatatatatcgtcggctggtcggtgtatgataaggtgcgactcgtgcgcgaaccatcgccgtcgcggccattgcccgatggtggcgaccttacgcttggagacctgctcaagttcaagtcacaggaaggtgtcagagtgtgcctgctggtgtgggatgataaaacttcgcatgacaagttcttcatcaagacgggtggagttatggcaactcatgatgaagaaactcggaaattttttaaacattcctcagtcatctgtgttctctctcctcgatatgctagcaataagctgagcattttcaaacagcaggttgttgggactttgtttacacaccatcaaaagtgtgtgctggttgatacacaagccaggggaaacaagcgaaaagttacagctttcattgggggcctagatctttgtgatggtcgctatgacacacctaaacacaggcttttcaaagatcttgacacagtattccaaaatgattaccataaccctacattttcgtcaggtgcaaagggacccaggcaaccatggcatgatttacattgcaggattgatggccctgctgcctatgatgtcttgacaaattttgagcaaaggtggcgaaaggcaacaaaatggcgtggccgatttagaagagtatctcattggaaagacgacgctttaattaagctggaacgtatctcatggataataagcccttcacccaatgttccaaatgatcatcctagtctgtgggtttcaaaagaagaagatcgtgaaaattggcatgttcaggtattccgatcaattgactctggttccctaaaaggatttcctagtgattgcaaagaagcttcaaagcttgttagtcaacatttctattttctgacttctgatgacggagaatatactatttgaaaactgctatgattcaaattatttctgcagaatcttgtgtgccgaaagaatctggtaattgataagagcatccacactgcatatgtccgagcaatcagatctgcacagcatttcatttatattgagaaccagtactttcttggctcttcatatgcttggccatcctatgtgaattcaggtgctgataatctgataccaatagaactggccctcaaaattgcaagtaagattagagcacaagaacgctttgcagtgtatgtagtgataccaatgtggcctgaaggagtccctactgcagcatctgttcaagaaattcttttctttcaggcccagacaatggagatgatgtatacaataattgcagatgagctcaagtcaatggacaataaggacatgcgccctgaagattacttgagcttcttttgtcttggaaaccgggaagaaccaccatctaatggcagcccagaatcagagaaatctacagataaaaggcttagctacaaaatatcgacggttcatgatctatgttcatgcaaaaggaatgattgtggatgatgaatatgtcattctgggttcagcaaacatcaaccagagatccctggctggttctagagatactgaaattgcaatgggtgcataccagcctcattatgcatggtctacaaagaatggacatcctgacggccaggtatacgggtacagaacgtccctgtgggcagagcaccttggaacgatcgatgaccgcttcaaggatccttcgagtttggagtgtgtaaggtttgtgaatcaaatcgctgtagagaactggcgaaggtatactgcagaagaaatgagtacattacaagggcacctcctcaagtacccagttaaggtggaggctgatggtaagatcagcccactgccagaccaagaatgctttcctgatgttggcggcaagattctgggagcttcaacttcacttcctgattcgctgaccatgtagcgtcattacataatttttttttcagagttgaactctgtaattgtctagatttggtgggattgtcgcagaacttatactactagtgaagtgcgcgtgccctgcgcgcgtgtagtgtaggctcatggagatccaaccacacaactaatataactatataaatttacatatataataagtgtaccaacctacatactgcatagtttctgttaccatttagttagttttgaatagagtacagaag

SEQ ID NO: 22264 - DNA, 3065 bp, Zea Mays
aaaaaactgactctctctgatacaataaacacaactcaaatcgcatactctatttcgggctaaattgccaaatctcgagatccatgatccatccgaaaccccgcctcgccgcctcctctcgctttgccgtttccgaccgccaatgctgaggcgagccgacgctaccgcccacccgaatcctcgccgctgagggtgctctaggattggagtgctctggttggttgcatagacgctcgccgccgcctctcccgtgccccggcggccggcaccggccccgaccgcgaggctccgtcgccggcgatggcgtcgccggccggcggcgagtctccagcgaagcccgtcctcctgcatggcgacctcgacctctggatcctagaggcgcgcctgctccccaacatggacatgttctccgagcaggtccgccgctgcctcgccgtatgccgcccgcccacctcctgcgggaccaaccacccgcctgccgccgcgcgcggcggcggcggccgccaacaccaccaccggaagatcatcaccagaggcccctacgtcacgctgtccgtctccggcgccgtcgtggcgcgcaccgccgtcatccccaactcccaggaccccgtctgggaggagcgttttgccgtgccgctcgcgcaccgcgccgccgagctcgagttccaggtcaaggataacgataccttcggcgcgcagctcatcggcaccgtcaccgtccccgccgactgcgttgtgtcgggcaccgaggccgaggattggttccccgtcaaaggcaccaacggcaagccgtacaaacccgacaccgcgctgcgcctccgcttcacattccaccccatcgccaacaacccggcctaccgccacggcatccctggcgaccctggccacaggggcatcggggagtcctactacccgctccgccacggtggccaagtgacgctgtaccaggacgcgcacatcagggaaggggacctgccagagattgagctcgacgacggcaagacgttccagcacaactcgtgctgggaggacatctgccacgccatcctggaggcgcaccacatgatatatatcgtcggctggtcggtgtatgataaggtgcgactcgtgcgcgaaccatcgccgtcgcggccattgcccgatggtggcgaccttacgcttggagacctgctcaagttcaagtcacaggaaggtgtcagagtgtgcctgctggtgtgggatgataaaacttcgcatgacaagttcttcatcaagacgggtggagttatggcaactcatgatgaagaaactcggaaattttttaaacattcctcagtcatctgtgttctctctcctcgatatgctagcaataagctgagcattttcaaacagcaggttgttgggactttgtttacacaccatcaaaagtgtgtgctggttgatacacaagccaggggaaacaagcgaaaagttacagctttcattgggggcctagatctttgtgatggtcgctatgacacacctaaacacaggcttttcaaagatcttgacacagtattccaaaatgattaccataaccctacattttcggattgatggccctgctgcctatgatgtcttgacaaattttgagcaaaggtggcgaaaggcaacaaaatggcgtggccgatttagaagagtatctcattggaaagacgacgctttaattaagctggaacgtatctcatggataataagcccttcacccaatgttccaaatgatcatcctagtctgtgggtttcaaaagaagaagatcgtgaaaattggcatgttcaggtattccgatcaattgactctggttccctaaaaggatttcctagtgattgcaaagaagcttcaaagcttaatcttgtgtgccgaaagaatctggtaattgataagagcatccacactgcatatgtccgagcaatcagatctgcacagcatttcatttatattgagaaccagtactttcttggctcttcatatgcttggccatcctatgtgaattcaggtgctgataatctgataccaatagaactggccctcaaaattgcaagtaagattagagcacaagaacgctttgcagtgtatgtagtgataccaatgtggcctgaaggagtccctactgcagcatctgttcaagaaattcttttctttcaggcccagacaatggagatgatgtatacaataattgcagatgagctcaagtcaatggacaataaggacatgcgccctgaagattacttgagcttcttttgtcttggaaaccgggaagaaccaccatctaatggcagcccagaatcagagaaatctacagataaaagtgcagtgggcttagctacaaaatatcgacggttcatgatctatgttcatgcaaaaggaatgattgtggatgatgaatatgtcattctgggttcagcaaacatcaaccagagatccctggctggttctagagatactgaaattgcaatgggtgcataccagcctcattatgcatggtctacaaagaatggacatcctgacggccaggtatacgggtacagaacgtccctgtgggcagagcaccttggaacgatcgatgaccgcttcaaggatccttcgagtttggagtgtgtaaggtttgtgaatcaaatcgctgtagagaactggcgaaggtatactgcagaagaaatgagtacattacaagggcacctcctcaagtacccagttaaggtggaggctgatggtaagatcagcccactgccagaccaagaatgctttcctgatgttggcggcaagattctgggagcttcaacttcacttcctgattcgctgaccatgtagcgtcattacataatttttttttcagagttgaactctgtaattgtctagatttggtgggattgtcgcagaacttatactactagtgaagtgcgcgtgccctgcgcgcgtgtagtgtaggctcatggagatccaaccacacaactaatataactatataaatttacatatataataagtgtaccaacctacatactgcatagtttctgttaccatttagttagttttgaatagagtacagaag

SEQ ID NO: 22265 - DNA, 2798 bp, Zea Mays
aaaaaactgactctctctgatacaataaacacaactcaaatcgcatactctatttcgggctaaattgccaaatctcgagatccatgatccatccgaaaccccgcctcgccgcctcctctcgctttgccgtttccgaccgccaatgctgaggcgagccgacgctaccgcccacccgaatcctcgccgctgagggtgctctaggattggagtgctctggttggttgcatagacgctcgccgccgcctctcccgtgccccggcggccggcaccggccccgaccgcgaggctccgtcgccggcgatggcgtcgccggccggcggcgagtctccagcgaagcccgtcctcctgcatggcgacctcgacctctggatcctagaggcgcgcctgctccccaacatggacatgttctccgagcaggtccgccgctgcctcgccgtatgccgcccgcccacctcctgcgggaccaaccacccgcctgccgccgcgcgcggcggcggcggccgccaacaccaccaccggaagatcatcaccagaggcccctacgtcacgctgtccgtctccggcgccgtcgtggcgcgcaccgccgtcatccccaactcccaggaccccgtctgggaggagcgttttgccgtgccgctcgcgcaccgcgccgccgagctcgagttccaggtcaaggataacgataccttcggcgcgcagctcatcggcaccgtcaccgtccccgccgactgcgttgtgtcgggcaccgaggccgaggattggttccccgtcaaaggcaccaacggcaagccgtacaaacccgacaccgcgctgcgcctccgcttcacattccaccccatcgccaacaacccggcctaccgccacggcatccctggcgaccctggccacaggggcatcggggagtcctactacccgctccgccacggtggccaagtgacgctgtaccaggacgcgcacatcagggaaggggacctgccagagattgagctcgacgacggcaagacgttccagcacaactcgtgctgggaggacatctgccacgccatcctggaggcgcaccacatgatatatatcgtcggctggtcggtgtatgataaggtgcgactcgtgcgcgaaccatcgccgtcgcggccattgcccgatggtggcgaccttacgcttggagacctgctcaagttcaagtcacaggaaggtgtcagagtgtgcctgctggtgtgggatgataaaacttcgcatgacaagttcttcatcaagacgggtggagttatggcaactcatgatgaagaaactcggaaattttttaaacattcctcagtcatctgtgttctctctcctcgatatgctagcaataagctgagcattttcaaacagcaggttgttgggactttgtttacacaccatcaaaagtgtgtgctggttgatacacaagccaggggaaacaagcgaaaagttacagctttcattgggggcctagatctttgtgatggtcgctatgacacacctaaacacaggcttttcaaagatcttgacacagtattccaaaatgattaccataaccctacattttcgtcaggtgcaaagggacccaggcaaccatggcatgatttacattgcaggattgatggccctgctgcctatgatgtcttgacaaattttgagcaaaggtggcgaaaggcaacaaaatggcgtggccgatttagaagagtatctcattggaaagacgacgctttaattaagctggaacgtatctcatggataataagcccttcacccaatgttccaaatgatcatcctagtctgtgggtttcaaaagaagaagatcgtgaaaattggcatgttcaggtattccgatcaattgactctggttccctaaaaggatttcctagtgattgcaaagaagcttcaaagcttaatcttgtgtgccgaaagaatctggtaattgataagagcatccacactgcatatgtccgagcaatcagatctgcacagcatttcatttatattgagaaccagtactttcttggctcttcatatgcttggccatcctatgtgaattcaggtgctgataatctgataccaatagaactggccctcaaaattgcaagtaagattagagcacaagaacgctttgcagtgtatgtagtgataccaatgtggcctgaaggagtccctactgcagcatctgttcaagaaattcttttctttcaggcccagacaatggagatgatgtatacaataattgcagatgagctcaagtcaatggacaataaggacatgcgccctgaagattacttgagcttcttttgtcttggaaaccgggaagaaccaccatctaatggcagcccagaatcagagaaatctacagataaaagtgcagtgggcttagctacaaaatatcgacggttcatgatctatgttcatgcaaaaggaatgattgtggatgatgaatatgtcattctgggttcagcaaacatcaaccagagatccctggctggttctagagatactgaaattgcaatgggtgcataccagcctcattatgcatggtctacaaagaatggacatcctgacggccaggtatacgggtacagaacgtccctgtgggcagagcaccttggaacgatcgatgaccgcttcaaggatccttcgagtttggagtgtgtaaggtttgtgaatcaaatcgctgtagagaactggcgaaggtatactgcagaagaaatgagtacattacaagggcacctcctcaagtacccagttaaggtggaggctgatggattaaaattacgcacatttctgtc

SEQ ID NO: 22266 - DNA, 3023 bp, Zea Mays
ctatttcgggctaaattgccaaatctcgagatccatgatccatccgaaaccccgcctcgccgcctcctctcgctttgccgtttccgaccgccaatgctgaggcgagccgacgctaccgcccacccgaatcctcgccgctgagggtgctctaggattggagtgctctggttggttgcatagacgctcgccgccgcctctcccgtgccccggcggccggcaccggccccgaccgcgaggctccgtcgccggcgatggcgtcgccggccggcggcgagtctccagcgaagcccgtcctcctgcatggcgacctcgacctctggatcctagaggcgcgcctgctccccaacatggacatgttctccgagcaggtccgccgctgcctcgccgtatgccgcccgcccacctcctgcgggaccaaccacccgcctgccgccgcgcgcggcggcggcggccgccaacaccaccaccggaagatcatcaccagaggcccctacgtcacgctgtccgtctccggcgccgtcgtggcgcgcaccgccgtcatccccaactcccaggaccccgtctgggaggagcgttttgccgtgccgctcgcgcaccgcgccgccgagctcgagttccaggtcaaggataacgataccttcggcgcgcagctcatcggcaccgtcaccgtccccgccgactgcgttgtgtcgggcaccgaggccgaggattggttccccgtcaaaggcaccaacggcaagccgtacaaacccgacaccgcgctgcgcctccgcttcacattccaccccatcgccaacaacccggcctaccgccacggcatccctggcgaccctggccacaggggcatcggggagtcctactacccgctccgccacggtggccaagtgacgctgtaccaggacgcgcacatcagggaaggggacctgccagagattgagctcgacgacggcaagacgttccagcacaactcgtgctgggaggacatctgccacgccatcctggaggcgcaccacatgatatatatcgtcggctggtcggtgtatgataaggtgcgactcgtgcgcgaaccatcgccgtcgcggccattgcccgatggtggcgaccttacgcttggagacctgctcaagttcaagtcacaggaaggtgtcagagtgtgcctgctggtgtgggatgataaaacttcgcatgacaagttcttcatcaagacgggtggagttatggcaactcatgatgaagaaactcggaaattttttaaacattcctcagtcatctgtgttctctctcctcgatatgctagcaataagctgagcattttcaaacagcaggttgttgggactttgtttacacaccatcaaaagtgtgtgctggttgatacacaagccaggggaaacaagcgaaaagttacagctttcattgggggcctagatctttgtgatggtcgctatgacacacctaaacacaggcttttcaaagatcttgacacagtattccaaaatgattaccataaccctacattttcgtcaggtgcaaagggacccaggcaaccatggcatgatttacattgcaggattgatggccctgctgcctatgatgtcttgacaaattttgagcaaaggtggcgaaaggcaacaaaatggcgtggccgatttagaagagtatctcattggaaagacgacgctttaattaagctggaacgtatctcatggataataagcccttcacccaatgttccaaatgatcatcctagtctgtgggtttcaaaagaagaagatcgtgaaaattggcatgttcaggtattccgatcaattgactctggttccctaaaaggatttcctagtgattgcaaagaagcttcaaagcttgttagtcaacatttctattttctgacttctgatgacggagaatatactatttgaaaactgctatgattcaaattatttctgcagaatcttgtgtgccgaaagaatctggtgctgataatctgataccaatagaactggccctcaaaattgcaagtaagattagagcacaagaacgctttgcagtgtatgtagtgataccaatgtggcctgaaggagtccctactgcagcatctgttcaagaaattcttttctttcaggcccagacaatggagatgatgtatacaataattgcagatgagctcaagtcaatggacaataaggacatgcgccctgaagattacttgagcttcttttgtcttggaaaccgggaagaaccaccatctaatggcagcccagaatcagagaaatctacagataaaagtgcagtgggcttagctacaaaatatcgacggttcatgatctatgttcatgcaaaaggaatgattgtggatgatgaatatgtcattctgggttcagcaaacatcaaccagagatccctggctggttctagagatactgaaattgcaatgggtgcataccagcctcattatgcatggtctacaaagaatggacatcctgacggccaggtatacgggtacagaacgtccctgtgggcagagcaccttggaacgatcgatgaccgcttcaaggatccttcgagtttggagtgtgtaaggtttgtgaatcaaatcgctgtagagaactggcgaaggtatactgcagaagaaatgagtacattacaagggcacctcctcaagtacccagttaaggtggaggctgatggtaagatcagcccactgccagaccaagaatgctttcctgatgttggcggcaagattctgggagcttcaacttcacttcctgattcgctgaccatgtagcgtcattacataatttttttttcagagttgaactctgtaattgtctagatttggtgggattgtcgcagaacttatactactagtgaagtgcgcgtgccctgcgcgcgtgtagtgtaggctcatggagatccaaccacacaactaatataactatataaatttacatatataataagtgtaccaacctacatactgcatagtttctgttaccatttagttagttttgaatagagtacagaag

SEQ ID NO: 22267 - DNA, 3059 bp, Zea Mays
ctatttcgggctaaattgccaaatctcgagatccatgatccatccgaaaccccgcctcgccgcctcctctcgctttgccgtttccgaccgccaatgctgaggcgagccgacgctaccgcccacccgaatcctcgccgctgagggtgctctaggattggagtgctctggttggttgcatagacgctcgccgccgcctctcccgtgccccggcggccggcaccggccccgaccgcgaggctccgtcgccggcgatggcgtcgccggccggcggcgagtctccagcgaagcccgtcctcctgcatggcgacctcgacctctggatcctagaggcgcgcctgctccccaacatggacatgttctccgagcaggtccgccgctgcctcgccgtatgccgcccgcccacctcctgcgggaccaaccacccgcctgccgccgcgcgcggcggcggcggccgccaacaccaccaccggaagatcatcaccagaggcccctacgtcacgctgtccgtctccggcgccgtcgtggcgcgcaccgccgtcatccccaactcccaggaccccgtctgggaggagcgttttgccgtgccgctcgcgcaccgcgccgccgagctcgagttccaggtcaaggataacgataccttcggcgcgcagctcatcggcaccgtcaccgtccccgccgactgcgttgtgtcgggcaccgaggccgaggattggttccccgtcaaaggcaccaacggcaagccgtacaaacccgacaccgcgctgcgcctccgcttcacattccaccccatcgccaacaacccggcctaccgccacggcatccctggcgaccctggccacaggggcatcggggagtcctactacccgctccgccacggtggccaagtgacgctgtaccaggacgcgcacatcagggaaggggacctgccagagattgagctcgacgacggcaagacgttccagcacaactcgtgctgggaggacatctgccacgccatcctggaggcgcaccacatgatatatatcgtcggctggtcggtgtatgataaggtgcgactcgtgcgcgaaccatcgccgtcgcggccattgcccgatggtggcgaccttacgcttggagacctgctcaagttcaagtcacaggaaggtgtcagagtgtgcctgctggtgtgggatgataaaacttcgcatgacaagttcttcatcaagacgggtggagttatggcaactcatgatgaagaaactcggaaattttttaaacattcctcagtcatctgtgttctctctcctcgatatgctagcaataagctgagcattttcaaacagcaggttgttgggactttgtttacacaccatcaaaagtgtgtgctggttgatacacaagccaggggaaacaagcgaaaagttacagctttcattgggggcctagatctttgtgatggtcgctatgacacacctaaacacaggcttttcaaagatcttgacacagtattccaaaatgattaccataaccctacattttcggtgcaaagggacccaggcaaccatggcatgatttacattgcaggattgatggccctgctgcctatgatgtcttgacaaattttgagcaaaggtggcgaaaggcaacaaaatggcgtggccgatttagaagagtatctcattggaaagacgacgctttaattaagctggaacgtatctcatggataataagcccttcacccaatgttccaaatgatcatcctagtctgtgggtttcaaaagaagaagatcgtgaaaattggcatgttcaggtattccgatcaattgactctggttccctaaaaggatttcctagtgattgcaaagaagcttcaaagcttaatcttgtgtgccgaaagaatctggtaattgataagagcatccacactgcatatgtccgagcaatcagatctgcacagcatttcatttatattgagaaccagtactttcttggctcttcatatgcttggccatcctatgtgaattcaggtgctgataatctgataccaatagaactggccctcaaaattgcaagtaagattagagcacaagaacgctttgcagtgtatgtagtgataccaatgtggcctgaaggagtccctactgcagcatctgttcaagaaattcttttctttcaggcccagacaatggagatgatgtatacaataattgcagatgagctcaagtcaatggacaataaggacatgcgccctgaagattacttgagcttcttttgtcttggaaaccgggaagaaccaccatctaatggcagcccagaatcagagaaatctacagataaaagtgcagtgggcttagctacaaaatatcgacggttcatgatctatgttcatgcaaaaggaatgattgtggatgatgaatatgtcattctgggttcagcaaacatcaaccagagatccctggctggttctagagatactgaaattgcaatgggtgcataccagcctcattatgcatggtctacaaagaatggacatcctgacggccaggtatacgggtacagaacgtccctgtgggcagagcaccttggaacgatcgatgaccgcttcaaggatccttcgagtttggagtgtgtaaggtttgtgaatcaaatcgctgtagagaactggcgaaggtatactgcagaagaaatgagtacattacaagggcacctcctcaagtacccagttaaggtggaggctgatggtaagatcagcccactgccagaccaagaatgctttcctgatgttggcggcaagattctgggagcttcaacttcacttcctgattcgctgaccatgtagcgtcattacataatttttttttcagagttgaactctgtaattgtctagatttggtgggattgtcgcagaacttatactactagtgaagtgcgcgtgccctgcgcgcgtgtagtgtaggctcatggagatccaaccacacaactaatataactatataaatttacatatataataagtgtaccaacctacatactgcatagtttctgttaccatttagttagttttgaatagagtacagaag

SEQ ID NO: 22268 - DNA, 2691 bp, Zea Mays
cagccacgcgccagtcaagttttcagtgtccggctgccggcagtcaccgcaaaacgaaatctctctcctccacctcgtagtcgtagccgtttcatccactttctagtttcctttctcctcctccagccctccttaaaaaatcggccacggttatttatttctctcgccccgctccgctttcctaatctgcgagctggggggagatcgagaccctagaacggagggcgggtgtgcggcgctgagggccttagacgaatggcggtggaggagaccgcggagagctgcggcagccacgccgcgaccgctgcgtccggcggcggcgcggcggggcccgcgacgtcctcgtcatcggccgccgcggcggcgcaggcgcggaagcagcaacagcagcagcgccataagctcgaggtgtacacggaggttcttcggcgcctccacgacgccggcctgcccgacgcgcgggcgcccgggttcgacgacgagctctggaatcacttcaaccgcctccctgcccgctacgccatggatgtgaacgtggagagggcggaggacgtgctcacgcacaagcggctcctggagcaggccaaggatccggctcatcgcccggctttcgcggtgcggtccgtgcaggggaggaagtcgcttcaagactgttgaacaggcagcaaagcatatatcctcctcctgccttcggttcttctacaaatcttgaggcccttgctcttgaagctagcaagtctcatgatcacgatagcacttctgataatggccgatctctatacaggcccatgcatgaaatcaccttttcaaccattgacaagccaaaacttctcagtgagctgacatctctgcttggtgagcttggtctaaacattcaagaagcacatgcattttcaacaaatgatggctactcacttgatgtcttcgttgttgtcggttggcatgatgaggaaacagaggatttagtagaagcagtgcagaaggaaattggcaggattgaagagacacaagcatggtcttcatctcattcatggtctactccagttgaaaaaatgcagattgctgagaattcagcagctgaccgtgttgagataccaacagatggtgctagtgaatgggaaattgatgtaaagcttctcaagtttgggaataaagtagcatcaggatcatatggtgacctttaccggggtacatattgcagtcaagatgttgctattaaagtgctgaaacctgagagaataaatgcagacatgcaacgagaatttgctcaggaagtatatattatgaggaaggtccgtcacaagaatgttgtgcaatttattggggcttgcactaaacccccaaacctatgtatagtcacagaatttatgtccggtggaagtgtgtatgattacctccataaacataaaggtgttttcaaacttcctgctttagttggagttgcaacggatgtgtcaaaaggcatgagctacttacaccagaataatattattcatcgtgatttgaaaactgcaaaccttctgatggatgaaaatgggactgttaaagttgctgattttggtgttgcacgtgttaaagctcaatctggagttatgactgcagaaactggtacttaccgttggatggccccagaggtcattgagcacaaaccctatgatcacaaggctgatgtttttagttttggaattttgatgtgggaactactcacagggaagattccttatgagtacctgactccactacaagccgctgttggtgtggtgcagaagggattacggcctacaattccaaagcatactcacgcaaagctttccgagcttcttcagaaatgctggcagcaggaccctacccaaagaccagacttctccgaaatattagaaactcttcagagaatagcagaggaggtcggagaggagcacgatgggaagcacaaggacagaacactgggtggtttcttttcggctttgagggggcggagccattgagacacagtcgaagacttttaataataaaaatgtacatggcctcggtccgtcctttgaaggacctgagctacaaccagtgcagtgcctgttcctcgcacgtcagcaccagtacacagaaatacagacctgctgtgcagctgcagttgactgaagcggcaatttttatttagctgcagccatcgctttccgcatatccgcttgttattcctgagttccattacgcaatgtataacataggtgaggaagcttgggaactgtatcatcagtctgatttccctgggagtgcaatcctgctgtagatgaaaaaaaaagccagattcaggccgtggcatgattcttttaagactccatcatttagcatcttttcgtttatggcagcgcggcgagcttgagtagctgaacaacagaacaaggcacctgcatctgcatgggttctgctcgcttgtgccaatttttgttccccagttgccgtgagaacaaactataatatcttatattcagaacaaatggagagaaaaaaaccatgtgtgtagtcttcatcgacagttcgacactgatgattcgaggagtagcactagaaagaggtagacttgtgatgccatacttgcatcatccacgatgcttttcttctcttttgctggatgaaagagcccagtaaacgagtgaagccatgtgggatcacagtttctttggttcgtttctgttg

SEQ ID NO: 22269 - DNA, 2643 bp, Zea Mays
cgccagtcaagttttcagtgtccggctgccggcagtcaccgcaaaacgaaatctctctcctccacctcgtagtcgtagccgtttcatccactttctagtttcctttctcctcctccagccctccttaaaaaatcggccacggttatttatttctctcgccccgctccgctttcctaatctgcgagctggggggagatcgagaccctagaacggagggcgggtgtgcggcgctgagggccttagacgaatggcggtggaggagaccgcggagagctgcggcagccacgccgcgaccgctgcgtccggcggcggcgcggcggggcccgcgacgtcctcgtcatcggccgccgcggcggcgcaggcgcggaagcagcaacagcagcagcgccataagctcgaggtgtacacggaggttcttcggcgcctccacgacgccggcctgcccgacgcgcgggcgcccgggttcgacgacgagctctggaatcacttcaaccgcctccctgcccgctacgccatggatgtgaacgtggagagggcggaggacgtgctcacgcacaagcggctcctggagcaggccaaggatccggctcatcgcccggctttcgcggtgcggtccgtgcaggggaggaagtcgcttcaagactgttgaacaggcagcaaagcatatatcctcctcctgccttcggttcttctacaaatcttgaggcccttgctcttgaagctagcaagtctcatgatcacgatagcacttctgataatggccgatctctatacaggcccatgcatgaaatcaccttttcaaccattgacaagccaaaacttctcagtgagctgacatctctgcttggtgagcttggtctaaacattcaagaagcacatgcattttcaacaaatgatggctactcacttgatgtcttcgttgttgtcggttggcatgatgaggaaacagaggatttagtagaagcagtgcagaaggaaattggcaggattgaagagttgaaaaaatgcagattgctgagaattcagcagctgaccgtgttgagataccaacagatggtgctagtgaatgggaaattgatgtaaagcttctcaagtttgggaataaagtagcatcaggatcatatggtgacctttaccggggtacatattgcagtcaagatgttgctattaaagtgctgaaacctgagagaataaatgcagacatgcaacgagaatttgctcaggaagtatatattatgaggaaggtccgtcacaagaatgttgtgcaatttattggggcttgcactaaacccccaaacctatgtatagtcacagaatttatgtccggtggaagtgtgtatgattacctccataaacataaaggtgttttcaaacttcctgctttagttggagttgcaacggatgtgtcaaaaggcatgagctacttacaccagaataatattattcatcgtgatttgaaaactgcaaaccttctgatggatgaaaatgggactgttaaagttgctgattttggtgttgcacgtgttaaagctcaatctggagttatgactgcagaaactggtacttaccgttggatggccccagaggtcattgagcacaaaccctatgatcacaaggctgatgtttttagttttggaattttgatgtgggaactactcacagggaagattccttatgagtacctgactccactacaagccgctgttggtgtggtgcagaagggattacggcctacaattccaaagcatactcacgcaaagctttccgagcttcttcagaaatgctggcagcaggaccctacccaaagaccagacttctccgaaatattagaaactcttcagagaatagcagaggaggtcggagaggagcacgatgggaagcacaaggacagaacactgggtggtttcttttcggctttgagggggcggagccattgagacacagtcgaagacttttaataataaaaatgtacatggcctcggtccgtcctttgaaggacctgagctacaaccagtgcagtgcctgttcctcgcacgtcagcaccagtacacagaaatacagacctgctgtgcagctgcagttgactgaagcggcaatttttatttagctgcagccatcgctttccgcatatccgcttgttattcctgagttccattacgcaatgtataacataggtgaggaagcttgggaactgtatcatcagtctgatttccctgggagtgcaatcctgctgtagatgaaaaaaaaagccagattcaggccgtggcatgattcttttaagactccatcatttagcatcttttcgtttatggcagcgcggcgagcttgagtagctgaacaacagaacaaggcacctgcatctgcatgggttctgctcgcttgtgccaatttttgttccccagttgccgtgagaacaaactataatatcttatattcagaacaaatggagagaaaaaaaccatgtgtgtagtcttcatcgacagttcgacactgatgattcgaggagtagcactagaaagaggtagacttgtgatgccatacttgcatcatccacgatgcttttcttctcttttgctggatgaaagagcccagtaaacgagtgaagccatgtgggatcacagtttctttggttcgtttctgttg

SEQ ID NO: 22270 - DNA, 2681 bp, Zea Mays
caagttttcagtgtccggctgccggcagtcaccgcaaaacgaaatctctctcctccacctcgtagtcgtagccgtttcatccactttctagtttcctttctcctcctccagccctccttaaaaaatcggccacggttatttatttctctcgccccgctccgctttcctaatctgcgagctggggggagatcgagaccctagaacggagggcgggtgtgcggcgctgagggccttagacgaatggcggtggaggagaccgcggagagctgcggcagccacgccgcgaccgctgcgtccggcggcggcgcggcggggcccgcgacgtcctcgtcatcggccgccgcggcggcgcaggcgcggaagcagcaacagcagcagcgccataagctcgaggtgtacacggaggttcttcggcgcctccacgacgccggcctgcccgacgcgcgggcgcccgggttcgacgacgagctctggaatcacttcaaccgcctccctgcccgctacgccatggatgtgaacgtggagagggcggaggacgtgctcacgcacaagcggctcctggagcaggccaaggatccggctcatcgcccggctttcgcggtgcggtccgtgcagtgcaggggaggaagtcgcttcaagactgttgaacaggcagcaaagcatatatcctcctcctgccttcggttcttctacaaatcttgaggcccttgctcttgaagctagcaagtctcatgatcacgatagcacttctgataatggccgatctctatacaggcccatgcatgaaatcaccttttcaaccattgacaagccaaaacttctcagtgagctgacatctctgcttggtgagcttggtctaaacattcaagaagcacatgcattttcaacaaatgatggctactcacttgatgtcttcgttgttgtcggttggcatgatgaggaaacagaggatttagtagaagcagtgcagaaggaaattggcaggattgaagagacacaagcatggtcttcatctcattcatggtctactccagttgaaaaaatgcagattgctgagaattcagcagctgaccgtgttgagataccaacagatggtgctagtgaatgggaaattgatgtaaagcttctcaagtttgggaataaagtagcatcaggatcatatggtgacctttaccggggtacatattgcagtcaagatgttgctattaaagtgctgaaacctgagagaataaatgcagacatgcaacgagaatttgctcaggaagtatatattatgaggaaggtccgtcacaagaatgttgtgcaatttattggggcttgcactaaacccccaaacctatgtatagtcacagaatttatgtccggtggaagtgtgtatgattacctccataaacataaaggtgttttcaaacttcctgctttagttggagttgcaacggatgtgtcaaaaggcatgagctacttacaccagaataatattattcatcgtgatttgaaaactgcaaaccttctgatggatgaaaatgggactgttaaagttgctgattttggtgttgcacgtgttaaagctcaatctggagttatgactgcagaaactggtacttaccgttggatggccccagaggtcattgagcacaaaccctatgatcacaaggctgatgtttttagttttggaattttgatgtgggaactactcacagggaagattccttatgagtacctgactccactacaagccgctgttggtgtggtgcagaagggattacggcctacaattccaaagcatactcacgcaaagctttccgagcttcttcagaaatgctggcagcaggaccctacccaaagaccagacttctccgaaatattagaaactcttcagagaatagcagaggaggtcggagaggagcacgatgggaagcacaaggacagaacactgggtggtttcttttcggctttgagggggcggagccattgagacacagtcgaagacttttaataataaaaatgtacatggcctcggtccgtcctttgaaggacctgagctacaaccagtgcagtgcctgttcctcgcacgtcagcaccagtacacagaaatacagacctgctgtgcagctgcagttgactgaagcggcaatttttatttagctgcagccatcgctttccgcatatccgcttgttattcctgagttccattacgcaatgtataacataggtgaggaagcttgggaactgtatcatcagtctgatttccctgggagtgcaatcctgctgtagatgaaaaaaaaagccagattcaggccgtggcatgattcttttaagactccatcatttagcatcttttcgtttatggcagcgcggcgagcttgagtagctgaacaacagaacaaggcacctgcatctgcatgggttctgctcgcttgtgccaatttttgttccccagttgccgtgagaacaaactataatatcttatattcagaacaaatggagagaaaaaaaccatgtgtgtagtcttcatcgacagttcgacactgatgattcgaggagtagcactagaaagaggtagacttgtgatgccatacttgcatcatccacgatgcttttcttctcttttgctggatgaaagagcccagtaaacgagtgaagccatgtgggatcacagtttctttggttcgtttctgttg

SEQ ID NO: 22271 - DNA, 2544 bp, Zea Mays
ctctctcctccacctcgtagtcgtagccgtttcatccactttctagtttcctttctcctcctccagccctccttaaaaaatcggccacggttatttatttctctcgccccgctccgctttcctaatctgcgagctggggggagatcgagaccctagaacggagggcgggtgtgcggcgctgagggccttagacgaatggcggtggaggagaccgcggagagctgcggcagccacgccgcgaccgctgcgtccggcggcggcgcggcggggcccgcgacgtcctcgtcatcggccgccgcggcggcgcaggcgcggaagcagcaacagcagcagcgccataagctcgaggtgtacacggaggttcttcggcgcctccacgacgccggcctgcccgacgcgcgggcgcccgggttcgacgacgagctctggaatcacttcaaccgcctccctgcccgctacgccatggatgtgaacgtggagagggcggaggacgtgctcacgcacaagcggctcctggagcaggccaaggatccggctcatcgcccggctttcgcggtgcggtccgtgcaggggaggaagtcgcttcaagactgttgaacaggcagcaaagcatatatcctcctcctgccttcggttcttctacaaatcttgaggcccttgctcttgaagctagcaagtctcatgatcacgatagcacttctgataatggccgatctctatacaggcccatgcatgaaatcaccttttcaaccattgacaagccaaaacttctcagtgagctgacatctctgcttggtgagcttggtctaaacattcaagaagcacatgcattttcaacaaatgatggctactcacttgatgtcttcgttgttgtcggttggcatgatgaggaaacagaggatttagtagaagcagtgcagaaggaaattggcaggattgaagagacacaagcatggtcttcatctcattcatggtctactccagttgaaaaaatgcagattgctgagaattcagcagctgaccgtgttgagataccaacagatggtgctagtgaatgggaaattgatgtaaagcttctcaagtttgggaataaagtagcatcaggatcatatggtgacctttaccggggtacatattgcagtcaagatgttgctattaaagtgctgaaacctgagagaataaatgcagacatgcaacgagaatttgctcaggaagtatatattatgaggaaggtccgtcacaagaatgttgtgcaatttattggggcttgcactaaacccccaaacctatgtatagtcacagaatttatgtccggtggaagtgtgtatgattacctccataaacataaaggtgttttcaaacttcctgctttagttggagttgcaacggatgtgtcaaaagttgctgattttggtgttgcacgtgttaaagctcaatctggagttatgactgcagaaactggtacttaccgttggatggccccagaggtcattgagcacaaaccctatgatcacaaggctgatgtttttagttttggaattttgatgtgggaactactcacagggaagattccttatgagtacctgactccactacaagccgctgttggtgtggtgcagaagggattacggcctacaattccaaagcatactcacgcaaagctttccgagcttcttcagaaatgctggcagcaggaccctacccaaagaccagacttctccgaaatattagaaactcttcagagaatagcagaggaggtcggagaggagcacgatgggaagcacaaggacagaacactgggtggtttcttttcggctttgagggggcggagccattgagacacagtcgaagacttttaataataaaaatgtacatggcctcggtccgtcctttgaaggacctgagctacaaccagtgcagtgcctgttcctcgcacgtcagcaccagtacacagaaatacagacctgctgtgcagctgcagttgactgaagcggcaatttttatttagctgcagccatcgctttccgcatatccgcttgttattcctgagttccattacgcaatgtataacataggtgaggaagcttgggaactgtatcatcagtctgatttccctgggagtgcaatcctgctgtagatgaaaaaaaaagccagattcaggccgtggcatgattcttttaagactccatcatttagcatcttttcgtttatggcagcgcggcgagcttgagtagctgaacaacagaacaaggcacctgcatctgcatgggttctgctcgcttgtgccaatttttgttccccagttgccgtgagaacaaactataatatcttatattcagaacaaatggagagaaaaaaaccatgtgtgtagtcttcatcgacagttcgacactgatgattcgaggagtagcactagaaagaggtagacttgtgatgccatacttgcatcatccacgatgcttttcttctcttttgctggatgaaagagcccagtaaacgagtgaagccatgtgggatcacagtttctttggttcgtttctgttg

SEQ ID NO: 22272 - DNA, 2431 bp, Zea Mays
ctctcctccacctcgtagtcgtagccgtttcatccactttctagtttcctttctcctcctccagccctccttaaaaaatcggccacggttatttatttctctcgccccgctccgctttcctaatctgcgagctggggggagatcgagaccctagaacggagggcgggtgtgcggcgctgagggccttagacgaatggcggtggaggagaccgcggagagctgcggcagccacgccgcgaccgctgcgtccggcggcggcgcggcggggcccgcgacgtcctcgtcatcggccgccgcggcggcgcaggcgcggaagcagcaacagcagcagcgccataagctcgaggtgtacacggaggttcttcggcgcctccacgacgccggcctgcccgacgcgcgggcgcccgggttcgacgacgagctctggaatcacttcaaccgcctccctgcccgctacgccatggatgtgaacgtggagagggcggaggacgtgctcacgcacaagcggctcctggagcaggccaaggatccggctcatcgcccggctttcgcggtgcggtccgtgcaggtatctccaattcttgatgggaatcagactgattctgattcgaacactgcaggggaggaagtcgcttcaagactgttgaacaggcagcaaagcatatatcctcctcctgccttcggttcttctacaaatcttgaggcccttgctcttgaagctagcaagtctcatgatcacgatagcacttctgataatggccgatctctatacaggcccatgcatgaaatcaccttttcaaccattgacaagccaaaacttctcagtgagctgacatctctgcttggtgagcttggtctaaacattcaagaagcacatgcattttcaacaaatgatggctactcacttgatgtcttcgttgttgtcggttggcatgatgaggaaacagaggatttagtagaagcagtgcagaaggaaattggcaggattgaagagacacaagcatggtcttcatctcattcatggtctactccagttgaaaaaatgcagattgctgagaattcagcagctgaccgtgttgagataccaacagatggtgctagtgaatgggaaattgatgtaaagcttctcaagtttgggaataaagtagcatcaggatcatatggtgacctttaccggggtacatattgcagtcaagatgttgctattaaagtgctgaaacctgagagaataaatgcagacatgcaacgagaatttgctcaggaagtatatattatgagactgttaaagttgctgattttggtgttgcacgtgttaaagctcaatctggagttatgactgcagaaactggtacttaccgttggatggccccagaggtcattgagcacaaaccctatgatcacaaggctgatgtttttagttttggaattttgatgtgggaactactcacagggaagattccttatgagtacctgactccactacaagccgctgttggtgtggtgcagaagggattacggcctacaattccaaagcatactcacgcaaagctttccgagcttcttcagaaatgctggcagcaggaccctacccaaagaccagacttctccgaaatattagaaactcttcagagaatagcagaggaggtcggagaggagcacgatgggaagcacaaggacagaacactgggtggtttcttttcggctttgagggggcggagccattgagacacagtcgaagacttttaataataaaaatgtacatggcctcggtccgtcctttgaaggacctgagctacaaccagtgcagtgcctgttcctcgcacgtcagcaccagtacacagaaatacagacctgctgtgcagctgcagttgactgaagcggcaatttttatttagctgcagccatcgctttccgcatatccgcttgttattcctgagttccattacgcaatgtataacataggtgaggaagcttgggaactgtatcatcagtctgatttccctgggagtgcaatcctgctgtagatgaaaaaaaaagccagattcaggccgtggcatgattcttttaagactccatcatttagcatcttttcgtttatggcagcgcggcgagcttgagtagctgaacaacagaacaaggcacctgcatctgcatgggttctgctcgcttgtgccaatttttgttccccagttgccgtgagaacaaactataatatcttatattcagaacaaatggagagaaaaaaaccatgtgtgtagtcttcatcgacagttcgacactgatgattcgaggagtagcactagaaagaggtagacttgtgatgccatacttgcatcatccacgatgcttttcttctcttttgctggatgaaagagcccagtaaacgagtgaagccatgtgggatcacagtttctttggttcgtttctgttg

SEQ ID NO: 22273 - DNA, 2666 bp, Zea Mays
ctctcctccacctcgtagtcgtagccgtttcatccactttctagtttcctttctcctcctccagccctccttaaaaaatcggccacggttatttatttctctcgccccgctccgctttcctaatctgcgagctggggggagatcgagaccctagaacggagggcgggtgtgcggcgctgagggccttagacgaatggcggtggaggagaccgcggagagctgcggcagccacgccgcgaccgctgcgtccggcggcggcgcggcggggcccgcgacgtcctcgtcatcggccgccgcggcggcgcaggcgcggaagcagcaacagcagcagcgccataagctcgaggtgtacacggaggttcttcggcgcctccacgacgccggcctgcccgacgcgcgggcgcccgggttcgacgacgagctctggaatcacttcaaccgcctccctgcccgctacgccatggatgtgaacgtggagagggcggaggacgtgctcacgcacaagcggctcctggagcaggccaaggatccggctcatcgcccggctttcgcggtatctccaattcttgatgggaatcagactgattctgattcgaacactgcaggggaggaagtcgcttcaagactgttgaacaggcagcaaagcatatatcctcctcctgccttcggttcttctacaaatcttgaggcccttgctcttgaagctagcaagtctcatgatcacgatagcacttctgataatggccgatctctatacaggcccatgcatgaaatcaccttttcaaccattgacaagccaaaacttctcagtgagctgacatctctgcttggtgagcttggtctaaacattcaagaagcacatgcattttcaacaaatgatggctactcacttgatgtcttcgttgttgtcggttggcatgatgaggaaacagaggatttagtagaagcagtgcagaaggaaattggcaggattgaagagacacaagcatggtcttcatctcattcatggtctactccagttgaaaaaatgcagattgctgagaattcagcagctgaccgtgttgagataccaacagatggtgctagtgaatgggaaattgatgtaaagcttctcaagtttgggaataaagtagcatcaggatcatatggtgacctttaccggggtacatattgcagtcaagatgttgctattaaagtgctgaaacctgagagaataaatgcagacatgcaacgagaatttgctcaggaagtatatattatgaggaaggtccgtcacaagaatgttgtgcaatttattggggcttgcactaaacccccaaacctatgtatagtcacagaatttatgtccggtggaagtgtgtatgattacctccataaacataaaggtgttttcaaacttcctgctttagttggagttgcaacggatgtgtcaaaaggcatgagctacttacaccagaataatattattcatcgtgatttgaaaactgcaaaccttctgatggatgaaaatgggactgttaaagttgctgattttggtgttgcacgtgttaaagctcaatctggagttatgactgcagaaactggtacttaccgttggatggccccagaggtcattgagcacaaaccctatgatcacaaggctgatgtttttagttttggaattttgatgtgggaactactcacagggaagattccttatgagtacctgactccactacaagccgctgttggtgtggtgcagaagggattacggcctacaattccaaagcatactcacgcaaagctttccgagcttcttcagaaatgctggcagcaggaccctacccaaagaccagacttctccgaaatattagaaactcttcagagaatagcagaggaggtcggagaggagcacgatgggaagcacaaggacagaacactgggtggtttcttttcggctttgagggggcggagccattgagacacagtcgaagacttttaataataaaaatgtacatggcctcggtccgtcctttgaaggacctgagctacaaccagtgcagtgcctgttcctcgcacgtcagcaccagtacacagaaatacagacctgctgtgcagctgcagttgactgaagcggcaatttttatttagctgcagccatcgctttccgcatatccgcttgttattcctgagttccattacgcaatgtataacataggtgaggaagcttgggaactgtatcatcagtctgatttccctgggagtgcaatcctgctgtagatgaaaaaaaaagccagattcaggccgtggcatgattcttttaagactccatcatttagcatcttttcgtttatggcagcgcggcgagcttgagtagctgaacaacagaacaaggcacctgcatctgcatgggttctgctcgcttgtgccaatttttgttccccagttgccgtgagaacaaactataatatcttatattcagaacaaatggagagaaaaaaaccatgtgtgtagtcttcatcgacagttcgacactgatgattcgaggagtagcactagaaagaggtagacttgtgatgccatacttgcatcatccacgatgcttttcttctcttttgctggatgaaagagcccagtaaacgagtgaagccatgtgggatcacagtttctttggttcgtttctgttg

SEQ ID NO: 22274 - DNA, 2574 bp, Zea Mays
tctcctccacctcgtagtcgtagccgtttcatccactttctagtttcctttctcctcctccagccctccttaaaaaatcggccacggttatttatttctctcgccccgctccgctttcctaatctgcgagctggggggagatcgagaccctagaacggagggcgggtgtgcggcgctgagggccttagacgaatggcggtggaggagaccgcggagagctgcggcagccacgccgcgaccgctgcgtccggcggcggcgcggcggggcccgcgacgtcctcgtcatcggccgccgcggcggcgcaggcgcggaagcagcaacagcagcagcgccataagctcgaggtgtacacggaggttcttcggcgcctccacgacgccggcctgcccgacgcgcgggcgcccgggttcgacgacgagctctggaatcacttcaaccgcctccctgcccgctacgccatggatgtgaacgtggagagggcggaggacgtgctcacgcacaagcggctcctggagcaggccaaggatccggctcatcgcccggctttcgcggtgcggtccgtgcaggtatctccaattcttgatgggaatcagactgattctgattcgaacactgcaggggaggaagtcgcttcaagactgttgaacaggcagcaaagcatatatcctcctcctgccttcggttcttctacaaatcttgaggcccttgctcttgaagctagcaagtctcatgatcacgatagcacttctgataatggccgatctctatacaggcccatgcatgaaatcaccttttcaaccattgacaagccaaaacttctcagtgagctgacatctctgcttggtgagcttggtctaaacattcaagaagcacatgcattttcaacaaatgatggctactcacttgatgtcttcgttgttgtcggttggcatgatgaggaaacagaggatttagtagaagcagtgcagaaggaaattggcaggattgaagagacacaagcatggtcttcatctcattcatggtctactccagttgaaaaaatgcagattgctgagaattcagcagctgaccgtgttgagataccaacagatggtgctagtgaatgggaaattgatgtaaagcttctcaagtttgggaataaagtagcatcaggatcatatggtgacctttaccggggtacatattgcagtcaagatgttgctattaaagtgctgaaacctgagagaataaatgcagacatgcaacgagaatttgctcaggaagtatatattatgaggaaggtccgtcacaagaatgttgtgcaatttattggggcttgcactaaacccccaaacctatgtatagtcacagaataatattattcatcgtgatttgaaaactgcaaaccttctgatggatgaaaatgggcttcgttctgcagactgttaaagttgctgattttggtgttgcacgtgttaaagctcaatctggagttatgactgcagaaactggtacttaccgttggatggccccagaggtcattgagcacaaaccctatgatcacaaggctgatgtttttagttttggaattttgatgtgggaactactcacagggaagattccttatgagtacctgactccactacaagccgctgttggtgtggtgcagaagggattacggcctacaattccaaagcatactcacgcaaagctttccgagcttcttcagaaatgctggcagcaggaccctacccaaagaccagacttctccgaaatattagaaactcttcagagaatagcagaggaggtcggagaggagcacgatgggaagcacaaggacagaacactgggtggtttcttttcggctttgagggggcggagccattgagacacagtcgaagacttttaataataaaaatgtacatggcctcggtccgtcctttgaaggacctgagctacaaccagtgcagtgcctgttcctcgcacgtcagcaccagtacacagaaatacagacctgctgtgcagctgcagttgactgaagcggcaatttttatttagctgcagccatcgctttccgcatatccgcttgttattcctgagttccattacgcaatgtataacataggtgaggaagcttgggaactgtatcatcagtctgatttccctgggagtgcaatcctgctgtagatgaaaaaaaaagccagattcaggccgtggcatgattcttttaagactccatcatttagcatcttttcgtttatggcagcgcggcgagcttgagtagctgaacaacagaacaaggcacctgcatctgcatgggttctgctcgcttgtgccaatttttgttccccagttgccgtgagaacaaactataatatcttatattcagaacaaatggagagaaaaaaaccatgtgtgtagtcttcatcgacagttcgacactgatgattcgaggagtagcactagaaagaggtagacttgtgatgccatacttgcatcatccacgatgcttttcttctcttttgctggatgaaagagcccagtaaacgagtgaagccatgtgggatcacagtttctttggttcgtttctgttg

SEQ ID NO: 22275 - DNA, 2639 bp, Zea Mays
ctcctccacctcgtagtcgtagccgtttcatccactttctagtttcctttctcctcctccagccctccttaaaaaatcggccacggttatttatttctctcgccccgctccgctttcctaatctgcgagctggggggagatcgagaccctagaacggagggcgggtgtgcggcgctgagggccttagacgaatggcggtggaggagaccgcggagagctgcggcagccacgccgcgaccgctgcgtccggcggcggcgcggcggggcccgcgacgtcctcgtcatcggccgccgcggcggcgcaggcgcggaagcagcaacagcagcagcgccataagctcgaggtgtacacggaggttcttcggcgcctccacgacgccggcctgcccgacgcgcgggcgcccgggttcgacgacgagctctggaatcacttcaaccgcctccctgcccgctacgccatggatgtgaacgtggagagggcggaggacgtgctcacgcacaagcggctcctggagcaggccaaggatccggctcatcgcccggctttcgcggtgcggtccgtgcaggtatctccaattcttgatgggaatcagactgattctgattcgaacactgcaggggaggaagtcgcttcaagactgttgaacaggcagcaaagcatatatcctcctcctgccttcggttcttctacaaatcttgaggcccttgctcttgaagctagcaagtctcatgatcacgatagcacttctgataatggccgatctctatacaggcccatgcatgaaatcaccttttcaaccattgacaagccaaaacttctcagtgagctgacatctctgcttggtgagcttggtctaaacattcaagaagcacatgcattttcaacaaatgatggctactcacttgatgtcttcgttgttgtcggttggcatgatgaggaaacagaggatttagtagaagcagtgcagaaggaaattggcaggattgaagagttgaaaaaatgcagattgctgagaattcagcagctgaccgtgttgagataccaacagatggtgctagtgaatgggaaattgatgtaaagcttctcaagtttgggaataaagtagcatcaggatcatatggtgacctttaccggggtacatattgcagtcaagatgttgctattaaagtgctgaaacctgagagaataaatgcagacatgcaacgagaatttgctcaggaagtatatattatgaggaaggtccgtcacaagaatgttgtgcaatttattggggcttgcactaaacccccaaacctatgtatagtcacagaatttatgtccggtggaagtgtgtatgattacctccataaacataaaggtgttttcaaacttcctgctttagttggagttgcaacggatgtgtcaaaaggcatgagctacttacaccagaataatattattcatcgtgatttgaaaactgcaaaccttctgatggatgaaaatgggactgttaaagttgctgattttggtgttgcacgtgttaaagctcaatctggagttatgactgcagaaactggtacttaccgttggatggccccagaggtcattgagcacaaaccctatgatcacaaggctgatgtttttagttttggaattttgatgtgggaactactcacagggaagattccttatgagtacctgactccactacaagccgctgttggtgtggtgcagaagggattacggcctacaattccaaagcatactcacgcaaagctttccgagcttcttcagaaatgctggcagcaggaccctacccaaagaccagacttctccgaaatattagaaactcttcagagaatagcagaggaggtcggagaggagcacgatgggaagcacaaggacagaacactgggtggtttcttttcggctttgagggggcggagccattgagacacagtcgaagacttttaataataaaaatgtacatggcctcggtccgtcctttgaaggacctgagctacaaccagtgcagtgcctgttcctcgcacgtcagcaccagtacacagaaatacagacctgctgtgcagctgcagttgactgaagcggcaatttttatttagctgcagccatcgctttccgcatatccgcttgttattcctgagttccattacgcaatgtataacataggtgaggaagcttgggaactgtatcatcagtctgatttccctgggagtgcaatcctgctgtagatgaaaaaaaaagccagattcaggccgtggcatgattcttttaagactccatcatttagcatcttttcgtttatggcagcgcggcgagcttgagtagctgaacaacagaacaaggcacctgcatctgcatgggttctgctcgcttgtgccaatttttgttccccagttgccgtgagaacaaactataatatcttatattcagaacaaatggagagaaaaaaaccatgtgtgtagtcttcatcgacagttcgacactgatgattcgaggagtagcactagaaagaggtagacttgtgatgccatacttgcatcatccacgatgcttttcttctcttttgctggatgaaagagcccagtaaacgagtgaagccatgtgggatcacagtttctttggttcgtttctgttg

SEQ ID NO: 22276 - DNA, 2345 bp, Zea Mays
cactttctagtttcctttctcctcctccagccctccttaaaaaatcggccacggttatttatttctctcgccccgctccgctttcctaatctgcgagctggggggagatcgagaccctagaacggagggcgggtgtgcggcgctgagggccttagacgaatggcggtggaggagaccgcggagagctgcggcagccacgccgcgaccgctgcgtccggcggcggcgcggcggggcccgcgacgtcctcgtcatcggccgccgcggcggcgcaggcgcggaagcagcaacagcagcagcgccataagctcgaggtgtacacggaggttcttcggcgcctccacgacgccggcctgcccgacgcgcgggcgcccgggttcgacgacgagctctggaatcacttcaaccgcctccctgcccgctacgccatggatgtgaacgtggagagggcggaggacgtgctcacgcacaagcggctcctggagcaggccaaggatccggctcatcgcccggctttcgcggtgcggtccgtgcaggggaggaagtcgcttcaagactgttgaacaggcagcaaagcatatatcctcctcctgccttcggttcttctacaaatcttgaggcccttgctcttgaagctagcaagtctcatgatcacgatagcacttctgataatggccgatctctatacaggcccatgcatgaaatcaccttttcaaccattgacaagccaaaacttctcagtgagctgacatctctgcttggtgagcttggtctaaacattcaagaagcacatgcattttcaacaaatgatggctactcacttgatgtcttcgttgttgtcggttggcatgatgaggaaacagaggatttagtagaagcagtgcagaaggaaattggcaggattgaagagacacaagcatggtcttcatctcattcatggtctactccagttgaaaaaatgcagattgctgagaattcagcagctgaccgtgttgagataccaacagatggtgctagtgaatgggaaattgatgtaaagcttctcaagtttgggaataaagtagcatcaggatcatatggtgacctttaccggggtacatattgcagtcaagatgttgctattaaagtgctgaaacctgagagaataaatgcagacatgcaacgagaatttgctcaggaagtatatattatgagactgttaaagttgctgattttggtgttgcacgtgttaaagctcaatctggagttatgactgcagaaactggtacttaccgttggatggccccagaggtcattgagcacaaaccctatgatcacaaggctgatgtttttagttttggaattttgatgtgggaactactcacagggaagattccttatgagtacctgactccactacaagccgctgttggtgtggtgcagaagggattacggcctacaattccaaagcatactcacgcaaagctttccgagcttcttcagaaatgctggcagcaggaccctacccaaagaccagacttctccgaaatattagaaactcttcagagaatagcagaggaggtcggagaggagcacgatgggaagcacaaggacagaacactgggtggtttcttttcggctttgagggggcggagccattgagacacagtcgaagacttttaataataaaaatgtacatggcctcggtccgtcctttgaaggacctgagctacaaccagtgcagtgcctgttcctcgcacgtcagcaccagtacacagaaatacagacctgctgtgcagctgcagttgactgaagcggcaatttttatttagctgcagccatcgctttccgcatatccgcttgttattcctgagttccattacgcaatgtataacataggtgaggaagcttgggaactgtatcatcagtctgatttccctgggagtgcaatcctgctgtagatgaaaaaaaaagccagattcaggccgtggcatgattcttttaagactccatcatttagcatcttttcgtttatggcagcgcggcgagcttgagtagctgaacaacagaacaaggcacctgcatctgcatgggttctgctcgcttgtgccaatttttgttccccagttgccgtgagaacaaactataatatcttatattcagaacaaatggagagaaaaaaaccatgtgtgtagtcttcatcgacagttcgacactgatgattcgaggagtagcactagaaagaggtagacttgtgatgccatacttgcatcatccacgatgcttttcttctcttttgctggatgaaagagcccagtaaacgagtgaagccatgtgggatcacagtttctttggttcgtttctgttg

SEQ ID NO: 22277 - DNA, 2573 bp, Zea Mays
cactttctagtttcctttctcctcctccagccctccttaaaaaatcggccacggttatttatttctctcgccccgctccgctttcctaatctgcgagctggggggagatcgagaccctagaacggagggcgggtgtgcggcgctgagggccttagacgaatggcggtggaggagaccgcggagagctgcggcagccacgccgcgaccgctgcgtccggcggcggcgcggcggggcccgcgacgtcctcgtcatcggccgccgcggcggcgcaggcgcggaagcagcaacagcagcagcgccataagctcgaggtgtacacggaggttcttcggcgcctccacgacgccggcctgcccgacgcgcgggcgcccgggttcgacgacgagctctggaatcacttcaaccgcctccctgcccgctacgccatggatgtgaacgtggagagggcggaggacgtgctcacgcacaagcggctcctggagcaggccaaggatccggctcatcgcccggctttcgcggtgcggtccgtgcaggtatctccaattcttgatgggaatcagactgattctgattcgaacactgcaggggaggaagtcgcttcaagactgttgaacaggcagcaaagcatatatcctcctcctgccttcggttcttctacaaatcttgaggcccttgctcttgaagctagcaagtctcatgatcacgatagcacttctgataatggccgatctctatacaggcccatgcatgaaatcaccttttcaaccattgacaagccaaaacttctcagtgagctgacatctctgcttggtgagcttggtctaaacattcaagaagcacatgcattttcaacaaatgatggctactcacttgatgtcttcgttgttgtcggttggcatgatgaggaaacagaggatttagtagaagcagtgcagaaggaaattggcaggattgaagagacacaagcatggtcttcatctcattcatggtctactccagttgaaaaaatgcagattgctgagaattcagcagctgaccgtgttgagataccaacagatggtgctagtgaatgggaaattgatgtaaagcttctcaagtttgggaataaagtagcatcaggatcatatggtgacctttaccggggtacatattgcagtcaagatgttgctattaaagtgctgaaacctgagagaataaatgcagacatgcaacgagaatttgctcaggaagtatatattatgagaatttatgtccggtggaagtgtgtatgattacctccataaacataaaggtgttttcaaacttcctgctttagttggagttgcaacggatgtgtcaaaaggcatgagctacttacaccagaataatattattcatcgtgatttgaaaactgcaaaccttctgatggatgaaaatgggactgttaaagttgctgattttggtgttgcacgtgttaaagctcaatctggagttatgactgcagaaactggtacttaccgttggatggccccagaggtcattgagcacaaaccctatgatcacaaggctgatgtttttagttttggaattttgatgtgggaactactcacagggaagattccttatgagtacctgactccactacaagccgctgttggtgtggtgcagaagggattacggcctacaattccaaagcatactcacgcaaagctttccgagcttcttcagaaatgctggcagcaggaccctacccaaagaccagacttctccgaaatattagaaactcttcagagaatagcagaggaggtcggagaggagcacgatgggaagcacaaggacagaacactgggtggtttcttttcggctttgagggggcggagccattgagacacagtcgaagacttttaataataaaaatgtacatggcctcggtccgtcctttgaaggacctgagctacaaccagtgcagtgcctgttcctcgcacgtcagcaccagtacacagaaatacagacctgctgtgcagctgcagttgactgaagcggcaatttttatttagctgcagccatcgctttccgcatatccgcttgttattcctgagttccattacgcaatgtataacataggtgaggaagcttgggaactgtatcatcagtctgatttccctgggagtgcaatcctgctgtagatgaaaaaaaaagccagattcaggccgtggcatgattcttttaagactccatcatttagcatcttttcgtttatggcagcgcggcgagcttgagtagctgaacaacagaacaaggcacctgcatctgcatgggttctgctcgcttgtgccaatttttgttccccagttgccgtgagaacaaactataatatcttatattcagaacaaatggagagaaaaaaaccatgtgtgtagtcttcatcgacagttcgacactgatgattcgaggagtagcactagaaagaggtagacttgtgatgccatacttgcatcatccacgatgcttttcttctcttttgctggatgaaagagcccagtaaacgagtgaagccatgtgggatcacagtttctttggttcgtttctgttg

SEQ ID NO: 22278 - DNA, 2591 bp, Zea Mays
cactttctagtttcctttctcctcctccagccctccttaaaaaatcggccacggttatttatttctctcgccccgctccgctttcctaatctgcgagctggggggagatcgagaccctagaacggagggcgggtgtgcggcgctgagggccttagacgaatggcggtggaggagaccgcggagagctgcggcagccacgccgcgaccgctgcgtccggcggcggcgcggcggggcccgcgacgtcctcgtcatcggccgccgcggcggcgcaggcgcggaagcagcaacagcagcagcgccataagctcgaggtgtacacggaggttcttcggcgcctccacgacgccggcctgcccgacgcgcgggcgcccgggttcgacgacgagctctggaatcacttcaaccgcctccctgcccgctacgccatggatgtgaacgtggagagggcggaggacgtgctcacgcacaagcggctcctggagcaggccaaggatccggctcatcgcccggctttcgcggtgcggtccgtgcaggggaggaagtcgcttcaagactgttgaacaggcagcaaagcatatatcctcctcctgccttcggttcttctacaaatcttgaggcccttgctcttgaagctagcaagtctcatgatcacgatagcacttctgataatggccgatctctatacaggcccatgcatgaaatcaccttttcaaccattgacaagccaaaacttctcagtgagctgacatctctgcttggtgagcttggtctaaacattcaagaagcacatgcattttcaacaaatgatggctactcacttgatgtcttcgttgttgtcggttggcatgatgaggaaacagaggatttagtagaagcagtgcagaaggaaattggcaggattgaagagacacaagcatggtcttcatctcattcatggtctactccagttgaaaaaatgcagattgctgagaattcagcagctgaccgtgttgagataccaacagatggtgctagtgaatgggaaattgatgtaaagcttctcaagtttgggaataaagtagcatcaggatcatatggtgacctttaccggggtacatattgcagtcaagatgttgctattaaagtgctgaaacctgagagaataaatgcagacatgcaacgagaatttgctcaggaagtatatattatgaggtccgtcacaagaatgttgtgcaatttattggggcttgcactaaacccccaaacctatgtatagtcacagaatttatgtccggtggaagtgtgtatgattacctccataaacataaaggtgttttcaaacttcctgctttagttggagttgcaacggatgtgtcaaaaggcatgagctacttacaccagaataatattattcatcgtgatttgaaaactgcaaaccttctgatggatgaaaatgggactgttaaagttgctgattttggtgttgcacgtgttaaagctcaatctggagttatgactgcagaaactggtacttaccgttggatggccccagaggtcattgagcacaaaccctatgatcacaaggctgatgtttttagttttggaattttgatgtgggaactactcacagggaagattccttatgagtacctgactccactacaagccgctgttggtgtggtgcagaagggattacggcctacaattccaaagcatactcacgcaaagctttccgagcttcttcagaaatgctggcagcaggaccctacccaaagaccagacttctccgaaatattagaaactcttcagagaatagcagaggaggtcggagaggagcacgatgggaagcacaaggacagaacactgggtggtttcttttcggctttgagggggcggagccattgagacacagtcgaagacttttaataataaaaatgtacatggcctcggtccgtcctttgaaggacctgagctacaaccagtgcagtgcctgttcctcgcacgtcagcaccagtacacagaaatacagacctgctgtgcagctgcagttgactgaagcggcaatttttatttagctgcagccatcgctttccgcatatccgcttgttattcctgagttccattacgcaatgtataacataggtgaggaagcttgggaactgtatcatcagtctgatttccctgggagtgcaatcctgctgtagatgaaaaaaaaagccagattcaggccgtggcatgattcttttaagactccatcatttagcatcttttcgtttatggcagcgcggcgagcttgagtagctgaacaacagaacaaggcacctgcatctgcatgggttctgctcgcttgtgccaatttttgttccccagttgccgtgagaacaaactataatatcttatattcagaacaaatggagagaaaaaaaccatgtgtgtagtcttcatcgacagttcgacactgatgattcgaggagtagcactagaaagaggtagacttgtgatgccatacttgcatcatccacgatgcttttcttctcttttgctggatgaaagagcccagtaaacgagtgaagccatgtgggatcacagtttctttggttcgtttctgttg

SEQ ID NO: 22279 - DNA, 975 bp, Zea Mays
attgtaatcaaataggtgttagcaaaaaagaaggtagggcctgaatcatttagaaataattgcttttgagtgaacctaaccggcttatctctgaaccacttcaaacaggacactgaaacagatatgagcagctaggccataaaagcagaacccaggatgattgcactatgtctcagcccaattcagcagctagtactgtagtacatatctcattgcccaaccactagtccactatctttgccttcaaagtggagtaagtgatggcccagcaaatcagatctgaatctcaagagctagcaaccaagacaccatcactacaatcacagccacaaactaaacatttccaagcactagcctgagaatcaagaagaaccaagcagcaaccatgatcaatcccaagaagctcgctcagttggcgaggaagtggcaaagggtaaaaatagccaccaaagacgacgacagatgctgcaccatttcaccaattgcaggcaggggccactgcaccgtgtacacagtggatgggagcaggttcgaggtcccattagcgtacctccgctcagtggtcttcagtgagcttttgaggatggctgcggaggagtttggtttcacaggtaatggcaggatcactctgccttgtgatgcagctgtggtggagtatatgatatgcttgctccagagaaatgcatcagaggaagttgagaaggcattcttgagctctgtagtgatgccttgtcagcaatcaagctatccaacgccaccggtggtgctgcatcagcaatttgcagtttgtagctcctattcgttggaggcgaggcgacaagctgcctgccgaggggccgtcacgctgccatcacaatcaacagacgccacagtcaccgggaagctacgagcgggacacggcggactcagcggcgctcgccgggcttccacggcgccgccgccggcagtgacgggtgacccacagactggtacgtg

SEQ ID NO: 22280 - DNA, 4220 bp, Zea Mays
cccaccccgcccccgcgatcctcctccgtctccgttccggccctccgcctccccgccccgtccgtcaaatgattcccaggccctttttccggtaaaaccaccgcaccgaaagggcagcagctcagacgcgcctcgatgcctcgtgctccataaccaacgcccacagcccagccattagccgtgctagtcatcagtaggcgcgcacactcgctcgctcgcagcgcttcgctcgttgccagttgccaccgccattttcccctcgtcggactgaaagagcgctcccccccacccccaccgcggcgggagtgggaaagagcggaggagcatgcgggagggttttcaccgcggcccgagaaaggaggacctgcgccgcgcgcatcgcgacgagccgctccccgctggcacgcacgccaaaaggcgaagaatctctcggctgagcccccccgtcccctccgccaccgccgttgtagccagtaggaggccggtcggtcgccatggggtgcggccagtccaagatggaggaagagtacgcggtgcgccactgccgggtgcgctccgagctcctcgcgctggccatccgccagcgctacacgctcgccgacgcgcaccacgcctacgccgagtcgctgcgcgccgtcggcgccctgctgcacgacttcctccgcggggtccagtcgctgccgccgccgccgcccgagcccgcgctccgcctcccgcagcagcggaagggcgacggcctccctgccgcgtcgccgccgcccgcgatggcgtcctcctccgccgccgccgccgcgccgcccgtcgccaagcaggtccgcatcgcccccgacgacgggcatatccagttctccgacggcgactccgattccgaggatgggcacatcaagttccactccgacgaagagcccgacccggctcgccgccgcccggaggtcgtccgctccaccggcgcgccgggtcctccgccaccgcagatgggacagccgtatgcctccggcggagggtatgctccgccgccgtatggtcctggatacggttacgggtacgccactgggcctggtccgggtcctggtcctgattatggcggtattggcatgaacggcggcggtggttatgaaccaggccatggtgtcatccagccacctccaccatctgtctcgcacgagcaacgcctggaggcgactaatgccagggtccactactattccggcaatggcgagcagcagccacccccgcgtggctatggtggtgggtactcctacccaccacagagttcaagatcatataatcagtatgcctatggtggttactatggaggtggttctgctcctgcaccaccagcagacatcccatcctcctccggtgagccagcagcagtgccaccgcctccatctccgcccagggtgtccacctgggagttcctggacccgtttggaacttatgagagctactacgagcaaccaactgctacagcagctccatactctcctggcaggagtttgaaggatgtgcgcgaggaggaggggattccagacttggaggacgaagacatggaggtagtcaaggaagcttatggtgatgagaagcaccctgtgaagggttacatggggaacgggaaggccgcaaagggagagggtaggagcagcacgggggatgaattgccccgcaagtccaagtcatctgaggccagtggtagtggtagcagcttggagcatgacgttcatgtagtggaaaaaagtgttgtcggagaacaagttcgacactcggagccacggcagcatgttgccggtctaccacccacaggatcggaaaagctatacattgatgacactgaggtggtggtggagatcaggactcaattcgagcgtgcctcacaatcagctggtgaggtatcaaagatgcttgaggtcggaaagatgccttactaccagaagggttcaggtttcaaagtatgaatgctaatttgacacaatcaatcatttagtctccgcaatgattgtttgtggtataccgacaatggaggaggagtttctgcgttttgaagaggacaaggcgatgggctctggcaacctctcctctacactacagaaattgtacatgtgggagaagaagcttcttgaggaagttaagacagaggagacaatgcgggtactgtatgacagaaaacgtgaggagctgaaaatgttagatgagaaaggtgccgaagctcataagcttgaggccactgaagtttacatcaggaagctatcaactaagattagcatagctatccaggttgtaaacactatttcagaaaagattagtaagttgagggatgaagagttgtggcctcaaacatgtgagctcattcaagggttgatgaggatgtggagcgttatgctagaatgccatcagatacaactgcatgccatatcccaagctaaaaacatagactccatgatagacactgcaaagttcggtgacgctcatatggacttgatcaagcggttagagcttcagctattggattggattgcttgttttgttgcatgggttagcgctcaaaagaattatgttaaaaccttaaaccggtggctgacaaatggtgttatctatgttcccgaggaaaccgaggacggggcgcctccattttctcctggaagattaggagggccaccgatcttcgtcatatgtaataactgggctgccagtgtggacaggatatctgagaaagaagtagttgaggcgatgcaggcctttgcatccaacgttctgaacctctgggagaggcacaggtcagagcaaagacagggtctgatggcgaacaaaggcatggacagggatcttagggtgatggaaagagatgagcagtcgatgcgcaaggccctggaagcgcagaacaagaagctcgtgctcgtttcgagtcagggcagcgtgtccttgtccgcgcaagcgttacatgagcagcgaggccctggcgctgaggttggcagtttgcaatcaggcctgagaaatatcttcgaagcgatggagaacttcacttctgcatccgcgaatacatacagggagctccatcttcgcgccgaagaagagaaagcccgagttgcgcaggagagcggcggcagtgttccctaactcctttcaacgcttaggttttacacgaggacatgagcgtctgtcaatgcaaagggaccgccaccagtgacccccctgcggcacagtgacactacaacccttgtggcagctgatgcaccttgctcgccaggtgccccaagtttcgggtttcgggtttcaggctctggtgtggagttaacaggttgcaacacgggttttgttttactaatctgtacatgagttgggctacgtgatgcattctttgatctggatggccagcagttctcctcaaaccggaactgtgaagcacggttatggaaataggtatatcaccaggcatgttctggtagttgtgagacccctggagcgactgagtgaagaagaggcaggcccttgtgcatctgggaagctgaattatgacctctagttggctgtgcaaccccagaagataattggaaggaagatgtaagccgcacgatcttggttcagatcaaagggtggggcatataagatcctgttgtcatgaaatccaagatccatggaacgctgctctccaccccatgtcactatgccagcgctcaaccgtacatacaagaggccaggctatcagaaggtgttccgtaatcgcagcactttggcatgtcattgtacatttgtacagagaggtgatgcgggatgaatcgagctggagcctcttgtccgctgccgagcgcccgagacatatgtttgcttagagtttcctctgctgcgtctggactctacttcgccgtgcaaccgagctggaagtactcttacagggtagacgacgccctgacccgttctgcagatcagctaaccgctccggccctcaacctttttttttgtttattatatatacatattattaattcatttgtagcaccccgtgtacagctgccggcgaacttaaacctgctgcgccatattttattcatttttttcaccacgggtttgccgtgcttgtgaattgctgaatgctctgagcccacctgttgtgatggtctgatggataggtgtaacggtggttagcagtacagcatcgcgatggtgagtttagttacgggctgatctcgccataccaattggataatttcaagcatcggaaaacg

SEQ ID NO: 22281 - DNA, 4177 bp, Zea Mays
cccaccccgcccccgcgatcctcctccgtctccgttccggccctccgcctccccgccccgtccgtcaaatgattcccaggccctttttccggtaaaaccaccgcaccgaaagggcagcagctcagacgcgcctcgatgcctcgtgctccataaccaacgcccacagcccagccattagccgtgctagtcatcagtaggcgcgcacactcgctcgctcgcagcgcttcgctcgttgccagttgccaccgccattttcccctcgtcggactgaaagagcgctcccccccacccccaccgcggcgggagtgggaaagagcggaggagcatgcgggagggttttcaccgcggcccgagaaaggaggacctgcgccgcgcgcatcgcgacgagccgctccccgctggcacgcacgccaaaaggcgaagaatctctcggctgagcccccccgtcccctccgccaccgccgttgtagccagtaggaggccggtcggtcgccatggggtgcggccagtccaagatggaggaagagtacgcggtgcgccactgccgggtgcgctccgagctcctcgcgctggccatccgccagcgctacacgctcgccgacgcgcaccacgcctacgccgagtcgctgcgcgccgtcggcgccctgctgcacgacttcctccgcggggtccagtcgctgccgccgccgccgcccgagcccgcgctccgcctcccgcagcagcggaagggcgacggcctccctgccgcgtcgccgccgcccgcgatggcgtcctcctccgccgccgccgccgcgccgcccgtcgccaagcaggtccgcatcgcccccgacgacgggcatatccagttctccgacggcgactccgattccgaggatgggcacatcaagttccactccgacgaagagcccgacccggctcgccgccgcccggaggtcgtccgctccaccggcgcgccgggtcctccgccaccgcagatgggacagccgtatgcctccggcggagggtatgctccgccgccgtatggtcctggatacggttacgggtacgccactgggcctggtccgggtcctggtcctgattatggcggtattggcatgaacggcggcggtggttatgaaccaggccatggtgtcatccagccacctccaccatctgtctcgcacgagcaacgcctggaggcgactaatgccagggtccactactattccggcaatggcgagcagcagccacccccgcgtggctatggtggtgggtactcctacccaccacagagttcaagatcatataatcagtatgcctatggtggttactatggaggtggttctgctcctgcaccaccagcagacatcccatcctcctccggtgagccagcagcagtgccaccgcctccatctccgcccagggtgtccacctgggagttcctggacccgtttggaacttatgagagctactacgagcaaccaactgctacagcagctccatactctcctggcaggagtttgaaggatgtgcgcgaggaggaggggattccagacttggaggacgaagacatggaggtagtcaaggaagcttatggtgatgagaagcaccctgtgaagggttacatggggaacgggaaggccgcaaagggagagggtaggagcagcacgggggatgaattgccccgcaagtccaagtcatctgaggccagtggtagtggtagcagcttggagcatgacgttcatgtagtggaaaaaagtgttgtcggagaacaagttcgacactcggagccacggcagcatgttgccggtctaccacccacaggatcggaaaagctatacattgatgacactgaggtggtggtggagatcaggactcaattcgagcgtgcctcacaatcagctggtgaggtatcaaagatgcttgagtatgaatgctaatttgacacaatcaatcatttagtctccgcaatgattgtttgtggtataccgacaatggaggaggagtttctgcgttttgaagaggacaaggcgatgggctctggcaacctctcctctacactacagaaattgtacatgtgggagaagaagcttcttgaggaagttaagacagaggagacaatgcgggtactgtatgacagaaaacgtgaggagctgaaaatgttagatgagaaaggtgccgaagctcataagcttgaggccactgaagtttacatcaggaagctatcaactaagattagcatagctatccaggttgtaaacactatttcagaaaagattagtaagttgagggatgaagagttgtggcctcaaacatgtgagctcattcaagggttgatgaggatgtggagcgttatgctagaatgccatcagatacaactgcatgccatatcccaagctaaaaacatagactccatgatagacactgcaaagttcggtgacgctcatatggacttgatcaagcggttagagcttcagctattggattggattgcttgttttgttgcatgggttagcgctcaaaagaattatgttaaaaccttaaaccggtggctgacaaatggtgttatctatgttcccgaggaaaccgaggacggggcgcctccattttctcctggaagattaggagggccaccgatcttcgtcatatgtaataactgggctgccagtgtggacaggatatctgagaaagaagtagttgaggcgatgcaggcctttgcatccaacgttctgaacctctgggagaggcacaggtcagagcaaagacagggtctgatggcgaacaaaggcatggacagggatcttagggtgatggaaagagatgagcagtcgatgcgcaaggccctggaagcgcagaacaagaagctcgtgctcgtttcgagtcagggcagcgtgtccttgtccgcgcaagcgttacatgagcagcgaggccctggcgctgaggttggcagtttgcaatcaggcctgagaaatatcttcgaagcgatggagaacttcacttctgcatccgcgaatacatacagggagctccatcttcgcgccgaagaagagaaagcccgagttgcgcaggagagcggcggcagtgttccctaactcctttcaacgcttaggttttacacgaggacatgagcgtctgtcaatgcaaagggaccgccaccagtgacccccctgcggcacagtgacactacaacccttgtggcagctgatgcaccttgctcgccaggtgccccaagtttcgggtttcgggtttcaggctctggtgtggagttaacaggttgcaacacgggttttgttttactaatctgtacatgagttgggctacgtgatgcattctttgatctggatggccagcagttctcctcaaaccggaactgtgaagcacggttatggaaataggtatatcaccaggcatgttctggtagttgtgagacccctggagcgactgagtgaagaagaggcaggcccttgtgcatctgggaagctgaattatgacctctagttggctgtgcaaccccagaagataattggaaggaagatgtaagccgcacgatcttggttcagatcaaagggtggggcatataagatcctgttgtcatgaaatccaagatccatggaacgctgctctccaccccatgtcactatgccagcgctcaaccgtacatacaagaggccaggctatcagaaggtgttccgtaatcgcagcactttggcatgtcattgtacatttgtacagagaggtgatgcgggatgaatcgagctggagcctcttgtccgctgccgagcgcccgagacatatgtttgcttagagtttcctctgctgcgtctggactctacttcgccgtgcaaccgagctggaagtactcttacagggtagacgacgccctgacccgttctgcagatcagctaaccgctccggccctcaacctttttttttgtttattatatatacatattattaattcatttgtagcaccccgtgtacagctgccggcgaacttaaacctgctgcgccatattttattcatttttttcaccacgggtttgccgtgcttgtgaattgctgaatgctctgagcccacctgttgtgatggtctgatggataggtgtaacggtggttagcagtacagcatcgcgatggtgagtttagttacgggctgatctcgccataccaattggataatttcaagcatcggaaaacg

SEQ ID NO: 22282 - DNA, 4186 bp, Zea Mays
cccaccccgcccccgcgatcctcctccgtctccgttccggccctccgcctccccgccccgtccgtcaaatgattcccaggccctttttccggtaaaaccaccgcaccgaaagggcagcagctcagacgcgcctcgatgcctcgtgctccataaccaacgcccacagcccagccattagccgtgctagtcatcagtaggcgcgcacactcgctcgctcgcagcgcttcgctcgttgccagttgccaccgccattttcccctcgtcggactgaaagagcgctcccccccacccccaccgcggcgggagtgggaaagagcggaggagcatgcgggagggttttcaccgcggcccgagaaaggaggacctgcgccgcgcgcatcgcgacgagccgctccccgctggcacgcacgccaaaaggcgaagaatctctcggctgagcccccccgtcccctccgccaccgccgttgtagccagtaggaggccggtcggtcgccatggggtgcggccagtccaagatggaggaagagtacgcggtgcgccactgccgggtgcgctccgagctcctcgcgctggccatccgccagcgctacacgctcgccgacgcgcaccacgcctacgccgagtcgctgcgcgccgtcggcgccctgctgcacgacttcctccgcggggtccagtcgctgccgccgccgccgcccgagcccgcgctccgcctcccgcagcagcggaagggcgacggcctccctgccgcgtcgccgccgcccgcgatggcgtcctcctccgccgccgccgccgcgccgcccgtcgccaagcaggtccgcatcgcccccgacgacgggcatatccagttctccgacggcgactccgattccgaggatgggcacatcaagttccactccgacgaagagcccgacccggctcgccgccgcccggaggtcgtccgctccaccggcgcgccgggtcctccgccaccgcagatgggacagccgtatgcctccggcggagggtatgctccgccgccgtatggtcctggatacggttacgggtacgccactgggcctggtccgggtcctggtcctgattatggcggtattggcatgaacggcggcggtggttatgaaccaggccatggtgtcatccagccacctccaccatctgtctcgcacgagcaacgcctggaggcgactaatgccagggtccactactattccggcaatggcgagcagcagccacccccgcgtggctatggtggtgggtactcctacccaccacagagttcaagatcatataatcagtatgcctatggtggttactatggaggtggttctgctcctgcaccaccagcagacatcccatcctcctccggtgagccagcagcagtgccaccgcctccatctccgcccagggtgtccacctgggagttcctggacccgtttggaacttatgagagctactacgagcaaccaactgctacagcagctccatactctcctggcaggagtttgaaggatgtgcgcgaggaggaggggattccagacttggaggacgaagacatggaggtagtcaaggaagcttatggtgatgagaagcaccctgtgaagggttacatggggaacgggaaggccgcaaagggagagggtaggagcagcacgggggatgaattgccccgcaagtccaagtcatctgaggccagtggtagtggtagcagcttggagcatgacgttcatgtagtggaaaaaagtgttgtcggagaacaagttcgacactcggagccacggcagcatgttgccggtctaccacccacaggatcggaaaagctatacattgatgacactgaggtggtggtggagatcaggactcaattcgagcgtgcctcacaatcagctggtgaggtatcaaagatgcttgaggtcggaaagatgccttactaccagaagggttcaggtttcaaagtctccgcaatgattgtttgtggtataccgacaatggaggaggagtttctgcgttttgaagaggacaaggcgatgggctctggcaacctctcctctacactacagaaattgtacatgtgggagaagaagcttcttgaggaagttaagacagaggagacaatgcgggtactgtatgacagaaaacgtgaggagctgaaaatgttagatgagaaaggtgccgaagctcataagcttgaggccactgaagtttacatcaggaagctatcaactaagattagcatagctatccaggttgtaaacactatttcagaaaagattagtaagttgagggatgaagagttgtggcctcaaacatgtgagctcattcaagggttgatgaggatgtggagcgttatgctagaatgccatcagatacaactgcatgccatatcccaagctaaaaacatagactccatgatagacactgcaaagttcggtgacgctcatatggacttgatcaagcggttagagcttcagctattggattggattgcttgttttgttgcatgggttagcgctcaaaagaattatgttaaaaccttaaaccggtggctgacaaatggtgttatctatgttcccgaggaaaccgaggacggggcgcctccattttctcctggaagattaggagggccaccgatcttcgtcatatgtaataactgggctgccagtgtggacaggatatctgagaaagaagtagttgaggcgatgcaggcctttgcatccaacgttctgaacctctgggagaggcacaggtcagagcaaagacagggtctgatggcgaacaaaggcatggacagggatcttagggtgatggaaagagatgagcagtcgatgcgcaaggccctggaagcgcagaacaagaagctcgtgctcgtttcgagtcagggcagcgtgtccttgtccgcgcaagcgttacatgagcagcgaggccctggcgctgaggttggcagtttgcaatcaggcctgagaaatatcttcgaagcgatggagaacttcacttctgcatccgcgaatacatacagggagctccatcttcgcgccgaagaagagaaagcccgagttgcgcaggagagcggcggcagtgttccctaactcctttcaacgcttaggttttacacgaggacatgagcgtctgtcaatgcaaagggaccgccaccagtgacccccctgcggcacagtgacactacaacccttgtggcagctgatgcaccttgctcgccaggtgccccaagtttcgggtttcgggtttcaggctctggtgtggagttaacaggttgcaacacgggttttgttttactaatctgtacatgagttgggctacgtgatgcattctttgatctggatggccagcagttctcctcaaaccggaactgtgaagcacggttatggaaataggtatatcaccaggcatgttctggtagttgtgagacccctggagcgactgagtgaagaagaggcaggcccttgtgcatctgggaagctgaattatgacctctagttggctgtgcaaccccagaagataattggaaggaagatgtaagccgcacgatcttggttcagatcaaagggtggggcatataagatcctgttgtcatgaaatccaagatccatggaacgctgctctccaccccatgtcactatgccagcgctcaaccgtacatacaagaggccaggctatcagaaggtgttccgtaatcgcagcactttggcatgtcattgtacatttgtacagagaggtgatgcgggatgaatcgagctggagcctcttgtccgctgccgagcgcccgagacatatgtttgcttagagtttcctctgctgcgtctggactctacttcgccgtgcaaccgagctggaagtactcttacagggtagacgacgccctgacccgttctgcagatcagctaaccgctccggccctcaacctttttttttgtttattatatatacatattattaattcatttgtagcaccccgtgtacagctgccggcgaacttaaacctgctgcgccatattttattcatttttttcaccacgggtttgccgtgcttgtgaattgctgaatgctctgagcccacctgttgtgatggtctgatggataggtgtaacggtggttagcagtacagcatcgcgatggtgagtttagttacgggctgatctcgccataccaattggataatttcaagcatcggaaaacg

SEQ ID NO: 22283 - DNA, 3650 bp, Zea Mays
cgccgttgtagccagtaggaggtagctaccccagatctgctcgtctccgcgcccgcccgccagattcgccccaccctccgccatgcggttgccgccgccgccgctctgactgggctctcttctgctgtgagagggaggaataaaaagcggttttctttcgggcggcaggccggtcggtcgccatggggtgcggccagtccaagatggaggaagagtacgcggtgcgccactgccgggtgcgctccgagctcctcgcgctggccatccgccagcgctacacgctcgccgacgcgcaccacgcctacgccgagtcgctgcgcgccgtcggcgccctgctgcacgacttcctccgcggggtccagtcgctgccgccgccgccgcccgagcccgcgctccgcctcccgcagcagcggaagggcgacggcctccctgccgcgtcgccgccgcccgcgatggcgtcctcctccgccgccgccgccgcgccgcccgtcgccaagcaggtccgcatcgcccccgacgacgggcatatccagttctccgacggcgactccgattccgaggatgggcacatcaagttccactccgacgaagagcccgacccggctcgccgccgcccggaggtcgtccgctccaccggcgcgccgggtcctccgccaccgcagatgggacagccgtatgcctccggcggagggtatgctccgccgccgtatggtcctggatacggttacgggtacgccactgggcctggtccgggtcctggtcctgattatggcggtattggcatgaacggcggcggtggttatgaaccaggccatggtgtcatccagccacctccaccatctgtctcgcacgagcaacgcctggaggcgactaatgccagggtccactactattccggcaatggcgagcagcagccacccccgcgtggctatggtggtgggtactcctacccaccacagagttcaagatcatataatcagtatgcctatggtggttactatggaggtggttctgctcctgcaccaccagcagacatcccatcctcctccggtgagccagcagcagtgccaccgcctccatctccgcccagggtgtccacctgggagttcctggacccgtttggaacttatgagagctactacgagcaaccaactgctacagcagctccatactctcctggcaggagtttgaaggatgtgcgcgaggaggaggggattccagacttggaggacgaagacatggaggtagtcaaggaagcttatggtgatgagaagcaccctgtgaagggttacatggggaacgggaaggccgcaaagggagagggtaggagcagcacgggggatgaattgccccgcaagtccaagtcatctgaggccagtggtagtggtagcagcttggagcatgacgttcatgtagtggaaaaaagtgttgtcggagaacaagttcgacactcggagccacggcagcatgttgccggtctaccacccacaggatcggaaaagctatacattgatgacactgaggtggtggtggagatcaggactcaattcgagcgtgcctcacaatcagctggtgaggtatcaaagatgcttgaggtcggaaagatgccttactaccagaagggttcaggtttcaaagtctccgcaatgattgtttgtggtataccgacaatggaggaggagtttctgcgttttgaagaggacaaggcgatgggctctggcaacctctcctctacactacagaaattgtacatgtgggagaagaagcttcttgaggaagttaaggttgatgaggatgtggagcgttatgctagaatgccatcagatacaactgcatgccatatcccaagctaaaaacatagactccatgatagacactgcaaagttcggtgacgctcatatggacttgatcaagcggttagagcttcagctattggattggattgcttgttttgttgcatgggttagcgctcaaaagaattatgttaaaaccttaaaccggtggctgacaaatggtgttatctatgttcccgaggaaaccgaggacggggcgcctccattttctcctggaagattaggagggccaccgatcttcgtcatatgtaataactgggctgccagtgtggacaggatatctgagaaagaagtagttgaggcgatgcaggcctttgcatccaacgttctgaacctctgggagaggcacaggtcagagcaaagacagggtctgatggcgaacaaaggcatggacagggatcttagggtgatggaaagagatgagcagtcgatgcgcaaggccctggaagcgcagaacaagaagctcgtgctcgtttcgagtcagggcagcgtgtccttgtccgcgcaagcgttacatgagcagcgaggccctggcgctgaggttggcagtttgcaatcaggcctgagaaatatcttcgaagcgatggagaacttcacttctgcatccgcgaatacatacagggagctccatcttcgcgccgaagaagagaaagcccgagttgcgcaggagagcggcggcagtgttccctaactcctttcaacgcttaggttttacacgaggacatgagcgtctgtcaatgcaaagggaccgccaccagtgacccccctgcggcacagtgacactacaacccttgtggcagctgatgcaccttgctcgccaggtgccccaagtttcgggtttcgggtttcaggctctggtgtggagttaacaggttgcaacacgggttttgttttactaatctgtacatgagttgggctacgtgatgcattctttgatctggatggccagcagttctcctcaaaccggaactgtgaagcacggttatggaaataggtatatcaccaggcatgttctggtagttgtgagacccctggagcgactgagtgaagaagaggcaggcccttgtgcatctgggaagctgaattatgacctctagttggctgtgcaaccccagaagataattggaaggaagatgtaagccgcacgatcttggttcagatcaaagggtggggcatataagatcctgttgtcatgaaatccaagatccatggaacgctgctctccaccccatgtcactatgccagcgctcaaccgtacatacaagaggccaggctatcagaaggtgttccgtaatcgcagcactttggcatgtcattgtacatttgtacagagaggtgatgcgggatgaatcgagctggagcctcttgtccgctgccgagcgcccgagacatatgtttgcttagagtttcctctgctgcgtctggactctacttcgccgtgcaaccgagctggaagtactcttacagggtagacgacgccctgacccgttctgcagatcagctaaccgctccggccctcaacctttttttttgtttattatatatacatattattaattcatttgtagcaccccgtgtacagctgccggcgaacttaaacctgctgcgccatattttattcatttttttcaccacgggtttgccgtgcttgtgaattgctgaatgctctgagcccacctgttgtgatggtctgatggataggtgtaacggtggttagcagtacagcatcgcgatggtgagtttagttacgggctgatctcgccataccaattggataatttcaagcatcggaaaacg

SEQ ID NO: 22284 - DNA, 3569 bp, Zea Mays
catcgagccatttccgggggtgagttgaggtgagcagaaccgagctacctggtggaggctggcacctagctaatccacaggaggaagagaggagaacgggagcctttttgatgacaagaacggaggcgtcaggcgtgtgattaacaagcaggttctgaagagagtgttacctgcatctgcatggaagagggaggagacccgcagcttccgagcatctccgtggcacgcaccacgtccgaaggcgcgggggccgtcgacttggatctccttgagcagctactgtccggcgacaacggttggctcgaggtggtctcgcgctcgcccaactcggtagcgtttcctccaccctcggccttcttctcggctgacgcgacggccaccacagtgacgacgacggcggcgccggccgcgaacgccagctggttgattcagacgggcggcgcgagcaccccctccgtgcgggagcggttcagccaggccctgtcctacatccgtgatacgcagagcgacggcgacgtcctcgtgcagctctgggtgccggtcaaccgcgatgacgggaagctggtgctgaccaccagcggtcagccgttcacgctcgaccaccgctccgacagcctcatccggttcagggaggtgtccaccaagtaccagttcccagccgacgttaggtcaggggagtcaccagggttgccagggagggtcttcatcggcaggctccctgagtggtcgccggacatcaggtgcttcaccagctacgagtacgccagggtgacagatgcaaagtacctcgatgtccacggcaccatggggctgccagtgttcgagaaaagaagttacagttgcctgggcgttatcgagctgatcatgacaaagcagaagctcaacttcacctctgagctcaacaccatctgcagtgctctacaggcagttaatctcagaagtacagaagtttcgagcattccacgcaaaaagtttagcactgcttcctacaaagatgctttaccagagatactggaggtcctgagggcagcctgcttgacccacaagctgccattagctcagacatgggtcacatgtactcaacaagggaaacgaggcagccgacattctgacgagaactacaggtactgcatttccaccatcgacgaagcatgctttgtgaatgaagccgagatgcggggcttccatgaggcctgctccgaacaccatctgctgcgtggcgagggggtggcagggaaggccctcacgacaaaccagccatgcttcctgccggacattggatcctcaactaaattggaataccccttgtctcaccatgctaagatcttcaggttaaaaggtgcagtggcgatccgactgcggtgcacacgcactgggatagcagacttcgtgctggaattctttcttccaacagattgtgaagcactggaggagcagaagacagtgctggactccttgtcaggcaccatgcgaagtgtttgccagaccctacgtgtggtcacagatagagagatggaaggcgaagcggcgctggaaatgaacgagctgaactcttttactcctcctgagaaggacaaagatgagttgtcctttggaggcaattcagcagatcgtagaggggcctcttggacaagtctggcaggaacttcacagcaagaacccgagttagctgcattgcggatgcatggaacgttctcacctgtggggcagggtccatctctatctggtgttcaggcaactgctgaaggcagtaagacaaaaaggcgcacaaaggccgagaagaccgttagtttgcaggttcttcggcagtacttcgctggtagcctcaaagatgcagcgagaagccttggagtgtgtcccacgaccctcaaaagaatatgcaggcaacatggtataacccgctggccatcacgaaagatcaagaaggtagaccactctctaagaaagctccaacagatcattgattcggttcatggtgcagagacagctttccagctaaacaccctgtacaaggatctcacagacacctcaatatcatctgacaacaatttgtcaggaagtgtcacggttcctccaactaaccagagcaatctcaccgacttcaacaagcaccaaccccacaagtcaagtagcaatatgccatcaacttcacactcacactcctcatgcagccacggttctcagtcaagcccctcgtgtagcgttggtgcaacagaacatgcacaacagggtataattgatctgatgaagtcagaaaatcctgtgaaagacagctctattcagactatgcaaacagaaaacacttcattatatgagcatttctcagttcatgaggctccaattgatcttctacaggatgttactgaaaaggctaatggtgcacatcattcttctcgaagcctgtcatcccccaaccccaagcagaacacagatgcaaatatgagagtaaaggcaacatttggctcagaaaaggtgagattccgactaaacccagagtgcaattttcaaggactgaagcatgagctagcgaaacgtttgagtatagtagacacaaaccccttggttttaaagtacttggatgatgattcagaatgggtcttgatgacatgtgatgcagatctgcaggagtgccttcatgtatacaaactagcagatatccaaacaatcaaaatttcagttcatttagctgttagtccagctacaagggtcacagctggtcacactggtttgtcatgacaacagtatgagcctcaccactttgtgaggtttaatcaaattcaaccaggatcacatggttttgtgcaggggaaaccaaagattccaggagtccagggttggtagctgtgcaatactgcaatgtactatgtaccaccacgtcccagttctactgttagatcaattagtcttgtttctgatgctcaggttaggaactaatgatcaaacaagaatacttgacaatgagagagtcaagaaatcaggataaacagaagtaagcatgcattgcttgtaaatacttattgatgaacctgaatctctgaatgacaatgcaattgattgaattaatagggtgacgtatctacaaatcagatttgctccaactccaagtatgttttgtttctttgagtgctgatgtgcaacaatcattgatggcttctttctgataattgatcagctacaattgtcccttaagatcacagcattccttcatcgcctgagcgatcagcatgctctgttcaatgcacatgaaattctgcttctgaaattgtaattttctgcagcaaggattagatctagaataggatgataggatacttagtttgttcaatatgtttgtccattgcaaaaaaaaataaaaaatgaatggtacactgaattatgggcctctttgaaagaacgtctgctgctgtagacattatagattgttttcctttaagaagcttccatttgtgaaccgtttggtatgtcaattgccaagtatcaatatagagattagattatgccactattataataaccagaatatggaagcacagatgtgactggtgtcaacatatttaattaaagttaac

SEQ ID NO: 22285 - DNA, 1809 bp, Zea Mays
gttgaggtgagcagaaccgagctacctggtggaggctggcacctagctaatccacaggaggaagagaggagaacgggagcctttttgatgacaagaacggaggcgtcaggcgtgtgattaacagcaacatggtataacccgctggccatcacgaaagatcaagaaggtagaccactctctaagaaagctccaacagatcattgattcggttcatggtgcagagacagctttccagctaaacaccctgtacaaggatctcacagacacctcaatatcatctgacaacaatttgtcaggaagtgtcacggttcctccaactaaccagagcaatctcaccgacttcaacaagcaccaaccccacaagtcaagtagcaatatgccatcaacttcacactcacactcctcatgcagccacggttctcagtcaagcccctcgtgtagcgttggtgcaacagaacatgcacaacagggtataattgatctgatgaagtcagaaaatcctgtgaaagacagctctattcagactatgcaaacagaaaacacttcattatatgagcatttctcagttcatgaggctccaattgatcttctacaggatgttactgaaaaggctaatggtgcacatcattcttctcgaagcctgtcatcccccaaccccaagcagaacacagatgcaaatatgagagtaaaggcaacatttggctcagaaaaggtgagattccgactaaacccagagtgcaattttcaaggactgaagcatgagctagcgaaacgtttgagtatagtagacacaaaccccttggttttaaagtacttggatgatgattcagaatgggtcttgatgacatgtgatgcagatctgcaggagtgccttcatgtatacaaactagcagatatccaaacaatcaaaatttcagttcatttagctgttagtccagctacaagggtcacagctggtcacactggtttgtcatgacaacagtatgagcctcaccactttgtgaggtttaatcaaattcaaccaggatcacatggttttgtgcaggggaaaccaaagattccaggagtccagggttggtagctgtgcaatactgcaatgtactatgtaccaccacgtcccagttctactgttagatcaattagtcttgtttctgatgctcaggttaggaactaatgatcaaacaagaatacttgacaatgagagagtcaagaaatcaggataaacagaagtaagcatgcattgcttgtaaatacttattgatgaacctgaatctctgaatgacaatgcaattgattgaattaatagggtgacgtatctacaaatcagatttgctccaactccaagtatgttttgtttctttgagtgctgatgtgcaacaatcattgatggcttctttctgataattgatcagctacaattgtcccttaagatcacagcattccttcatcgcctgagcgatcagcatgctctgttcaatgcacatgaaattctgcttctgaaattgtaattttctgcagcaaggattagatctagaataggatgataggatacttagtttgttcaatatgtttgtccattgcaaaaaaaaataaaaaatgaatggtacactgaattatgggcctctttgaaagaacgtctgctgctgtagacattatagattgttttcctttaagaagcttccatttgtgaaccgtttggtatgtcaattgccaagtatcaatatagagattagattatgccactattataataaccagaatatggaagcacagatgtgactggtgtcaacatatttaattaaagttaac

SEQ ID NO: 22286 - DNA, 3491 bp, Zea Mays
ctaatccacaggaggaagagaggagaacgggagcctttttgatgacaagaacggaggcgtcaggcgtgtgattaacagttctgaagagagtgttacctgcatctgcatggaagagggaggagacccgcagcttccgagcatctccgtggcacgcaccacgtccgaaggcgcgggggccgtcgacttggatctccttgagcagctactgtccggcgacaacggttggctcgaggtggtctcgcgctcgcccaactcggtagcgtttcctccaccctcggccttcttctcggctgacgcgacggccaccacagtgacgacgacggcggcgccggccgcgaacgccagctggttgattcagacgggcggcgcgagcaccccctccgtgcgggagcggttcagccaggccctgtcctacatccgtgatacgcagagcgacggcgacgtcctcgtgcagctctgggtgccggtcaaccgcgatgacgggaagctggtgctgaccaccagcggtcagccgttcacgctcgaccaccgctccgacagcctcatccggttcagggaggtgtccaccaagtaccagttcccagccgacgttaggtcaggggagtcaccagggttgccagggagggtcttcatcggcaggctccctgagtggtcgccggacatcaggtgcttcaccagctacgagtacgccagggtgacagatgcaaagtacctcgatgtccacggcaccatggggctgccagtgttcgagaaaagaagttacagttgcctgggcgttatcgagctgatcatgacaaagcagaagctcaacttcacctctgagctcaacaccatctgcagtgctctacagttaatctcagaagtacagaagtttcgagcattccacgcaaaaagtttagcactgcttcctacaaagatgctttaccagagatactggaggtcctgagggcagcctgcttgacccacaagctgccattagctcagacatgggtcacatgtactcaacaagggaaacgaggcagccgacattctgacgagaactacaggtactgcatttccaccatcgacgaagcatgctttgtgaatgaagccgagatgcggggcttccatgaggcctgctccgaacaccatctgctgcgtggcgagggggtggcagggaaggccctcacgacaaaccagccatgcttcctgccggacattggatcctcaactaaattggaataccccttgtctcaccatgctaagatcttcaggttaaaaggtgcagtggcgatccgactgcggtgcacacgcactgggatagcagacttcgtgctggaattctttcttccaacagattgtgaagcactggaggagcagaagacagtgctggactccttgtcaggcaccatgcgaagtgtttgccagaccctacgtgtggtcacagatagagagatggaaggcgaagcggcgctggaaatgaacgagctgaactcttttactcctcctgagaaggacaaagatgagttgtcctttggaggcaattcagcagatcgtagaggggcctcttggacaagtctggcaggaacttcacagcaagaacccgagttagctgcattgcggatgcatggaacgttctcacctgtggggcagggtccatctctatctggtgttcaggcaactgctgaaggcagtaagacaaaaaggcgcacaaaggccgagaagaccgttagtttgcaggttcttcggcagtacttcgctggtagcctcaaagatgcagcgagaagccttggagtgtgtcccacgaccctcaaaagaatatgcaggcaacatggtataacccgctggccatcacgaaagatcaagaaggtagaccactctctaagaaagctccaacagatcattgattcggttcatggtgcagagacagctttccagctaaacaccctgtacaaggatctcacagacacctcaatatcatctgacaacaatttgtcaggaagtgtcacggttcctccaactaaccagagcaatctcaccgacttcaacaagcaccaaccccacaagtcaagtagcaatatgccatcaacttcacactcacactcctcatgcagccacggttctcagtcaagcccctcgtgtagcgttggtgcaacagaacatgcacaacagggtataattgatctgatgaagtcagaaaatcctgtgaaagacagctctattcagactatgcaaacagaaaacacttcattatatgagcatttctcagttcatgaggctccaattgatcttctacaggatgttactgaaaaggctaatggtgcacatcattcttctcgaagcctgtcatcccccaaccccaagcagaacacagatgcaaatatgagagtaaaggcaacatttggctcagaaaaggtgagattccgactaaacccagagtgcaattttcaaggactgaagcatgagctagcgaaacgtttgagtatagtagacacaaaccccttggttttaaagtacttggatgatgattcagaatgggtcttgatgacatgtgatgcagatctgcaggagtgccttcatgtatacaaactagcagatatccaaacaatcaaaatttcagttcatttagctgttagtccagctacaagggtcacagctggtcacactggtttgtcatgacaacagtatgagcctcaccactttgtgaggtttaatcaaattcaaccaggatcacatggttttgtgcaggggaaaccaaagattccaggagtccagggttggtagctgtgcaatactgcaatgtactatgtaccaccacgtcccagttctactgttagatcaattagtcttgtttctgatgctcaggttaggaactaatgatcaaacaagaatacttgacaatgagagagtcaagaaatcaggataaacagaagtaagcatgcattgcttgtaaatacttattgatgaacctgaatctctgaatgacaatgcaattgattgaattaatagggtgacgtatctacaaatcagatttgctccaactccaagtatgttttgtttctttgagtgctgatgtgcaacaatcattgatggcttctttctgataattgatcagctacaattgtcccttaagatcacagcattccttcatcgcctgagcgatcagcatgctctgttcaatgcacatgaaattctgcttctgaaattgtaattttctgcagcaaggattagatctagaataggatgataggatacttagtttgttcaatatgtttgtccattgcaaaaaaaaataaaaaatgaatggtacactgaattatgggcctctttgaaagaacgtctgctgctgtagacattatagattgttttcctttaagaagcttccatttgtgaaccgtttggtatgtcaattgccaagtatcaatatagagattagattatgccactattataataaccagaatatggaagcacagatgtgactggtgtcaacatatttaattaaagttaac

SEQ ID NO: 22287 - DNA, 3842 bp, Zea Mays
atcaatctctttcgctgcttgctttccattgaaaatgatgtgttctcccacaccctgcaacctgaaggcaacatgcctagcacaaaattctcccaaggattcccatggtttcctagcccaagatgtgcatggagccttgcttcttgatctccagcagaacagaagtgaagcactgtggccttgcatgcccaagttttgttgttagcgttaccaagatcatagctaccactgatgcagtgcgttcgcgatgaactgtgtagagcaggttctgaagagagtgttacctgcatctgcatggaagagggaggagacccgcagcttccgagcatctccgtggcacgcaccacgtccgaaggcgcgggggccgtcgacttggatctccttgagcagctactgtccggcgacaacggttggctcgaggtggtctcgcgctcgcccaactcggtagcgtttcctccaccctcggccttcttctcggctgacgcgacggccaccacagtgacgacgacggcggcgccggccgcgaacgccagctggttgattcagacgggcggcgcgagcaccccctccgtgcgggagcggttcagccaggccctgtcctacatccgtgatacgcagagcgacggcgacgtcctcgtgcagctctgggtgccggtcaaccgcgatgacgggaagctggtgctgaccaccagcggtcagccgttcacgctcgaccaccgctccgacagcctcatccggttcagggaggtgtccaccaagtaccagttcccagccgacgttaggtcaggggagtcaccagggttgccagggagggtcttcatcggcaggctccctgagtggtcgccggacatcaggtgcttcaccagctacgagtacgccagggtgacagatgcaaagtacctcgatgtccacggcaccatggggctgccagtgttcgagaaaagaagttacagttgcctgggcgttatcgagctgatcatgacaaagcagaagctcaacttcacctctgagctcaacaccatctgcagtgctctacaggcagttaatctcagaagtacagaagtttcgagcattccacgcaaaaaggtgagcagaaaataaattatacactcgttgtatcgcagctttgaaaaatttggcaaatatctcatttttacaaagataagaatcgcaggacctctatattccaatttaatgtaggcatgtatgaaaatctactttaaattgcatgtttgtgaaaaaaaaactttggacgtttcaatttacctaccctagctcaaatataaagcaagtgtataagatattgagacatgaaacggcgatgcttatatatgctcacatgacttcatggccactcttattgattgtccaccagtttagcactgcttcctacaaagatgctttaccagagatactggaggtcctgagggcagcctgcttgacccacaagctgccattagctcagacatgggtcacatgtactcaacaagggaaacgaggcagccgacattctgacgagaactacaggtactgcatttccaccatcgacgaagcatgctttgtgaatgaagccgagatgcggggcttccatgaggcctgctccgaacaccatctgctgcgtggcgagggggtggcagggaaggccctcacgacaaaccagccatgcttcctgccggacattggatcctcaactaaattggaataccccttgtctcaccatgctaagatcttcaggttaaaaggtgcagtggcgatccgactgcggtgcacacgcactgggatagcagacttcgtgctggaattctttcttccaacagattgtgaagcactggaggagcagaagacagtgctggactccttgtcaggcaccatgcgaagtgtttgccagaccctacgtgtggtcacagatagagagatggaaggcgaagcggcgctggaaatgaacgagctgaactcttttactcctcctgagaaggacaaagatgagttgtcctttggaggcaattcagcagatcgtagaggggcctcttggacaagtctggcaggaacttcacagcaagaacccgagttagctgcattgcggatgcatggaacgttctcacctgtggggcagggtccatctctatctggtgttcaggcaactgctgaaggcagtaagacaaaaaggcgcacaaaggccgagaagaccgttagtttgcaggttcttcggcagtacttcgctggtagcctcaaagatgcagcgagaagccttggagtgtgtcccacgaccctcaaaagaatatgcaggcaacatggtataacccgctggccatcacgaaagatcaagaaggaagtgtcacggttcctccaactaaccagagcaatctcaccgacttcaacaagcaccaaccccacaagtcaagtagcaatatgccatcaacttcacactcacactcctcatgcagccacggttctcagtcaagcccctcgtgtagcgttggtgcaacagaacatgcacaacagggtataattgatctgatgaagtcagaaaatcctgtgaaagacagctctattcagactatgcaaacagaaaacacttcattatatgagcatttctcagttcatgaggctccaattgatcttctacaggatgttactgaaaaggctaatggtgcacatcattcttctcgaagcctgtcatcccccaaccccaagcagaacacagatgcaaatatgagagtaaaggcaacatttggctcagaaaaggtgagattccgactaaacccagagtgcaattttcaaggactgaagcatgagctagcgaaacgtttgagtatagtagacacaaaccccttggttttaaagtacttggatgatgattcagaatgggtcttgatgacatgtgatgcagatctgcaggagtgccttcatgtatacaaactagcagatatccaaacaatcaaaatttcagttcatttagctgttagtccagctacaagggtcacagctggtcacactggtttgtcatgacaacagtatgagcctcaccactttgtgaggtttaatcaaattcaaccaggatcacatggttttgtgcaggggaaaccaaagattccaggagtccagggttggtagctgtgcaatactgcaatgtactatgtaccaccacgtcccagttctactgttagatcaattagtcttgtttctgatgctcaggttaggaactaatgatcaaacaagaatacttgacaatgagagagtcaagaaatcaggataaacagaagtaagcatgcattgcttgtaaatacttattgatgaacctgaatctctgaatgacaatgcaattgattgaattaatagggtgacgtatctacaaatcagatttgctccaactccaagtatgttttgtttctttgagtgctgatgtgcaacaatcattgatggcttctttctgataattgatcagctacaattgtcccttaagatcacagcattccttcatcgcctgagcgatcagcatgctctgttcaatgcacatgaaattctgcttctgaaattgtaattttctgcagcaaggattagatctagaataggatgataggatacttagtttgttcaatatgtttgtccattgcaaaaaaaaataaaaaatgaatggtacactgaattatgggcctctttgaaagaacgtctgctgctgtagacattatagattgttttcctttaagaagcttccatttgtgaaccgtttggtatgtcaattgccaagtatcaatatagagattagattatgccactattataataaccagaatatggaagcacagatgtgactggtgtcaacatatttaattaaagttaac

SEQ ID NO: 22288 - DNA, 3476 bp, Zea Mays
atcaatctctttcgctgcttgctttccattgaaaatgatgtgttctcccacaccctgcaacctgaaggcaacatgcctagcacaaaattctcccaaggattcccatggtttcctagcccaagatgtgcatggagccttgcttcttgatctccagcagaacagaagtgaagcactgtggccttgcatgcccaagttttgttgttagcgttaccaagatcatagctaccactgatgcagtgcgttcgcgatgaactgtgtagagcaggttctgaagagagtgttacctgcatctgcatggaagagggaggagacccgcagcttccgagcatctccgtggcacgcaccacgtccgaaggcgcgggggccgtcgacttggatctccttgagcagctactgtccggcgacaacggttggctcgaggtggtctcgcgctcgcccaactcggtagcgtttcctccaccctcggccttcttctcggctgacgcgacggccaccacagtgacgacgacggcggcgccggccgcgaacgccagctggttgattcagacgggcggcgcgagcaccccctccgtgcgggagcggttcagccaggccctgtcctacatccgtgatacgcagagcgacggcgacgtcctcgtgcagctctgggtgccggtcaaccgcgatgacgggaagctggtgctgaccaccagcggtcagccgttcacgctcgaccaccgctccgacagcctcatccggttcagggaggtgtccaccaagtaccagttcccagccgacgttaggtcaggggagtcaccagggttgccagggagggtcttcatcggcaggctccctgagtggtcgccggacatcaggtgcttcaccagctacgagtacgccagggtgacagatgcaaagtacctcgatgtccacggcaccatggggctgccagtgttcgagaaaagaagttacagttgcctgggcgttatcgagctgatcatgacaaagcagaagctcaacttcacctctgagctcaacaccatctgcagtgctctacaggcagttaatctcagaagtacagaagtttcgagcattccacgcaaaaagtttagcactgcttcctacaaagatgctttaccagagatactggaggtcctgagggcagcctgcttgacccacaagctgccattagctcagacatgggtcacatgtactcaacaagggaaacgaggcagccgacattctgacgagaactacaggttaaaaggtgcagtggcgatccgactgcggtgcacacgcactgggatagcagacttcgtgctggaattctttcttccaacagattgtgaagcactggaggagcagaagacagtgctggactccttgtcaggcaccatgcgaagtgtttgccagaccctacgtgtggtcacagatagagagatggaaggcgaagcggcgctggaaatgaacgagctgaactcttttactcctcctgagaaggacaaagatgagttgtcctttggaggcaattcagcagatcgtagaggggcctcttggacaagtctggcaggaacttcacagcaagaacccgagttagctgcattgcggatgcatggaacgttctcacctgtggggcagggtccatctctatctggtgttcaggcaactgctgaaggcagtaagacaaaaaggcgcacaaaggccgagaagaccgttagtttgcaggttcttcggcagtacttcgctggtagcctcaaagatgcagcgagaagccttggagtgtgtcccacgaccctcaaaagaatatgcaggcaacatggtataacccgctggccatcacgaaagatcaagaaggtagaccactctctaagaaagctccaacagatcattgattcggttcatggtgcagagacagctttccagctaaacaccctgtacaaggatctcacagacacctcaatatcatctgacaacaatttgtcaggaagtgtcacggttcctccaactaaccagagcaatctcaccgacttcaacaagcaccaaccccacaagtcaagtagcaatatgccatcaacttcacactcacactcctcatgcagccacggttctcagtcaagcccctcgtgtagcgttggtgcaacagaacatgcacaacagggtataattgatctgatgaagtcagaaaatcctgtgaaagacagctctattcagactatgcaaacagaaaacacttcattatatgagcatttctcagttcatgaggctccaattgatcttctacaggatgttactgaaaaggctaatggtgcacatcattcttctcgaagcctgtcatcccccaaccccaagcagaacacagatgcaaatatgagagtaaaggcaacatttggctcagaaaaggtgagattccgactaaacccagagtgcaattttcaaggactgaagcatgagctagcgaaacgtttgagtatagtagacacaaaccccttggttttaaagtacttggatgatgattcagaatgggtcttgatgacatgtgatgcagatctgcaggagtgccttcatgtatacaaactagcagatatccaaacaatcaaaatttcagttcatttagctgttagtccagctacaagggtcacagctggtcacactggtttgtcatgacaacagtatgagcctcaccactttgtgaggtttaatcaaattcaaccaggatcacatggttttgtgcaggggaaaccaaagattccaggagtccagggttggtagctgtgcaatactgcaatgtactatgtaccaccacgtcccagttctactgttagatcaattagtcttgtttctgatgctcaggttaggaactaatgatcaaacaagaatacttgacaatgagagagtcaagaaatcaggataaacagaagtaagcatgcattgcttgtaaatacttattgatgaacctgaatctctgaatgacaatgcaattgattgaattaatagggtgacgtatctacaaatcagatttgctccaactccaagtatgttttgtttctttgagtgctgatgtgcaacaatcattgatggcttctttctgataattgatcagctacaattgtcccttaagatcacagcattccttcatcgcctgagcgatcagcatgctctgttcaatgcacatgaaattctgcttctgaaattgtaattttctgcagcaaggattagatctagaataggatgataggatacttagtttgttcaatatgtttgtccattgcaaaaaaaaataaaaaatgaatggtacactgaattatgggcctctttgaaagaacgtctgctgctgtagacattatagattgttttcctttaagaagcttccatttgtgaaccgtttggtatgtcaattgccaagtatcaatatagagattagattatgccactattataataaccagaatatggaagcacagatgtgactggtgtcaacatatttaattaaagttaac

SEQ ID NO: 22289 - DNA, 3730 bp, Zea Mays
gcccaatccccttgcaactccacacaaggcgaaaaaacacccacagaaccctaccctcccgagtcccgaccccgtcctgctcgctccgccgtcctccgcccgccacccgccggactgccaaagcccggaggcctgaggcccgagttacgcgaggagcagcagaaccagcggcccggcgcctcatccctcagcggccacgcgagtgcgcggtcggcgcggagtgagcaggagcaacccgtggctggcggtcagtcgctggctagctggagcctggagttgcgacttgcgagcggcaggcacagagaagcgccaatccgccggcttgatctgaagcatggacaagcaatctgatgggcagggggtggagagggttgctgaggagaagcaacttgatgagaaagagttagaaaggaagctgaaaaaagatcaaaaggcaaaagagaaagaagagaagaaacttaaggcaaaacaaaaggaggcggctaggctccaggcacaagcaacatcagatggaacaaagaagactgagaagaaactaaggaagaaagctgtggaggacgaaaatccagaggatttcatagacccagacactcctaatggacagaaaaaattgctcgcacctcagatggccaagcaatacagtccaagtgcagttgagagatcatggtatgcctggtgggaatcttcaggatattttggggcagattcggcaagcacaaaaccaccatttgttatagttctgccacctccaaatgtgactggagctcttcacatcggtcatgcacttacagtggctatagaggatgctatgatacgatggcgtcggatgtcaggctacaatgctctgtgggtccctggagtggaccatgctggcattgctacacaggttgttgtagagaagaagcttatgcgtgaaaggaagttgacaaggcatgacatagggcgtgaaaaatttgtttctgaagtactcaaatggaaagatcaatatggtggtaccatattgaatcaattgcgccggcttggggcttcacttgattggtcccgtgaggcttttacaatggatgagcaaagatcaaaagccgtaactgaagcttttgtcaggttacataaggaaggcctgatatatcgagattatcgccttgtgaattgggattgcacgcttcgaactgcaatttctgacattgaggttgatcatattgatcttaaagaagaaacaatgttaaaggtccctggttatgccaatcctgtacagtttggtgtattgatatcttttgcctatccgctcgaggaaggacttggtgagattgttgtagcaaccaccagaatagaaacaatgctgggtgatacagcaatagccgttcaccctgaggatgaaaggtataaacatctgcatggaagatacgcagtccaccccttcaatggccgaagactcaaaataatctgtgatgctgagttagttgatcccacttttggtactggggctgtcaagattacccctgcccatgatccaaatgactttgaagttggaaagcggcataaccttgaattcatcaatatcttcacagacgatggaaaaataaatagcaatggaggtgcaaaatttgatggaatgccaaggttcaccgctcgagttgctgttattgaggcgctgaaggaaaaggggttgtataaggacacaaagaagaatgaaatgagcttgggtgtttgttcaagaactaatgatgtagtggaacctatgataaaaccacagtggtttgttaattgcaaccacatggccaaggcgggccttgacgctgtaaggtcgaaaaagattgaaattattccccagcagtatgagcaagactggtacagatggcttgaaaatatacgtgattggtgtgtctcaaggcaactttggtggggacatcgtgtacctgcatggtatgtgacactagaggatgacctggataaaaaccttggttctgcaaatgatcgctggatagtcgcaagaaacgaaagcgatgcaaaccttgaagcgcagaaaaagtatgcaggaaagaaattacgtctagatcaagaccctgatgtgctggatacttggttttcatctggtcttttccccttaacagtacttgcaaggatggtgatgatgggaatgcaacttggtggtgatgtgccatttcagaaggtttatttacatcctatgattcgggatgcacatggccgaaagatgtcaaaatcacttggtaacgttgttgatcctcttgaggtgataaatggcatgtcgctggatggtcttctgaaacgtttggaagaaggcaatctggatccaaatgaattaaacattgcaagagatgggaagaagaaggattttcctgatggcatagcagaatgtggtaccgatgctctacgctttgcactgatatcgtacacttcccagtctgacaggataaatcttgatattaagagggtggttggatacagacagtggtgcaacaaattatggaatgccatccgttttgcgatgggcaaactgggtgaccattacattccgccggcaactgttgatgtgtctcttatgccaccaatctgcaagtggatactctcggtgcttagcaaggccgttgggaaaaccgtttcctctttagaagcatataagttgtctgacgcaacatctgctatatactcatggtggcagtatcagctatgtgatgtatttatagaagctatcaaaccttacttcttcaacgattctcaagagcttgaatcagcaagagctgcctccagagataccctgtggatttgcctggatactgggctgcgcttgctccacccattcatgccctttgtaacagaagagctctggcagcgtcttccacagcccaaagattcttgtaggaaaggttcgattatgatttcacagtatccatctcttgttgaggaatggagtaatggcagacttgaaaatgaaatggacatcgtcttggatgctgtgaacaaaataaggtctctgaagccaccaacagattcaaatgaaagacgtcctgcttttgcactttgccgaggccaagagatcgctgccacaatccagtgctatcaatctctaatcgtgtatctttcttccatatcacatctcaagatcctgacagagaatgatgaaactccagccgattgtgcaactgctgttgtcaacaaagacttgtctgtgtaccttcagctccaaggagctttaaatgcagacgctgaacgtgaaaagctaaagaagaaaaaagatgagattcaaaagctacagaatgcactggcgcagaaaatggacgcctctggctatcgcgagaaggctccacagagcgtacaggaggaggacatgaggaagctcaccgctttgttggagcaactagaggtcatcagtgaagctgagaagaaattagacgcgaactgagtttgacctctgtttcgaagaggccttgcttgtaccgaagctgaccccatatttttcttgtttgcaaaaaagctcagttatgtgcctgtacgctcgggctcaggtttacagttgatggttcaaatggaagccacatttttgcagcttgtcaagggtgcactggctaatacagaagcatatttattttgtcaagtgaggaacttttgatgatgaatgatgatgcatatggaatctgtcagaaaatgcagtagcggtgctattaaggtttcaggtttgcaagccttacgcatatgcgccagcgtgtcacttgtg

SEQ ID NO: 22290 - DNA, 3398 bp, Zea Mays
gttcgtatcctcacttacctcaccttgtatcacgtttgcatagatggtgccagcaacttgatgagaaagagttagaaaggaagctgaaaaaagatcaaaaggcaaaagagaaagaagagaagaaacttaaggcaaaacaaaaggaggcggctaggctccaggcacaagcaacatcagatggaacaaagaagactgagaagaaactaaggaagaaagctgtggaggacgaaaatccagaggatttcatagacccagacactcctaatggacagaaaaaattgctcgcacctcagatggccaagcaatacagtccaagtgcagttgagagatcatggtatgcctggtgggaatcttcaggatattttggggcagattcggcaagcacaaaaccaccatttgttatagttctgccacctccaaatgtgactggagctcttcacatcggtcatgcacttacagtggctatagaggatgctatgatacgatggcgtcggatgtcaggctacaatgctctgtgggtccctggagtggaccatgctggcattgctacacaggttgttgtagagaagaagcttatgcgtgaaaggaagttgacaaggcatgacatagggcgtgaaaaatttgtttctgaagtactcaaatggaaagatcaatatggtggtaccatattgaatcaattgcgccggcttggggcttcacttgattggtcccgtgaggcttttacaatggatgagcaaagatcaaaagccgtaactgaagcttttgtcaggttacataaggaaggcctgatatatcgagattatcgccttgtgaattgggattgcacgcttcgaactgcaatttctgacattgaggttgatcatattgatcttaaagaagaaacaatgttaaaggtccctggttatgccaatcctgtacagtttggtgtattgatatcttttgcctatccgctcgaggaaggacttggtgagattgttgtagcaaccaccagaatagaaacaatgctgggtgatacagcaatagccgttcaccctgaggatgaaaggtataaacatctgcatggaagatacgcagtccaccccttcaatggccgaagactcaaaataatctgtgatgctgagttagttgatcccacttttggtactggggctgtcaagattacccctgcccatgatccaaatgactttgaagttggaaagcggcataaccttgaattcatcaatatcttcacagacgatggaaaaataaatagcaatggaggtgcaaaatttgatggaatgccaaggttcaccgctcgagttgctgttattgaggcgctgaaggaaaaggggttgtataaggacacaaagaagaatgaaatgagcttgggtgtttgttcaagaactaatgatgtagtggaacctatgataaaaccacagtggtttgttaattgcaaccacatggccaaggcgggccttgacgctgtaaggtcgaaaaagattgaaattattccccagcagtatgagcaagactggtacagatggcttgaaaatatacgtgattggtgtgtctcaaggcaactttggtggggacatcgtgtacctgcatggtatgtgacactagaggatgacctggataaaaaccttggttctgcaaatgatcgctggatagtcgcaagaaacgaaagcgatgcaaaccttgaagcgcagaaaaagtatgcaggaaagaaattacgtctagatcaagaccctgatgtgctggatacttggttttcatctggtcttttccccttaacagtacttgcaaggatggtgatgatgggaatgcaacttggtggtgatgtgccatttcagaaggtttatttacatcctatgattcgggatgcacatggccgaaagatgtcaaaatcacttggtaacgttgttgatcctcttgaggtgataaatggcatgtcgctggatggtcttctgaaacgtttggaagaaggcaatctggatccaaatgaattaaacattgcaagagatgggaagaagaaggattttcctgatggcatagcagaatgtggtaccgatgctctacgctttgcactgatatcgtacacttcccagtctgacaggataaatcttgatattaagagggtggttggatacagacagtggtgcaacaaattatggaatgccatccgttttgcgatgggcaaactgggtgaccattacattccgccggcaactgttgatgtgtctcttatgccaccaatctgcaagtggatactctcggtgcttagcaaggccgttgggaaaaccgtttcctctttagaagcatataagttgtctgacgcaacatctgctatatactcatggtggcagtatcagctatgtgatgtatttatagaagctatcaaaccttacttcttcaacgattctcaagagcttgaatcagcaagagctgcctccagagataccctgtggatttgcctggatactgggctgcgcttgctccacccattcatgccctttgtaacagaagagctctggcagcgtcttccacagcccaaagattcttgtaggaaaggttcgattatgatttcacagtatccatctcttgttgaggaatggagtaatggcagacttgaaaatgaaatggacatcgtcttggatgctgtgaacaaaataaggtctctgaagccaccaacagattcaaatgaaagacgtcctgcttttgcactttgccgaggccaagagatcgctgccacaatccagtgctatcaatctctaatcgtgtatctttcttccatatcacatctcaagatcctgacagagaatgatgaaactccagccgattgtgcaactgctgttgtcaacaaagacttgtctgtgtaccttcagctccaaggagctttaaatgcagacgctgaacgtgaaaagctaaagaagaaaaaagatgagattcaaaagctacagaatgcactggcgcagaaaatggacgcctctggctatcgcgagaaggctccacagagcgtacaggaggaggacatgaggaagctcaccgctttgttggagcaactagaggtcatcagtgaagctgagaagaaattagacgcgaactgagtttgacctctgtttcgaagaggccttgcttgtaccgaagctgaccccatatttttcttgtttgcaaaaaagctcagttatgtgcctgtacgctcgggctcaggtttacagttgatggttcaaatggaagccacatttttgcagcttgtcaagggtgcactggctaatacagaagcatatttattttgtcaagtgaggaacttttgatgatgaatgatgatgcatatggaatctgtcagaaaatgcagtagcggtgctattaaggtttcaggtttgcaagccttacgcatatgcgccagcgtgtcacttgtg

SEQ ID NO: 22291 - DNA, 3392 bp, Zea Mays
gaatgctgctggtttggagctacaaaatgacctgacgagatgttcagcaacttgatgagaaagagttagaaaggaagctgaaaaaagatcaaaaggcaaaagagaaagaagagaagaaacttaaggcaaaacaaaaggaggcggctaggctccaggcacaagcaacatcagatggaacaaagaagactgagaagaaactaaggaagaaagctgtggaggacgaaaatccagaggatttcatagacccagacactcctaatggacagaaaaaattgctcgcacctcagatggccaagcaatacagtccaagtgcagttgagagatcatggtatgcctggtgggaatcttcaggatattttggggcagattcggcaagcacaaaaccaccatttgttatagttctgccacctccaaatgtgactggagctcttcacatcggtcatgcacttacagtggctatagaggatgctatgatacgatggcgtcggatgtcaggctacaatgctctgtgggtccctggagtggaccatgctggcattgctacacaggttgttgtagagaagaagcttatgcgtgaaaggaagttgacaaggcatgacatagggcgtgaaaaatttgtttctgaagtactcaaatggaaagatcaatatggtggtaccatattgaatcaattgcgccggcttggggcttcacttgattggtcccgtgaggcttttacaatggatgagcaaagatcaaaagccgtaactgaagcttttgtcaggttacataaggaaggcctgatatatcgagattatcgccttgtgaattgggattgcacgcttcgaactgcaatttctgacattgaggttgatcatattgatcttaaagaagaaacaatgttaaaggtccctggttatgccaatcctgtacagtttggtgtattgatatcttttgcctatccgctcgaggaaggacttggtgagattgttgtagcaaccaccagaatagaaacaatgctgggtgatacagcaatagccgttcaccctgaggatgaaaggtataaacatctgcatggaagatacgcagtccaccccttcaatggccgaagactcaaaataatctgtgatgctgagttagttgatcccacttttggtactggggctgtcaagattacccctgcccatgatccaaatgactttgaagttggaaagcggcataaccttgaattcatcaatatcttcacagacgatggaaaaataaatagcaatggaggtgcaaaatttgatggaatgccaaggttcaccgctcgagttgctgttattgaggcgctgaaggaaaaggggttgtataaggacacaaagaagaatgaaatgagcttgggtgtttgttcaagaactaatgatgtagtggaacctatgataaaaccacagtggtttgttaattgcaaccacatggccaaggcgggccttgacgctgtaaggtcgaaaaagattgaaattattccccagcagtatgagcaagactggtacagatggcttgaaaatatacgtgattggtgtgtctcaaggcaactttggtggggacatcgtgtacctgcatggtatgtgacactagaggatgacctggataaaaaccttggttctgcaaatgatcgctggatagtcgcaagaaacgaaagcgatgcaaaccttgaagcgcagaaaaagtatgcaggaaagaaattacgtctagatcaagaccctgatgtgctggatacttggttttcatctggtcttttccccttaacagtacttgcaaggatggtgatgatgggaatgcaacttggtggtgatgtgccatttcagaaggtttatttacatcctatgattcgggatgcacatggccgaaagatgtcaaaatcacttggtaacgttgttgatcctcttgaggtgataaatggcatgtcgctggatggtcttctgaaacgtttggaagaaggcaatctggatccaaatgaattaaacattgcaagagatgggaagaagaaggattttcctgatggcatagcagaatgtggtaccgatgctctacgctttgcactgatatcgtacacttcccagtctgacaggataaatcttgatattaagagggtggttggatacagacagtggtgcaacaaattatggaatgccatccgttttgcgatgggcaaactgggtgaccattacattccgccggcaactgttgatgtgtctcttatgccaccaatctgcaagtggatactctcggtgcttagcaaggccgttgggaaaaccgtttcctctttagaagcatataagttgtctgacgcaacatctgctatatactcatggtggcagtatcagctatgtgatgtatttatagaagctatcaaaccttacttcttcaacgattctcaagagcttgaatcagcaagagctgcctccagagataccctgtggatttgcctggatactgggctgcgcttgctccacccattcatgccctttgtaacagaagagctctggcagcgtcttccacagcccaaagattcttgtaggaaaggttcgattatgatttcacagtatccatctcttgttgaggaatggagtaatggcagacttgaaaatgaaatggacatcgtcttggatgctgtgaacaaaataaggtctctgaagccaccaacagattcaaatgaaagacgtcctgcttttgcactttgccgaggccaagagatcgctgccacaatccagtgctatcaatctctaatcgtgtatctttcttccatatcacatctcaagatcctgacagagaatgatgaaactccagccgattgtgcaactgctgttgtcaacaaagacttgtctgtgtaccttcagctccaaggagctttaaatgcagacgctgaacgtgaaaagctaaagaagaaaaaagatgagattcaaaagctacagaatgcactggcgcagaaaatggacgcctctggctatcgcgagaaggctccacagagcgtacaggaggaggacatgaggaagctcaccgctttgttggagcaactagaggtcatcagtgaagctgagaagaaattagacgcgaactgagtttgacctctgtttcgaagaggccttgcttgtaccgaagctgaccccatatttttcttgtttgcaaaaaagctcagttatgtgcctgtacgctcgggctcaggtttacagttgatggttcaaatggaagccacatttttgcagcttgtcaagggtgcactggctaatacagaagcatatttattttgtcaagtgaggaacttttgatgatgaatgatgatgcatatggaatctgtcagaaaatgcagtagcggtgctattaaggtttcaggtttgcaagccttacgcatatgcgccagcgtgtcacttgtg

SEQ ID NO: 22292 - DNA, 336 bp, Zea Mays
agtcgccccactttccgtccttttcctctccactcgcacgttaacgctacacactcccgtttacgtgcacacctccaaaccctcatcacgatccggctccaaggtctcgagatgaagtcgagggcgaggtccggcggtggcgactccaggctctcggtgaggaagaccaaggttgagaaggacccaaacaagcccaagaggcctccgaccgcgttcttcgtcttcatggaggagttcaggaaggactacaaggagaagcaccccaatgtgaaacaagtctcagtgattggcaaggctggtggtgacatgtggaagtccttgtctgatgcctttctg

SEQ ID NO: 22293 - DNA, 796 bp, Zea Mays
cccactttccgtccttttcctctccactcgcacgttaacgctacacactcccgtttacgtgcacacctccaaaccctcatcacgatccggctccaaggtctcgagatgaagtcgagggcgaggtccggcggtggcgactccaggctctcggtgaggaagaccaaggttgagaaggacccaaacaagcccaagaggcctccgaccgcgttcttcgtcttcatggaggagttcaggaaggactacaaggagaagcaccccaatgtgaaacaagtctcagtggagaaggctccctacgtatctaaggccgagaagctgaaggttgagtacacaaagaagatggacgcctataacaacaagcagtctggaggaggacccacattgtctggtgattctgacaagtccaagtccgagggtgatgagtgatggatgacgggtgaaactctgggctgcccaagtgcttgcagtcagcagggaaatctcatcgtcgttgggcctaaccgggctttgctgctccgtagcgtctggaagctgtctgtcttttgagatgctgtagactagtagtgcctgctctgagttagtaattgaaagtgttgtccctgaagtgatgctgtttagttggtagtgtgttcgcttcttcggcacttatacttacccccaagcatcaacgctgcctgttttaaatctcaataggtgctgttttaaatctcagatctcaatatatgactactgatcgctgaatagatttcatgctctcttgattgactgcatctctcccaagttatatgcttattccttt

SEQ ID NO: 22294 - DNA, 880 bp, Zea Mays
cccactttccgtccttttcctctccactcgcacgttaacgctacacactcccgtttacgtgcacacctccaaaccctcatcacgatccggctccaaggtctcgagatgaagtcgagggcgaggtccggcggtggcgactccaggctctcggtgaggaagaccaaggttgagaaggacccaaacaagcccaagaggcctccgaccgcgttcttcgtcttcatggaggagttcaggaaggactacaaggagaagcaccccaatgtgaaacaagtctcagtgattggcaaggctggtggtgacatgtggaagtccttgtctgatgccgagaaggctccctacgtatctaaggccgagaagctgaaggttgagtacacaaagaagatggacgcctataacaacaagcagtctggaggaggacccacattgtctggtgattctgacaagtccaagtccgaggtcaacgacggggacgaggaggtcaaagcaaaccctcctggtgatgagtgatggatgacgggtgaaactctgggctgcccaagtgcttgcagtcagcagggaaatctcatcgtcgttgggcctaaccgggctttgctgctccgtagcgtctggaagctgtctgtcttttgagatgctgtagactagtagtgcctgctctgagttagtaattgaaagtgttgtccctgaagtgatgctgtttagttggtagtgtgttcgcttcttcggcacttatacttacccccaagcatcaacgctgcctgttttaaatctcaataggtgctgttttaaatctcagatctcaatatatgactactgatcgctgaatagatttcatgctctcttgattgactgcatctctcccaagttatatgcttattccttt

SEQ ID NO: 22295 - DNA, 790 bp, Zea Mays
cccactttccgtccttttcctctccactcgcacgttaacgctacacactcccgtttacgtgcacacctccaaaccctcatcacgatccggctccaaggtctcgagatgaagtcgagggcgaggtccggcggtggcgactccaggctctcggtgaggaagaccaaggttgagaaggacccaaacaagcccaagaggcctccgaccgcgttcttcgtcttcatggaggagttcaggaaggactacaaggagaagcaccccaatgtgaaacaagtctcagtgattggcaaggctggtggtgacatgtggaagtccttgtctgatgccgagaaggctccctacgtatctaaggccgagaagctgaaggttgagtacacaaagaagatggacgcctataacaacaagcagggtgatgagtgatggatgacgggtgaaactctgggctgcccaagtgcttgcagtcagcagggaaatctcatcgtcgttgggcctaaccgggctttgctgctccgtagcgtctggaagctgtctgtcttttgagatgctgtagactagtagtgcctgctctgagttagtaattgaaagtgttgtccctgaagtgatgctgtttagttggtagtgtgttcgcttcttcggcacttatacttacccccaagcatcaacgctgcctgttttaaatctcaataggtgctgttttaaatctcagatctcaatatatgactactgatcgctgaatagatttcatgctctcttgattgactgcatctctcccaagttatatgcttattccttt

SEQ ID NO: 22296 - DNA, 1357 bp, Zea Mays
  misc_feature (1)..(2): n is a, c, g, or t
nnatcgttgagaagtattccaactccaacattgaaattcatactttcaatcaggtttgtggcctgtttttgttatatctcaattacacagttcaattatatagcattttggagtggcaaacaatgttagctgataaatttgcattgtcttgtacagagccagtatcctcgcattgttaccgaggacttcttgccacttccaagcaaagggaaatctgggaaggatggctggccatggtgatgtgttcccctctttgaataacagtggaaaactcgacatcttattggctcagggcaaggacacagagatcctgaaccatctgatcaataaccagaatgaatactgcatggaggttactccaaaaacattggctgatgttaaaggcggtactctcatctcttacgaaggaagagttcagcttttggagattgcccaagtacctgatgagcatttcttgcccaacaggtgggtgaaccttaaagctgtcaagagactagtagaggctgaggcacttaagatggaaattattccaaaccccaaggaagttgatggtgtgaaagtccttcaacttgaaactgcagctggtgcagctattcgtttctttgacaaagcgattggaattaatgttccccgctcaagatttctcccggtgaaggctacatctgatttattgcttgtgcagtctgatctttacaccttggttgatggctttgtcatccgcaatccatccagagcgaatccagctaacccttcgattgagcttggacctgagttcaagaaggttgccaatttccttgctcggttcaagtccatccccagcatcgtcgagcttgacagcttgaaggtttctggtgatgtctggtttggttctggaattacgctcaagggcaaggtgacaatcaccgccaagtctggagtgaagttggaggttccagatggagctgtatttgaaaacaaggatgtcaatggccctgaggatctttaagctatgcttgccgtcaccagtttttcccaaggatttgtcaataggagcagccaacccaaatcactcccactgagctctaccttttgtaattctcgtgccattccgctcccgctgtgagggtcctgtgagcccgctagagaatatgactgtaatcttctttggtgcgtctgcccttctgtttttgtgcgccagggacgtatattttgctgaaatgatactaccatagctttgcgtgccggaggtgctatgtggtgtttctgtgcgtttggttgcaatgataggacgggatgagatgagaccctcaaattaggttgtttggttctgggtcaaagattgagacaagaatatcctagtattgtttcatgttgtcct

SEQ ID NO: 22297 - DNA, 1304 bp, Zea Mays
  misc_feature (1)..(2): n is a, c, g, or t
nnatcgttgagaagtattccaactccaacattgaaattcatactttcaatcagtatcctcgcattgttaccgaggacttcttgccacttccaagcaaagggaaatctgggaaggatggctggtatcctccaggccatggtgatgtgttcccctctttgaataacagtggaaaactcgacatcttattggctcagggcaaggagtatgtcttcgttgctaactcagacaacttgggtgctatagtcgacatcaagatcctgaaccatctgatcaataaccagaatgaatactgcatggaggttactccaaaaacattggctgatgttaaaggcggtactctcatctcttacgaaggaagagttcagcttttggagattgcccaagtacctgatgagcatttcttgcccaacaggtgggtgaaccttaaagctgtcaagagactagtagaggctgaggcacttaagatggaaattattccaaaccccaaggaagttgatggtgtgaaagtccttcaacttgaaactgcagctggtgcagctattcgtttctttgacaaagcgattggaattaatgttccccgctcaagatttctcccggtgaaggctacatctgatttattgcttgtgcagtctgatctttacaccttggttgatggctttgtcatccgcaatccatccagagcgaatccagctaacccttcgattgagcttggacctgagttcaagaaggttgccaatttccttgctcggttcaagtccatccccagcatcgtcgagcttgacagcttgaaggtttctggtgatgtctggtttggttctggaattacgctcaagggcaaggtgacaatcaccgccaagtctggagtgaagttggaggttccagatggagctgtatttgaaaacaaggatgtcaatggccctgaggatctttaagctatgcttgccgtcaccagtttttcccaaggatttgtcaataggagcagccaacccaaatcactcccactgagctctaccttttgtaattctcgtgccattccgctcccgctgtgagggtcctgtgagcccgctagagaatatgactgtaatcttctttggtgcgtctgcccttctgtttttgtgcgccagggacgtatattttgctgaaatgatactaccatagctttgcgtgccggaggtgctatgtggtgtttctgtgcgtttggttgcaatgataggacgggatgagatgagaccctcaaattaggttgtttggttctgggtcaaagattgagacaagaatatcctagtattgtttcatgttgtcct

SEQ ID NO: 22298 - DNA, 1349 bp, Zea Mays
  misc_feature (1)..(2): n is a, c, g, or t
nnatcgttgagaagtattccaactccaacattgaaattcatactttcaatcagagccagtatcctcgcattgttaccgaggacttcttgccacttccaagcaaagggaaatctgggaaggatggctggtatcctccaggccatggtgatgtgttcccctctttgaataacagtggaaaactcgacatcttattggctcagggcaaggagtatgtcttcgttgctaactcagacaacttgggtgctatagtcgacatcaagatcctgaaccatctgatcaataaccagaatgaatactgcatggaggttactccaaaaacattggctgatgttaaaggcggtactctcatctcttacgaaggaagagttcagcttttggagattgcccaagtacctgatgagcatgtgaatgagtttaaatcaatcgagaagtttaagatattcaacactaacaacttgtgggtgaaccttaaagctgtcaagagactagtagaggctgaggcacttaagatggaaattattccaaaccccaaggaagttgatggtgtgaaagtccttcaacttgaaactgcagctggtgcagctattcgtttctttgacaaagcgattggaattaatgttccccgctcaagatttctcccggtgaaggctacatctgatttattgcttgtgcagtctgatctttacaccttggttgatggctttgtcatccgcaatccatccagagcgaatccagctaacccttcgattgagcttggacctgagttcaagaaggttgccaatttccttgctcggttcaagtccatccccagcatcgtcgagcttgacagcttgaaggtttctggtgatgtctggtttggttctggaattacgctcaagggcaaggtgacaatcaccgccaagtctggagtgaagttggaggttccagatggagctgtatttgaaaacaaggatgtcaatggccctgaggatctttaagctatgcttgccgtcaccagtttttcccaaggatttgtcaataggagcagccaacccaaatcactcccactgagctctaccttttgtaattctcgtgccattccgctcccgctgtgagggtcctgtgagcccgctagagaatatgactgtaatcttctttggtgcgtctgcccttctgtttttgtgcgccagggacgtatattttgctgaaatgatactaccatagctttgcgtgccggaggtgctatgtggtgtttctgtgcgtttggttgcaatgataggacgggatgagatgagaccctcaaattaggttgtttggttctgggtcaaagattgagacaagaatatcctagtattgtttcatgttgtcct

SEQ ID NO: 22299 - DNA, 1300 bp, Zea Mays
cgttgagaagtattccaactccaacattgaaattcatactttcaatcagagccagtatcctcgcattgttaccgaggacttcttgccacttccaagcaaagggaaatctgggaaggatggctggtatcctccaggccatggtgatgtgttcccctctttgaataacagtggaaaactcgacatcttattggctcagggcaaggacacagagatcctgaaccatctgatcaataaccagaatgaatactgcatggaggttactccaaaaacattggctgatgttaaaggcggtactctcatctcttacgaaggaagagttcagcttttggagattgcccaagtacctgatgagcatgtgaatgagtttaaatcaatcgagaagtttaagatattcaacactaacaacttgtgggtgaaccttaaagctgtcaagagactagtagaggctgaggcacttaagatggaaattattccaaaccccaaggaagttgatggtgtgaaagtccttcaacttgaaactgcagctggtgcagctattcgtttctttgacaaagcgattggaattaatgttccccgctcaagatttctcccggtgaaggctacatctgatttattgcttgtgcagtctgatctttacaccttggttgatggctttgtcatccgcaatccatccagagcgaatccagctaacccttcgattgagcttggacctgagttcaagaaggttgccaatttccttgctcggttcaagtccatccccagcatcgtcgagcttgacagcttgaaggtttctggtgatgtctggtttggttctggaattacgctcaagggcaaggtgacaatcaccgccaagtctggagtgaagttggaggttccagatggagctgtatttgaaaacaaggatgtcaatggccctgaggatctttaagctatgcttgccgtcaccagtttttcccaaggatttgtcaataggagcagccaacccaaatcactcccactgagctctaccttttgtaattctcgtgccattccgctcccgctgtgagggtcctgtgagcccgctagagaatatgactgtaatcttctttggtgcgtctgcccttctgtttttgtgcgccagggacgtatattttgctgaaatgatactaccatagctttgcgtgccggaggtgctatgtggtgtttctgtgcgtttggttgcaatgataggacgggatgagatgagaccctcaaattaggttgtttggttctgggtcaaagattgagacaagaatatcctagtattgtttcatgttgtcct

SEQ ID NO: 22300 - DNA, 1132 bp, Zea Mays
cgttgagaagtattccaactccaacattgaaattcatactttcaatcagagccagtatcctcgcattgttaccgaggacttcttgccacttccaagcaaagggaaatctgggaaggatggctggtatcctccaggccatggtgatgtgttcccctctttgaataacagtggaaaactcgacatcttattggctcagggcaaggagtatgtcttcgttgctaactcagacaacttgggtgctatagtcgacatcaagatcctgaaccatctgatcaataaccagaatgaatactgcatggaggttactccaaaaacattggctgatgttaaaggcggtactctcatctcttacgaaggaagagttcagcttttggagattgcccaagtacctgatgagcatgtgaatgagtttaaatcaatcgagaagtttaagatattcaacactaacaacttgtgggtgaaccttaaagctgtcaagagactagtagaggctgaggcacttaagatggaaattattccaaaccccaaggaagttgatggtgtgaaagtccttcaacttgaaactgcagctggtgcagctattcgtttctttgacaaagcgattggaattaatgttccccgctcaagatttctcccggtgaaggctacatctgatttattgcttgtgcagtctgatctttacaccttggttgatggctttgtcatccgcaatccatccagagcgaatccagctaacccttcgattgagcttggacctgagttcaagaaggttgccaatttccttgctcggttcaagtccatccccagcatcgtcgagcttgacagcttgaaggtttctggtgatgtctggtttggttctggaattacgctcaagggcaaggtgacaatcaccgccaagtctggagtgaagttggaggttccagatggagctgtatttgaaaacaagggacgagagaggacaccatgggacatttctgtcctaactgtcccgcaactaaacgcacccgcaactaaacgcactatctcaccgggtggtatgctatatgataagggggatctctccacccaggttgccacatccacatgcctggtgctcgagaatattgttgtggaaggccatattccaaggtga

SEQ ID NO: 22301 - DNA, 1230 bp, Zea Mays
tccaacattgaaattcatactttcaatcagtatcctcgcattgttaccgaggacttcttgccacttccaagcaaagggaaatctgggaaggatggctggtatcctccaggccatggtgatgtgttcccctctttgaataacagtggaaaactcgacatcttattggctcagggcaaggacacagagatcctgaaccatctgatcaataaccagaatgaatactgcatggaggttactccaaaaacattggctgatgttaaaggcggtactctcatctcttacgaaggaagagttcagcttttggagattgcccaagtacctgatgagcatttcttgcccaacaggtgggtgaaccttaaagctgtcaagagactagtagaggctgaggcacttaagatggaaattattccaaaccccaaggaagttgatggtgtgaaagtccttcaacttgaaactgcagctggtgcagctattcgtttctttgacaaagcgattggaattaatgttccccgctcaagatttctcccggtgaaggctacatctgatttattgcttgtgcagtctgatctttacaccttggttgatggctttgtcatccgcaatccatccagagcgaatccagctaacccttcgattgagcttggacctgagttcaagaaggttgccaatttccttgctcggttcaagtccatccccagcatcgtcgagcttgacagcttgaaggtttctggtgatgtctggtttggttctggaattacgctcaaggtgacaatcaccgccaagtctggagtgaagttggaggttccagatggagctgtatttgaaaacaaggatgtcaatggccctgaggatctttaagctatgcttgccgtcaccagtttttcccaaggatttgtcaataggagcagccaacccaaatcactcccactgagctctaccttttgtaattctcgtgccattccgctcccgctgtgagggtcctgtgagcccgctagagaatatgactgtaatcttctttggtgcgtctgcccttctgtttttgtgcgccagggacgtatattttgctgaaatgatactaccatagctttgcgtgccggaggtgctatgtggtgtttctgtgcgtttggttgcaatgataggacgggatgagatgagaccctcaaattaggttgtttggttctgggtcaaagattgagacaagaatatcctagtattgtttcatgttgtcct

SEQ ID NO: 22302 - DNA, 1296 bp, Zea Mays
agccagtatcctcgcattgttaccgaggacttcttgccacttccaagcaaagggaaatctgggaaggatggctggtatcctccaggccatggtgatgtgttcccctctttgaataacagtggaaaactcgacatcttattggctcagggcaaggagtatgtcttcgttgctaactcagacaacttgggtgctatagtcgacatcaagatcctgaaccatctgatcaataaccagaatgaatactgcatggaggttactccaaaaacattggctgatgttaaaggcggtactctcatctcttacgaaggaagagttcagcttttggagattgcccaagtacctgatgagcatgtgaatgagtttaaatcaatcgagaagtttaagatattcaacactaacaacttgtgggtgaaccttaaagctgtcaagagactagtagaggctgaggcacttaagatggaaattattccaaaccccaaggaagttgatggtgtgaaagtccttcaacttgaaactgcagctggtgcagctattcgtttctttgacaaagcgattggaattaatgttccccgctcaagatttctcccggtgaaggctacatctgatttattgcttgtgcagtctgatctttacaccttggttgatggctttgtcatccgcaatccatccagagcgaatccagctaacccttcgattgagcttggacctgagttcaagaaggttgccaatttccttgctcggttcaagtccatccccagcatcgtcgagcttgacagcttgaaggtttctggtgatgtctggtttggttctggaattacgctcaagggcaaggtgacaatcaccgccaagtctggagtgaagttggaggttccagatggagctgtatttgaaaacaaggatgtcaatggccctgaggatctttaagctatgcttgccgtcaccagtttttcccaaggatttgtcaataggagcagccaacccaaatcactcccactgagctctaccttttgtaattctcgtgccattccgctcccgctgtgagggtcctgtgagcccgctagagaatatgactgtaatcttctttggtgcgtctgcccttctgtttttgtgcgccagggacgtatattttgctgaaatgatactaccatagctttgcgtgccggaggtgctatgtggtgtttctgtgcgtttggttgcaatgataggacgggatgagatgagaccctcaaattaggttgtttggttctgggtcaaagattgagacaagaatatcctagtattgtttcatgttgtcct

SEQ ID NO: 22303 - DNA, 1198 bp, Zea Mays
agccagtatcctcgcattgttaccgaggacttcttgccacttccaagcaaagggaaatctgggaaggatggctggtatcctccaggccatggtgatgtgttcccctctttgaataacagtggaaaactcgacatcttattggctcagggcaaggacacagagatcctgaaccatctgatcaataaccagaatgaatactgcatggaggttactccaaaaacattggctgatgttaaaggcggtactctcatctcttacgaaggaagagttcagcttttggagattgcccaagtacctgatgagcatgtgggtgaaccttaaagctgtcaagagactagtagaggctgaggcacttaagatggaaattattccaaaccccaaggaagttgatggtgtgaaagtccttcaacttgaaactgcagctggtgcagctattcgtttctttgacaaagcgattggaattaatgttccccgctcaagatttctcccggtgaaggctacatctgatttattgcttgtgcagtctgatctttacaccttggttgatggctttgtcatccgcaatccatccagagcgaatccagctaacccttcgattgagcttggacctgagttcaagaaggttgccaatttccttgctcggttcaagtccatccccagcatcgtcgagcttgacagcttgaaggtttctggtgatgtctggtttggttctggaattacgctcaagggcaaggtgacaatcaccgccaagtctggagtgaagttggaggttccagatggagctgtatttgaaaacaaggatgtcaatggccctgaggatctttaagctatgcttgccgtcaccagtttttcccaaggatttgtcaataggagcagccaacccaaatcactcccactgagctctaccttttgtaattctcgtgccattccgctcccgctgtgagggtcctgtgagcccgctagagaatatgactgtaatcttctttggtgcgtctgcccttctgtttttgtgcgccagggacgtatattttgctgaaatgatactaccatagctttgcgtgccggaggtgctatgtggtgtttctgtgcgtttggttgcaatgataggacgggatgagatgagaccctcaaattaggttgtttggttctgggtcaaagattgagacaagaatatcctagtattgtttcatgttgtcct

SEQ ID NO: 22304 - DNA, 1212 bp, Zea Mays
agccagtatcctcgcattgttaccgaggacttcttgccacttccaagcaaagggaaatctgggaaggatggctggtatcctccaggccatggtgatgtgttcccctctttgaataacagtggaaaactcgacatcttattggctcagggcaaggacacagagatcctgaaccatctgatcaataaccagaatgaatactgcatggaggttactccaaaaacattggctgatgttaaaggcggtactctcatctcttacgaaggaagagttcagcttttggagattgcccaagtacctgatgagcatttcttgcccaacaggtgggtgaaccttaaagctgtcaagagactagtagaggctgaggcacttaagatggaaattattccaaaccccaaggaagttgatggtgtgaaagtccttcaacttgaaactgcagctggtgcagctattcgtttctttgacaaagcgattggaattaatgttccccgctcaagatttctcccggtgaaggctacatctgatttattgcttgtgcagtctgatctttacaccttggttgatggctttgtcatccgcaatccatccagagcgaatccagctaacccttcgattgagcttggacctgagttcaagaaggttgccaatttccttgctcggttcaagtccatccccagcatcgtcgagcttgacagcttgaaggtttctggtgatgtctggtttggttctggaattacgctcaagggcaaggtgacaatcaccgccaagtctggagtgaagttggaggttccagatggagctgtatttgaaaacaaggatgtcaatggccctgaggatctttaagctatgcttgccgtcaccagtttttcccaaggatttgtcaataggagcagccaacccaaatcactcccactgagctctaccttttgtaattctcgtgccattccgctcccgctgtgagggtcctgtgagcccgctagagaatatgactgtaatcttctttggtgcgtctgcccttctgtttttgtgcgccagggacgtatattttgctgaaatgatactaccatagctttgcgtgccggaggtgctatgtggtgtttctgtgcgtttggttgcaatgataggacgggatgagatgagaccctcaaattaggttgtttggttctgggtcaaagattgagacaagaatatcctagtattgtttcatgttgtcct

SEQ ID NO: 22305 - DNA, 1081 bp, Zea Mays
agccagtatcctcgcattgttaccgaggacttcttgccacttccaagcaaagggaaatctgggaaggatggctggtatcctccaggccatggtgatgtgttcccctctttgaataacagtggaaaactcgacatcttattggctcagggcaaggagtatgtcttcgttgctaactcagacaacttgggtgctatagtcgacatcaatcctgaaccatctgatcaataaccagaatgaatactgcatggaggttactccaaaaacattggctgatgttaaaggcggtactctcatctcttacgaaggaagagttcagcttttggagattgcccaagtacctgatgagcatgtgaatgagtttaaatcaatcgagaagtttaagatattcaacactaacaacttgtgggtgaaccttaaagctgtcaagagactagtagaggctgaggcacttaagatggaaattattccaaaccccaaggaagttgatggtgtgaaagtccttcaacttgaaactgcagctggtgcagctattcgtttctttgacaaagcgattggaattaatgttccccgctcaagatttctcccggtgaaggctacatctgatttattgcttgtgcagtctgatctttacaccttggttgatggctttgtcatccgcaatccatccagagcgaatccagctaacccttcgattgagcttggacctgagttcaagaaggttgccaatttccttgctcggttcaagtccatccccagcatcgtcgagcttgacagcttgaaggtttctggtgatgtctggtttggttctggaattacgctcaagggcaaggtgacaatcaccgccaagtctggagtgaagttggaggttccagatggagctgtatttgaaaacaagggacgagagaggacaccatgggacatttctgtcctaactgtcccgcaactaaacgcacccgcaactaaacgcactatctcaccgggtggtatgctatatgataagggggatctctccacccaggttgccacatccacatgcctggtgctcgagaatattgttgtggaaggccatattccaaggtga

SEQ ID NO: 22306 - DNA, 1042 bp, Zea Mays
agccagtatcctcgcattgttaccgaggacttcttgccacttccaagcaaagggaaatctgggaaggatggctggtatcctccaggccatggtgatgtgttcccctctttgaataacagtggaaaactcgacatcttattggctcagggcaaggagtatgtcttcgttgctaactcagacaacttgggtgctatagtcgacatcaatcctgaaccatctgatcaataaccagaatgaatactgcatggaggttactccaaaaacattggctgatgttaaaggcggtactctcatctcttacgaaggaagagttcagcttttggagattgcccaagtacctgatgagcatttcttgcccaacaggtgggtgaaccttaaagctgtcaagagactagtagaggctgaggcacttaagatggaaattattccaaaccccaaggaagttgatggtgtgaaagtccttcaacttgaaactgcagctggtgcagctattcgtttctttgacaaagcgattggaattaatgttccccgctcaagatttctcccggtgaaggctacatctgatttattgcttgtgcagtctgatctttacaccttggttgatggctttgtcatccgcaatccatccagagcgaatccagctaacccttcgattgagcttggacctgagttcaagaaggttgccaatttccttgctcggttcaagtccatccccagcatcgtcgagcttgacagcttgaaggtttctggtgatgtctggtttggttctggaattacgctcaagggcaaggtgacaatcaccgccaagtctggagtgaagttggaggttccagatggagctgtatttgaaaacaagggacgagagaggacaccatgggacatttctgtcctaactgtcccgcaactaaacgcacccgcaactaaacgcactatctcaccgggtggtatgctatatgataagggggatctctccacccaggttgccacatccacatgcctggtgctcgagaatattgttgtggaaggccatattccaaggtga

SEQ ID NO: 22307 - DNA, 1044 bp, Zea Mays
agccagtatcctcgcattgttaccgaggacttcttgccacttccaagcaaagggaaatctgggaaggatggctggtatcctccaggccatggtgatgtgttcccctctttgaataacagtggaaaactcgacatcttattggctcagggcaaggagtatgtcttcgttgctaactcagacaacttgggtgctatagtcgacatcaagatcctgaaccatctgatcaataaccagaatgaatactgcatggaggttactccaaaaacattggctgatgttaaaggcggtactctcatctcttacgaaggaagagttcagcttttggagattgcccaagtacctgatgagcatttcttgcccaacaggtgggtgaaccttaaagctgtcaagagactagtagaggctgaggcacttaagatggaaattattccaaaccccaaggaagttgatggtgtgaaagtccttcaacttgaaactgcagctggtgcagctattcgtttctttgacaaagcgattggaattaatgttccccgctcaagatttctcccggtgaaggctacatctgatttattgcttgtgcagtctgatctttacaccttggttgatggctttgtcatccgcaatccatccagagcgaatccagctaacccttcgattgagcttggacctgagttcaagaaggttgccaatttccttgctcggttcaagtccatccccagcatcgtcgagcttgacagcttgaaggtttctggtgatgtctggtttggttctggaattacgctcaagggcaaggtgacaatcaccgccaagtctggagtgaagttggaggttccagatggagctgtatttgaaaacaagggacgagagaggacaccatgggacatttctgtcctaactgtcccgcaactaaacgcacccgcaactaaacgcactatctcaccgggtggtatgctatatgataagggggatctctccacccaggttgccacatccacatgcctggtgctcgagaatattgttgtggaaggccatattccaaggtga

SEQ ID NO: 22308 - DNA, 1843 bp, Zea Mays
caccatcacccaccatcagccgccaaagatcacgaaagcgacgcgcacaccccaagaaagggcggctccccactccgcctcgccgcacccctttcggcctttcttcctcccccacctcttgctcgcgtcccagctcccaacaccagtacaccacgcgccggctgcgagcgatgcccgcgatcccaacggcccccgccccctgccccgtgcgcttcctcctcgcccgccgccacagcctccacatctcctacccgtcgccttgctctaaccaccagcggctcccgccccgcctcctgcgcctgcccgctcgcccccgggccgctcccatgtcggccgaggcgcgggcacccgcgtctccggtggcgccgccggcgcaccccacttacgacctcagggccgtcatcgcgctcgccctcgcagaggacgccggcgaccgaggggatgtatcctgtttagccaccataccttctgatgtcgaagccgaagccacatttattgctaaagcagatggtgtcattgctggaataagcctagcagatatgatatttaaccaggttgatccatctttgaaggtcgaatggtttgaaagtgatggcaattttgtccacaaaggactgcagtttggaagagtatatgggtgtgcccgcagcatcatcgttgctgaaagggttgtgctaaatttcatgcagcggatgagtggcattgcgaccctaacaaaggctatgtctgatgctgcccgtccagcatgcatattggaaacaaggaaaactgctccaggtttacgtctgattgacaagtactgattggtggcggaaagaaccacaggcttggtttatttgatatggttatgataaaagataatcatatttctgttgccggtgggattgcaaatgcaatgagatctgttgatcaattcctgcagaaggaaaaactcacaattcctgtcgaggtcgagacaaggacaatcgaagaagtgaaagatttgttgaagtacgctgctgagaacaaaacttcattgacccgtataatgttggacaatatggttgttcctcttggaaatggagatttagacgtttcaatgcttaaagatgcagttcggttgataaacggtagatttgagactgaggcgtctggaaatgtgacagttgatacagtgaagaaaatcggagaaacgggagtcacctatatttcaagtggagcattaacgcactctgtgacggcgcttgacatctctctcaagatagacaccgagctggctcttcaggttggaagacgcacaaatcgtgcttgactcccacagcattacgttgtggacgcaacgcacgcaagcaggatgacagagggaccagcgtggcaaaccagcttaaatagcttaataataacttggcgctgaggcctctgactgcaactacgtgggattcattcttcagtttcatgcacaaacgaccgcaatattgatcggatcagaataattggcaggacatacaggttttgttctagcaccaagtttgggagcttgcgttctgcggcagataggcaggccaggtaggtgtacctcctcctgggcccagccacagctcgacagcaggtaccaggtaggtctactgtaaacgggggatgtcgcactgaactcgcaataccaaagacaaaataacaaaaggtggagataagatgcttatcttactgccattggtgataaaagcaacgtcaactcacatctattatttattgtatcgttccatcatcacttccagaatccatttgtatacagtgtatacgaccggtttgctcgctctttggaagagaaagagccacacacgatcgaaccgtttggagtttgcat

SEQ ID NO: 22309 - DNA, 2480 bp, Zea Mays
caccatcacccaccatcagccgccaaagatcacgaaagcgacgcgcacaccccaagaaagggcggctccccactccgcctcgccgcacccctttcggcctttcttcctcccccacctcttgctcgcgtcccagctcccaacaccagtacaccacgcgccggctgcgagcgatgcccgcgatcccaacggcccccgccccctgccccgtgcgcttcctcctcgcccgccgccacagcctccacatctcctacccgtcgccttgctctaaccaccagcggctcccgccccgcctcctgcgcctgcccgctcgcccccgggccgctcccatgtcggccgaggcgcgggcacccgcgtctccggtggcgccgccggcgcaccccacttacgacctcagggccgtcatcgcgctcgccctcgcagaggacgccggcgaccgaggggatgtatcctgtttagccaccataccttctgatgtcgaagccgaagccacatttattgctaaagcagatggtgtcattgctggaataagcctagcagatatgatatttaaccaggttgatccatctttgaaggtcgaatggtttgaaagtgatggcaattttgtccacaaaggactgcagtttggaagagtatatgggtgtgcccgcagcatcatcgttgctgaaagggttgtgctaaatttcatgcagcggatgagtggcattgcgaccctaacaaaggttatttctgcccttatttacatgattaagctgctcctttgatgaaaaactgtaatgtttctccttgtttatcctagactcctagagcctttttctatcctgcagtttgaaagtcactatgtgttcctcgttttttttcttgctatgttcagcaaaagcatattattcaattcccatctatttggatacttccaggcttccagccataaagggttttttttgttgttgtctcggaacatacacctgatattgtttcttttttattgccacactagctgtcaaatgctagttcttcagattttatatttcacaatcctcctatccttttagattacatcattgtcatttgagatgtcagtaaagcttcgagccattggcaattttgccattatcatttgtgggcttcgccagtatgccatcggacccacaaatcatagacacagacggtcccaccagtcatagacacgggatggcataataacagacagccaaatttgagagtggcaaaacagcaaatttctcgtaaagcttctgttgttgttctgtccaggctatgtctgatgctgcccgtccagcatgcatattggaaacaaggaaaactgctccaggtttacgtctgattgacaagtgggcagtactgattggtggcggaaagaaccacaggcttggtttatttgatatggttatgataaaagataatcatatttctgttgccggtgggattgcaaatgcaatgagatctgttgatcaattcctgcagaaggaaaaactcacaattcctgtcgaggtcgagacaaggacaatcgaagaagtgaaagatttgttgaagtacgctgctgagaacaaaacttcattgacccgtataatgttggacaatatggttgttcctcttggaaatggagatttagacgtttcaatgcttaaagatgcagttcggttgataaacggtagatttgagactgaggcgtctggaaatgtgacagttgatacagtgaagaaaatcggagaaacgggagtcacctatatttcaagtggagcattaacgcactctgtgacggcgcttgacatctctctcaagatagacaccgagctggctcttcaggttggaagacgcacaaatcgtgcttgactcccacagcattacgttgtggacgcaacgcacgcaagtaaggtctgcctccttgtatagcttggcttctattccctccctccctctctaagccagcccttttgcttgtgtcggcaggcaggatgacagagggaccagcgtggcaaaccagcttaaatagcttaataataacttggcgctgaggcctctgactgcaactacgtgggattcattcttcagtttcatgcacaaacgaccgcaatattgatcggatcagaataattggcaggacatacaggttttgttctagcaccaagtttgggagcttgcgttctgcggcagataggcaggccaggtaggtgtacctcctcctgggcccagccacagctcgacagcaggtaccaggtaggtctactgtaaacgggggatgtcgcactgaactcgcaataccaaagacaaaataacaaaaggtggagataagatgcttatcttactgccattggtgataaaagcaacgtcaactcacatctattatttattgtatcgttccatcatcacttccagaatccatttgtatacagtgtatacgaccggtttgctcgctctttggaagagaaagagccacacacgatcgaaccgtttggagtttgcat

SEQ ID NO: 22310 - DNA, 1448 bp, Zea Mays
gtcactttaggctacaagtggttgcaagtagtaaaagaaagggatgtatcctgtttagccaccataccttctgatgtcgaagccgaagccacatttattgctaaagcagatggtgtcattgctggaataagcctagcagatatgatatttaaccaggttgatccatctttgaaggtcgaatggtttgaaagtgatggcaattttgtccacaaaggactgcagtttggaagagtatatgggtgtgcccgcagcatcatcgttgctgaaagggttgtgctaaatttcatgcagcggatgagtggcattgcgaccctaacaaaggctatgtctgatgctgcccgtccagcatgcatattggaaacaaggaaaactgctccaggtttacgtctgattgacaagtgggcagtactgattggtggcggaaagaaccacaggcttggtttatttgatatggttatgataaaagataatcatatttctgttgccggtgggattgcaaatgcaatgagatctgttgatcaattcctgcagaaggaaaaactcacaattcctgtcgaggtcgagacaaggacaatcgaagaagtgaaagatttgttgaagtacgctgctgagaacaaaacttcattgacccgtataatgttggacaatatggttgttcctcttggaaatggagatttagacgtttcaatgcttaaagatgcagttcggttgataaacggtagatttgagactgaggcgtctggaaatgtgacagttgatacagtgaagaaaatcggagaaacgggagtcacctatatttcaagtggagcattaacgcactctgtgacggcgcttgacatctctctcaagatagacaccgagctggctcttcaggttggaagacgcacaaatcgtgcttgactcccacagcattacgttgtggacgcaacgcacgcaagatgacagagggaccagcgtggcaaaccagcttaaatagcttaataataacttggcgctgaggcctctgactgcaactacgtgggattcattcttcagtttcatgcacaaacgaccgcaatattgatcggatcagaataattggcaggacatacaggttttgttctagcaccaagtttgggagcttgcgttctgcggcagataggcaggccaggtaggtgtacctcctcctgggcccagccacagctcgacagcaggtaccaggtaggtctactgtaaacgggggatgtcgcactgaactcgcaataccaaagacaaaataacaaaaggtggagataagatgcttatcttactgccattggtgataaaagcaacgtcaactcacatctattatttattgtatcgttccatcatcacttccagaatccatttgtatacagtgtatacgaccggtttgctcgctctttggaagagaaagagccacacacgatcgaaccgtttggagtttgcat

SEQ ID NO: 22311 - DNA, 2068 bp, Zea Mays
ctccatttttaggacatcaatacctacagatgattgcaacagggcatagcaacatcgatcaaaaggtttcctgccaagcattgcacagaatgacatccataccaaacagtacagacaggactaagaagcagagtgcaacaaaaccaaagcattcagaagcggccggtatatccatataacaaacccaaccagtacccactgtccgctggggcttgtttgatgtttaacgatgtattattgtccaagtttcaccactcacatcccccccattattctctccaatcttccatcaactcaagctgagcaatcaaggtaaaacaaaaaaaacaggataaaatccaaatggtatatgtgaaatctagcaacctgcggggcgggcgcgcaccctgcgctggatgggggtccggcatgaagggcattccttcatcccttgcttctcatggaggtcgctgcatttggcacagaccacctggtgggcgcaagggaggaacaccacggacatctcctcactcaagcacatgacgcactcccggtcacgctgtatatcatcaaaactgggatcttggggtactgctatgttggacaaaatttgggcactgctgttctttctcccttcagaaagatgcaatgcatatgttttattgtcagcaccccacttgggggcagcaacctttgaagagtccaaagaaaccttcatctgtgcaatacgctgctcaagagcacggatctcactcttgtatctttctgtgtcattcgctgctttaagatgcagtaaattctcttctgacctcatggaggtctcaatttgctccctctctttcttctttgaggttacaagggcaattacctcaatctttccagcttcctcttgtttccatcttgcctgcaagtattcaaaaccatagagaacaccaaagatgtgatgataactaagtagatatagcaagtagcaattttataacactaacaagactttatacaagtgtatacatagaattaatcatcactcagcacaaaatagcaagcacaatcaattcaaattgaattcaaaaagaaaaatccatgaagcacaatcggcacatgtcctttttttaagtctcgagaaggaataacaatattggccattaatgaaccttgtacagggatggtatagaacacctcaagccagatttactagtagtctgcaataagccagcttctgtactattattcagtgtcttgacttgctaatctaaagaagtatcaagtgattcttgtgtctacgtaatttccatcccaacatctgaaaggtacgagatataaggaaggttttcataacatgccaaactcaacagatggtcagagaaaccataaaggtgctatggaatggagacaatggcctgtttaaacaacaaatttattagatatcatatacaaatagtcaaatatgcaatcttgtttcaactttatctaatgttgtaaacagttgacaaatagctagtaattaagtgcaaatgccatataaagctccaaacttcttccagaaacttctacatgcaaaagtttgcagcttactcctctacctgggttagttaggtggcttgagacagaaccagcccgggaattttgaaggctctgtgacaaatctaatattaggccctaaacttatttataatatgtaatggtaatgcacacatattgcttgaaaatatgtctttctttctttctttccaaacatgtcttcaaaatatcaattaacccttatttcaaaagaactattcatcgactaattgttaaatcattttaggaccatgctttaataaaactgttctgttttagaattcgttgcatcctaataagttagaccaacctgttagggagtcagggactcctttattggccggcaatatcacaggcgtcgcaggcaaaagccagagcaaggagagtccagataagtcactatacatactagagttcagagttcattaagtaggagatgggataggagatattagttgtttttggatctgttagtactgggagtttgttagagataaaataggggtgtcagtcttataaggaaagatag

SEQ ID NO: 22312 - DNA, 928 bp, Zea Mays
ctccatttttaggacatcaatacctacagatgattgcaacagggcatagcaacatcgatcaaaaggtttcctgccaagcattgcacagaatgacatccataccaaacagtacagacaggactaagaagcagagtgcaacaaaaccaaagcattcagaagcggccggtatatccatataacaaacccaaccagtacccactgtccgctggggcttgtttgatgtttaacgatgtattattgtccaagtttcaccactcacatcccccccattattctctccaatcttccatcaactcaagctgagcaatcaaggtaaaacaaaaaaaacaggataaaatccaaatggtatatgtgaaatctagcaacctgcggggcgggcgcgcaccctgcgctggatgggggtccggcatgaagggcattccttcatcccttgcttctcatggaggtcgctgcatttggcacagaccacctggtgggcgcaagggaggaacaccacggacatctcctcactcaagcacatgacgcactcccggtcacgctgtatatcatcaaaactgggatcttggggtactgctatgttggacaaaatttgggcactgctgttctttctcccttcagaaagatgcaatgcatatgttttattgtcagcaccccacttgggggcagcaacctttgaagagtccaaagaaaccttcatctgtgcaatacgctgctcaagagcacggatctcactcttgtatctttctgtgtcattcgctgctttaagatgcagtaaattctcttctgacctcatggaggtctcaatttgctccctctctttcttctttgaggttacaagggcaattacctcaatctttccagcttcctcttgtttccatcttgcctgcacttgatcctttagctctttagcatgctgaaggtgttcttg

SEQ ID NO: 22313 - DNA, 1164 bp, Zea Mays
atgtcaagaaaagccgtccgcagctactatctgcatgctaaaggtttaggtagcatgccaggaccaagaccccaggaaacacaaaacaagggacctgtttttgcaagaaccagggttcaagacatggttggcagcctcacttggaggtgttaccaccgtgctatgaccatgtttctctatgaaggcataagattgtatcacataataatagtcttgagttgctcaccgaagttcagaaaaccaacagcaattgtgcaaatgacatactggtacaggtatccattaactcaaagattatatcacataaatatatggagcatagtctcaagttgctacccaagtttggaaaaccagcagtagttatgcaaattattaagctaatatcatggacactgtttgtcttgttctaaatgttattttgagcctgctccaatcaaactagattcattttattaactattgatgctccttcgaccagatttagctagctgatctagaagaacatggattaattaatctaacagactacagtttttccccgatatgaacttcaactgtagttcatctagacttgcatatactggtaaaagattcacatcaataatacagggaaaaactaatgggctaagtcaaactgtgtagcttagaaagattaggcacaaccccacaggaaataaattcactttccaaaaccatcatatgcatctgccacaacccccaatgtatgttgaaggacagacaaagaagaaagctattccctccattccaaattacaaaatgttttgtttttttctagatacattacttttagtatgtatatgtctaaatagtaaatacataaaagtaatgtaactgaaagaacggaagccgttcggctgcctttaagccagccgcttgggcagctgaaactgttcggctggcagcgtgcacagtattttgtctcaaaaaaaacgctagcagcagcagccgaagcagcttgctttaagccagtcgaaggtcttataatttggaacagagagagtatatgacatcattactgcaaccctcaagcaactggcaattgcatgagattgcactacagtcccaaacagaaaactcatgcctttatggacaattgttgcaggctaatagtaattgataatcatctgaggcactataataaag

SEQ ID NO: 22314 - DNA, 1069 bp, Zea Mays
aaagccacctcctccagcgccccacccgccagaggcccgatcgtcccacactcccaccacgcgacaggaacacaaaaaccctagcacaagcccacacgacgccacccggccccggacggccggcccccccgtcccacgttcccaccgggctccgagcacaaaaccctaaccttctcgctattaaagtcggcgtccagtccgtcggctgctgctacgccaccgaatccgcatctcctcgccggtcgcgcacgggcaaagcagcgatggcagcagcgacggcagttggcggacacgacagggtggaggctgcggcgtcgtccgcgggggctgtgctggccgtcgccgttgcctcgcagaggctgggtcagatgatgatgatgacgatgaagacgatgaagatgaagatgaagatgatgatgatgatgatgatgatgatgatgagggtggggggagtgatgatgacgacgatgataacgatggtgatgatgatggtaacgatgatgacgacgatgaagatgatgacgaagatgaagatgaagaggatgacgacgatgaggaagaacagccaccttccaagaagaagaagtgatttgctctttcatggattcacctcagcttctccatgctgttagttgtgttgtttagatcatggaacagctttgggacaaatgttgcttgtcatggtattatagtgtaggaaaccttgacatctgatgttaaatcgttatcctactttctcctctgcatgtagtcttaattgtgtgttttagatttttactttattggagctgtgattgtgtcatgccattcagttttattctgctgaggccagtgtcatgccattcaatttatttcttttactgaggcctgagcactcaggcctggattgtatgtgatgctatgtctgttactgagaaggttgagccaggccagaattgtatttgatgagttgcagattcttgagcatcttgtaatgtgcttcaaacatcgtgcaatgtgctttggacatgtatactatgaaccgttgcccatattcatggtttgacttacatacacctcttggtccgaa

SEQ ID NO: 22315 - DNA, 1199 bp, Zea Mays
aaagccacctcctccagcgccccacccgccagaggcccgatcgtcccacactcccaccacgcgacaggaacacaaaaaccctagcacaagcccacacgacgccacccggccccggacggccggcccccccgtcccacgttcccaccgggctccgagcacaaaaccctaaccttctcgctattaaagtcggcgtccagtccgtcggctgctgctacgccaccgaatccgcatctcctcgccggtcgcgcacgggcaaagcagcgatggcagcagcgacggcagttggcggacacgacagggtggaggctgcggcgtcgtccgcgggggctgtgctggccgtcgccgttgcctcgcagaggttgataggcctgctcgctcttgcggttcaaactgtaaattgtgtagcagaaatatataatgaagaccagcaggaaatatacaagttattatatggaagaatcaaatctgaaaatgtccctgaaattaaggctgggtcagatgatgatgatgacgatgaagacgatgaagatgaagatgaagatgatgatgatgatgatgatgatgatgatgagggtggggggagtgatgatgacgacgatgataacgatggtgatgatgatggtaacgatgatgacgacgatgaagatgatgacgaagatgaagatgaagaggatgacgacgatgaggaagaacagccaccttccaagaagaagaagtgatttgctctttcatggattcacctcagcttctccatgctgttagttgtgttgtttagatcatggaacagctttgggacaaatgttgcttgtcatggtattatagtgtaggaaaccttgacatctgatgttaaatcgttatcctactttctcctctgcatgtagtcttaattgtgtgttttagatttttactttattggagctgtgattgtgtcatgccattcagttttattctgctgaggccagtgtcatgccattcaatttatttcttttactgaggcctgagcactcaggcctggattgtatgtgatgctatgtctgttactgagaaggttgagccaggccagaattgtatttgatgagttgcagattcttgagcatcttgtaatgtgcttcaaacatcgtgcaatgtgctttggacatgtatactatgaaccgttgcccatattcatggtttgacttacatacacctcttggtccgaa

SEQ ID NO: 22316 - DNA, 6283 bp, Zea Mays
gcaaacccatcatctcggcgtctggccgcctgacgcgacaagacaatcaaaagcgagcccgaccaaagcgccatgcgtccccactccccccaccccacacacacgctgctgcagtaaacccgccgctgcgcgagcgcaggttaccccattactccatgtccccacgccggcagcagcgggcgtcccttaccgcttgcaaaatcacttttcacctctcacattctcatcctctcctcgctgcggttagccgggtcaccaaccaccgactcaactgaaccacgcccctcgctgccgcggcgccgcgctatggacgttgaaatgctgccgtacgggattatttcgacgtttcattgcttgagtgtccgtacttcgccgctaaacatggcgttgttaccgtgcgtgtacatgcagatggacggcgtcactctgcgccacctgctccgccccttcgccgcgcaggaggccgcggcggccggccgagtggcagcagcgccagagcagctgttcgcaagtcattcgaccctgcaatccgggccgcctccgagagtggggccgagcaatgagttgcttactcaagttccggggaactattgcactttcgatcttgcgccggacctcactcgggcaaatgcgagcaatgctgctggtaccattgattttactcgggctggtccctccagcagtgctgccactctgcccaagtatccgagacatggattgccagctagcagtagcaatgagcagtcctcttttggagcgcttttcccgaacagaagtgctaatggaatgggtatttttacttgtcaaagttcggctaacgaaggaatagcaaatgttggtgtgcagtttcaggactcaagtgtccatggactgcagaaattgccattcaaatcgatgactcatcagcatcctacactgcctggtgatcgaatccgtgtcacctgtatgaatgttggcggagagttttttgtgggcgaagctgggctttttggagttatctgcttgtgtcatcggttgcgaatgtctgtagctaaattctgcgagcatgctggaggaattccagaaaaagctggtgaaattgtctgcttggagaatggcatgagtattgcacaatggttcaaattctgcataggggtcggaggatctattgctaacaccaggtgggattggccggaatgggcacatatgaaaagttctccagaagagcacatattgaaaagtcttgcatcaagaaacagtggaacaggaaaaatggggttgttaagtagatatggaaaaatcactggacatatgaacaaaccggcttattccaatgatctgtccgttgagggtggagggcacactaatgttgagaagctagtaaacaggacagatgaaacatattacagaaagagtgttgatgtgcatgaaacttttacaaagaactctgctttacttcagaattccgctgtggtgaatttagggcccgctaaaaaccatccagttcatgcattcgacttgaacccacttaccactcctagtggaagcccacactttgaagcaagcatgggaagacattacaatggaaatcatttggcccatagtcatggaatccatttggagaaaaactttgatgcgtcattttgtaatcctatgccacgttttacaggagttatgaaccatgatagtagggcgtgcagaccaaatttctccaataaaacattccaggacacttcaacgatgattgaatttcagaaaccccaaacacataggcctccgataaatcaaaatccttctccaaagcaagcaacaaagatcagcaaaagtctatccgaacataatgaaccatccattagtaccggaaataagaagcaaccacttgaagttgttaatggcatgaagcgttctgaaggtgatgagcttacagatgatacatccaagaattcatttatctcattatttctttcacaccttgagaggaataatacacccgaacccatcgatgacattctcaacagtaatgagcactatcttcctaaggccctggatgttgcatgtggttctgatcatccagaaagtgccactagacagattgaaacaagggtgcctaatgataagcactcaaagttggcctcagccattgttcatacgaaaaggagatcagagggcatttctctttcagtggcttcttctggatataatcctcaagatgcatcccatgctaatagtcaggaacacttgattcatggtgattccttgtcacatttgctgcctagtcaacctaacaccggaatctcgaaaatttctgcaagggtttcatgtcatgcaaattgcatgagctgcattcacgtgggtaataaatcccatcaggttgcacatggtgagattggggttccctgtttctatgataaaatggccaggggccatggtacttttgagcgagttgatgactgcacacatagaagtttgagagctttcacaaaaatcagttgcgataatgggaaatcttgttgttcttctcgtgagcttctacctagcttttgccaaaatgatcagccaacattgggaaaatcgatttgtggatgctgttgcaaaattcaggaagatgcttccaagcttggttttatacctggtcacatgtgcagaactcatttttctagtgatgttggtccagttctagccaataagcctactattgaagggctagatgaattttgtgcttgcagttgctccacttttacacaacgatcatcattatgttctcgggaatacgtcttgcagtcttcctgtgactcatgtcccattaatggactgcactgcagaagttgtatgggacatgcagcagatagcttaacaaaacactctctgtttgatcctcttaatacaaaagaacgaggttcttgttgcaatggaagatgctgctactctgtagtcccaaaatgtttgtctagttgtgactttacaaaacactgtgatgtcataattgaccaaataggtcatgctgcacctaaagataaccatcagctgcaaatgcctaccagatgctgcacactgggggagaatgagaagttaatatgccaatgcttaagcaataaaatagctgtaagaaacttgcctcaaacttctcattgtaaagatgtctctgagaaagtaatgaaccagccttctattgctataacggagagactggagaatgtatcagaaccttcagtggctgatgacagttcatccaaagctgtagcagagaaaaaggatgcttatagagattctgcagtatctaaaggacagccaaattttggtttctcatctgggtcgtccagcattatagtgacaaagttccagaaatcacctgaatttaacaatgtatcctctactgctaaacatagcaaacataaaaatctgtgtgatgaaggatcaagaattgagaaaagttcagcatccagctatgtgcctaccagtacaggatgtgaagaacccctaaatagttctgccaaatctgagctgggtccatcaagagtgaagcgcaaatgtaatcagatttctgagggaaggagactggaagaaacagataatgaggaacattgttctgaactgctaaaaaagactagaacactgaggtgctctgttaaaggttctgaatcagatgattgtactagggctagttcccagtcgtcccagaagggggtttatcaaccacaaaatgaggttaactcattttcttgcagggtgttgagaaccaagcgaaaacatcctattatgcatctaaataagcatgtgaaacagcttcacagacagaccaagttttttgaaggtgatgagcaaccagatgccaagggcaattttcttggtggattagattcctatgatagaaagaggcaagtagaggatatgagcactctggataaaacaagacatcaccaggaagggagtcgagcatttgtccgcaaacttcctaaatatgtgtctctgaattgcattgttaatgaaccgaatactaacagtgaaggtgcttgcagtgggagtggtgggattgattctagtttaattgctacagggattacaaacgataacaggaaatctcccaaaattgttcctctcaatctggttcttaaaaaggctaagagatgcaatgctgttaaactccgtaagacagaaagcacccacttgtatgaggagaaaagctcagattgttctgtgaacagctcagattattctatagaaaagtattccgttgatgatgaaaattgcagcccacaagctgaatatgaactgcaggattccaaaaggagtaggtattcatctaatgatctgaggtcacatgtggctctccacaaaagaacatctggtggaaccaagaatcgaagaacaagtgtatcccttgccaggattaagaaattcgggagcaaatcagtatgctattctggcagtgacaaagacaatgctgtgctagcccatgaagtgaatgctaggagatacagtggaagactcagctcaaattctccatgctgtgtttgtgggatctcagacctggagccttgcaatcgattaatagagtgcagcaagtgctatatcaaagtgcaccaagcctgctatggtgtactaaaagttcctaggggtcaatggttttgcagaccgtgcaagaataataccatggatacagtctgtgtgctgtgtggttatggaggtggagctatgacaagggcactgaaaaccaagaatattttgaaaagtttgctccaaggtttgatgaatttagaaaggtcagaatattatgttgattccttaggaaatgcaagcagtgagtgtacaagcttgcaaaatccagtagacagtgcacatggggataacattatgaatgcgaagaacatcaccagcaattcctggacctctggaaaatactattcgagtttacttggaccacaaccaatgcagtgggttcacatggtctgtgggctgtggacacctggcacaaaatgcccaaatgacaccacaatgagcgcttttgatgtttcaggtgcttcacctgccaagagaaatactgcatgttcaatatgtgacagaactgggggctcatttgtcaagtgccgagctgtaaattgtttggtattctttcatgcttggtgtgcacatcagaggggtttgctgcaaagtgagcctgaaggcgagcacaatgaaaatattggcttttatgggcgatgcgtgtctcacgccattgttttttctagtcacgttaatcctaagaaagaatactttagaaacaacaattggacatgtgcacgtacagagggttttaaaggccgaaagggagaaggcttttctgatagtagccataaaaaatatgaagagtacagtggcgagttcggtgtttcccaagaacagataaatgcttggttacgcataaatggttcaaagccctgcggacgaggacagaaggagtacatccattacaagcagttaaaagggtggaagcatttggttgtttacaaatctggcatacatggacttggtctctacacatcagtctttattccacgcggctctatggttgtagaatatgtgggtgaaattgttgggcaacgggttgctgacagaagagagatcgaataccagtccgggaaacggcaacaatataagagtgcatgttatttctttaagattgacagggagcatattattgatgccacccgcaaaggtgggattgcaagattcgtcaatcattcatgccagccaaactgcgttgcgaaaataatctcagtcaggaatgagaagaaggtaatgttctttgcagaacggcacataaacccaggggaggaaattacgtacgattaccacttcaaccgggaagatgaaggccagaggatcctttgcttttgtagatcaagatactgcaggcggtacctcaattagtttccggtgggcgtaacatgtctatatataacttatatatctatatgtatatcttatatatttacaaattacaattgcgattcatgcctgctgtatatgtaggaacttgcatctagaactgcctgtttatcttttgtgaagtcaaatgagttatcagctgttcatgtgacactgaataacaaaagcataaaaagtgtcactatctcgtttatgagaaatcatgcgcctaatctgaatgatggatgatccagtgatctactttggcaagaagggcttgaggtcagacttgtccacctgaagctttgttgagatggcctcgatctgctgattcctgcaaatccaagagccatccatctttgggaaacagaatatataaaaaaaaatgaccaataacaga

SEQ ID NO: 22317 - DNA, 6048 bp, Zea Mays
atggacgttgaaatgctgccgtacgggattatttcgacgtttcattgcttgagtgtccgtacttcgccgctaaacatggcgttgttaccgtgcgtgtacatgcagatggacggcgtcactctgcgccacctgctccgccccttcgccgcgcaggaggccgcggcggccggccgagtggcagcagcgccagagcagctgttcgcaagtcattcgaccctgcaatccgggccgcctccgagagtggggccgagcaatgagttgcttactcaagttccggggaactattgcactttcgatcttgcgccggacctcactcgggcaaatgcgagcaatgctgctggtaccattgattttactcgggctggtccctccagcagtgctgccactctgcccaagtatccgagacatggattgccagctagcagtagcaatgagcagtcctcttttggagcgcttttcccgaacagaagtgctaatggaatgggtatttttacttgtcaaagttcggctaacgaaggaatagcaaatgttggtgtgcagtttcaggactcaagtgtccatggactgcagaaattgccattcaaatcgatgactcatcagcatcctacactgcctggtgatcgaatccgtgtcacctgtatgaatgttggcggagagttttttgtgggcgaagctgggctttttggagttatctgcttgtgtcatcggttgcgaatgtctgtagctaaattctgcgagcatgctggaggaattccagaaaaagctggtgaaattgtctgcttggagaatggcatgagtattgcacaatggttcaaattctgcataggggtcggaggatctattgctaacaccaggtgggattggccggaatgggcacatatgaaaagttctccagaagagcacatattgaaaagtcttgcatcaagaaacagtggaacaggaaaaatggggttgttaagtagatatggaaaaatcactggacatatgaacaaaccggcttattccaatgatctgtccgttgagggtggagggcacactaatgttgagaagctagtaaacaggacagatgaaacatattacagaaagagtgttgatgtgcatgaaacttttacaaagaactctgctttacttcagaattccgctgtggtgaatttagggcccgctaaaaaccatccagttcatgcattcgacttgaacccacttaccactcctagtggaagcccacactttgaagcaagcatgggaagacattacaatggaaatcatttggcccatagtcatggaatccatttggagaaaaactttgatgcgtcattttgtaatcctatgccacgttttacaggagttatgaaccatgatagtagggcgtgcagaccaaatttctccaataaaacattccaggacactttgagcaatgcttcaaacactgaattaaagcttgggcaatcttcttatcatcaatctatgactactctttccccattggggcaatcaacgatgattgaatttcagaaaccccaaacacataggcctccgataaatcaaaatccttctccaaagcaagcaacaaagatcagcaaaagtctatccgaacataatgaaccatccattagtaccggaaataagaagcaaccacttgaagttgttaatggcatgaagcgttctgaaggtgatgagcttacagatgatacatccaagaattcatttatctcattatttctttcacaccttgagaggaataatacacccgaacccatcgatgacattctcaacagtaatgagcactatcttcctaaggccctggatgttgcatgtggttctgatcatccagaaagtgccactagacagattgaaacaagggtgcctaatgataagcactcaaagttggcctcagccattgttcatacgaaaaggagatcagagggcatttctctttcagtggcttcttctggatataatcctcaagatgcatcccatgctaatagtcaggaacacttgattcatggtgattccttgtcacatttgctgcctagtcaacctaacaccggaatctcgaaaatttctgcaagggtttcatgtcatgcaaattgcatgagctgcattcacgtgggtaataaatcccatcaggttgcacatggtgagattggggttccctgtttctatgataaaatggccaggggccatggtacttttgagcgagttgatgactgcacacatagaagtttgagagctttcacaaaaatcagttgcgataatgggaaatcttgttgttcttctcgtgagcttctacctagcttttgccaaaatgatcagccaacattgggaaaatcgatttgtggatgctgttgcaaaattcaggaagatgcttccaagcttggttttatacctggtcacatgtgcagaactcatttttctagtgatgttggtccagttctagccaataagcctactattgaagggctagatgaattttgtgcttgcagttgctccacttttacacaacgatcatcattatgttctcgggaatacgtcttgcagtcttcctgtgactcatgtcccattaatggactgcactgcagaagttgtatgggacatgcagcagatagcttaacaaaacactctctgtttgatcctcttaatacaaaagaacgaggttcttgttgcaatggaagatgctgctactctgtagtcccaaaatgtttgtctagttgtgactttacaaaacactgtgatgtcataattgaccaaataggtcatgctgcacctaaagataaccatcagctgcaaatgcctaccagatgctgcacactgggggagaatgagaagttaatatgccaatgcttaagcaataaaatagctgtaagaaacttgcctcaaacttctcattgtaaagatgtctctgagaaagtaatgaaccagccttctattgctataacggagagactggagaatgtatcagaaccttcagtggctgatgacagttcatccaaagctgtagcagagaaaaaggatgcttatagagattctgcagtatctaaaggacagccaaattttggtttctcatctgggtcgtccagcattatagtgacaaagttccagaaatcacctgaatttaacaatgtatcctctactgctaaacatagcaaacataaaaatctgtgtgatgaaggatcaagaattgagaaaagttcagcatccagctatgtgcctaccagtacaggatgtgaagaacccctaaatagttctgccaaatctgagctgggtccatcaagagtgaagcgcaaatgtaatcagatttctgagggaaggagactggaagaaacagataatgaggaacattgttctgaactgctaaaaaagactagaacactgaggtgctctgttaaaggttctgaatcagatgattgtactagggctagttcccagtcgtcccagaagggggtttatcaaccacaaaatgaggttaactcattttcttgcagggtgttgagaaccaagcgaaaacatcctattatgcatctaaataagcatgtgaaacagcttcacagacagaccaagttttttgaaggtgatgagcaaccagatgccaagggcaattttcttggtggattagattcctatgatagaaagaggcaagtagaggatatgagcactctggataaaacaagacatcaccaggaagggagtcgagcatttgtccgcaaacttcctaaatatgtgtctctgaattgcattgttaatgaaccgaatactaacagtgaaggtgcttgcagtgggagtggtgggattgattctagtttaattgctacagggattacaaacgataacaggaaatctcccaaaattgttcctctcaatctggttcttaaaaaggctaagagatgcaatgctgttaaactccgtaagacagaaagcacccacttgtatgaggagaaaagctcagattgttctgtgaacagctcagattattctatagaaaagtattccgttgatgatgaaaattgcagcccacaagctgaatatgaactgcaggattccaaaaggagtaggtattcatctaatgatctgaggtcacatgtggctctccacaaaagaacatctggtggaaccaagaatcgaagaacaagtgtatcccttgccaggattaagaaattcgggagcaaatcagtatgctattctggcagtgacaaagacaatgctgtgctagcccatgaagtgaatgctaggagatacagtggaagactcagctcaaattctccatgctgtgtttgtgggatctcagacctggagccttgcaatcgattaatagagtgcagcaagtgcaccaagcctgctatggtgtactaaaagttcctaggggtcaatggttttgcagaccgtgcaagaataataccatggatacagtctgtgtgctgtgtggttatggaggtggagctatgacaagggcactgaaaaccaagaatattttgaaaagtttgctccaaggtttgatgaatttagaaaggtcagaatattatgttgattccttaggaaatgcaagcagtgagtgtacaagcttgcaaaatccagtagacagtgcacatggggataacattatgaatgcgaagaacatcaccagcaattcctggacctctggaaaatactattcgagtttacttggaccacaaccaatgcagtgggttcacatggtctgtgggctgtggacacctggcacaaaatgcccaaatgacaccacaatgagcgcttttgatgtttcaggtgcttcacctgccaagagaaatactgcatgttcaatatgtgacagaactgggggctcatttgtcaagtgccgagctgtaaattgtttggtattctttcatgcttggtgtgcacatcagaggggtttgctgcaaagtgagcctgaaggcgagcacaatgaaaatattggcttttatgggcgatgcgtgtctcacgccattgttttttctagtcacgttaatcctaagaaagaatactttagaaacaacaattggacatgtgcacgtacagagggttttaaaggccgaaagggagaaggcttttctgatagtagccataaaaaatatgaagagtacagtggcgagttcggtgtttcccaagaacagataaatgcttggttacgcataaatggttcaaagccctgcggacgaggacagaaggagtacatccattacaagcagttaaaagggtggaagcatttggttgtttacaaatctggcatacatggacttggtctctacacatcagtctttattccacgcggctctatggttgtagaatatgtgggtgaaattgttgggcaacgggttgctgacagaagagagatcgaataccagtccgggaaacggcaacaatataagagtgcatgttatttctttaagattgacagggagcatattattgatgccacccgcaaaggtgggattgcaagattcgtcaatcattcatgccagccaaactgcgttgcgaaaataatctcagtcaggaatgagaagaaggtaatgttctttgcagaacggcacataaacccaggggaggaaattacgtacgattaccacttcaaccgggaagatgaaggccagaggatcctttgcttttgtagatcaagatactgcaggcggtacctcaattagtttccggtgggcgtaacatgtctatatataacttatatatctatatgtatatcttatatatttacaaattacaattgcgattcatgcctgctgtatatgtaggaacttgcatctagaactgcctgtttatcttttgtgaagtcaaatgagttatcagctgttcatgtgacactgaataacaaaagcataaaaagtgtcactatctcgtttatgagaaatcatgcgcctaatctgaatgatggatgatccagtgatctactttggcaagaagggcttgaggtcagacttgtccacctgaagctttgttgagatggcctcgatctgctgattcctgcaaatccaagagccatccatctttgggaaacagaatatataaaaaaaaatgaccaataacaga

SEQ ID NO: 22318 - DNA, 6032 bp, Zea Mays
atggacgttgaaatgctgccgtacgggattatttcgacgtttcattgcttgagtgtccgtacttcgccgctaaacatggcgttgttaccgtgcgtgtacatgcagatggacggcgtcactctgcgccacctgctccgccccttcgccgcgcaggaggccgcggcggccggccgagtggcagcagcgccagagcagctgttcgcaagtcattcgaccctgcaatccgggccgcctccgagagtggggccgagcaatgagttgcttactcaagttccggggaactattgcactttcgatcttgcgccggacctcactcgggcaaatgcgagcaatgctgctggtaccattgattttactcgggctggtccctccagcagtgctgccactctgcccaagtatccgagacatggattgccagctagcagtagcaatgagcagtcctcttttggagcgcttttcccgaacagaagtgctaatggaatgggtatttttacttgtcaaagttcggctaacgaaggaatagcaaatgttggtgtgcagtttcaggactcaagtgtccatggactgcagaaattgccattcaaatcgatgactcatcagcatcctacactgcctggtgatcgaatccgtgtcacctgtatgaatgttggcggagagttttttgtgggcgaagctgggctttttggagttatctgcttgtgtcatcggttgcgaatgtctgtagctaaattctgcgagcatgctggaggaattccagaaaaagctggtgaaattgtctgcttggagaatggcatgagtattgcacaatggttcaaattctgcatagggctttttctttgtcggaggatctattgctaacaccaggtgggattggccggaatgggcacatatgaaaagttctccagaagagcacatattgaaaagtcttgcatcaagaaacagtggaacaggaaaaatggggttgttaagtagatatggaaaaatcactggacatatgaacaaaccggcttattccaatgatctgtccgttgagggtggagggcacactaatgttgagaagctagtaaacaggacagatgaaacatattacagaaagagtgttgatgtgcatgaaacttttacaaagaactctgctttacttcagaattccgctgtggtgaatttagggcccgctaaaaaccatccagttcatgcattcgacttgaacccacttaccactcctagtggaagcccacactttgaagcaagcatgggaagacattacaatggaaatcatttggcccatagtcatggaatccatttggagaaaaactttgatgcgtcattttgtaatcctatgccacgttttacaggagttatgaaccatgatagtagggcgtgcagaccaaatttctccaataaaacattccaggacactttgagcaatgcttcaaacactgaattaaagcttgggcaatcttcttatcatcaatctatgactactctttccccattggggcaatcaacgatgattgaatttcagaaaccccaaacacataggcctccgataaatcaaaatccttctccaaagcaagcaacaaagatcagcaaaagtctatccgaacataatgaaccatccattagtaccggaaataagaagcaaccacttgaagttgttaatggcatgaagcgttctgaaggtgatgagcttacagatgatacatccaagaattcatttatctcattatttctttcacaccttgagaggaataatacacccgaacccatcgatgacattctcaacagtaatgagcactatcttcctaaggccctggatgttgcatgtggttctgatcatccagaaagtgccactagacagattgaaacaagggtgcctaatgataagcactcaaagttggcctcagccattgttcatacgaaaaggagatcagagggcatttctctttcagtggcttcttctggatataatcctcaagatgcatcccatgctaatagtcaggaacacttgattcatggtgattccttgtcacatttgctgcctagtcaacctaacaccggaatctcgaaaatttctgcaagggtttcatgtcatgcaaattgcatgagctgcattcacgtgggtaataaatcccatcaggttgcacatggtgagattggggttccctgtttctatgataaaatggccaggggccatggtacttttgagcgagttgatgactgcacacatagaagtttgagagctttcacaaaaatcagttgcgataatgggaaatcttgttgttcttctcgtgagcttctacctagcttttgccaaaatgatcagccaacattgggaaaatcgatttgtggatgctgttgcaaaattcaggaagatgcttccaagcttggttttatacctggtcacatgtgcagaactcatttttctagtgatgttggtccagttctagccaataagcctactattgaagggctagatgaattttgtgcttgcagttgctccacttttacacaacgatcatcattatgttctcgggaatacgtcttgcagtcttcctgtgactcatgtcccattaatggactgcactgcagaagttgtatgggacatgcagcagatagcttaacaaaacactctctgtttgatcctcttaatacaaaagaacgaggttcttgttgcaatggaagatgctgctactctgtagtcccaaaatgtttgtctagttgtgactttacaaaacactgtgatgtcataattgaccaaataggtcatgctgcacctaaagataaccatcagctgcaaatgcctaccagatgctgcacactgggggagaatgagaagttaatatgccaatgcttaagcaataaaatagctgtaagaaacttgcctcaaacttctcattgtaaagatgtctctgagaaagtaatgaaccagccttctattgctataacggagagactggagaatgtatcagaaccttcagtggctgatgacagttcatccaaagctgtagcagagaaaaaggatgcttatagagattctgcagtatctaaaggacagccaaattttggtttctcatctgggtcgtccagcattatagtgacaaagttccagaaatcacctgaatttaacaatgtatcctctactgctaaacatagcaaacataaaaatctgtgtgatgaaggatcaagaattgagaaaagttcagcatccagctatgtgcctaccagtacaggatgtgaagaacccctaaatagttctgccaaatctgagctgggtccatcaagagtgaagcgcaaatgtaatcagatttctgagggaaggagactggaagaaacagataatgaggaacattgttctgaactgctaaaaaagactagaacactgaggtgctctgttaaaggttctgaatcagatgattgtactagggctagttcccagtcgtcccagaagggggtttatcaaccacaaaatgaggttaactcattttcttgcagggtgttgagaaccaagcgaaaacatcctattatgcatctaaataagcatgtgaaacagcttcacagacagaccaagttttttgaaggtgatgagcaaccagatgccaagggcaattttcttggtggattagattcctatgatagaaagaggcaagtagaggatatgagcactctggataaaacaagacatcaccaggaagggagtcgagcatttgtccgcaaacttcctaaatatgtgtctctgaattgcattgttaatgaaccgaatactaacagtgaaggtgcttgcagtgggagtggtgggattgattctagtttaattgctacagggattacaaacgataacaggaaatctcccaaaattgttcctctcaatctggttcttaaaaaggctaagagatgcaatgctgttaaactccgtaagacagaaagcacccacttgtatgaggagaaaagctcagattgttctgtgaacagctcagattattctatagaaaagtattccgttgatgatgaaaattgcagcccacaagctgaatatgaactgcaggattccaaaaggagtaggtattcatctaatgatctgaggtcacatgtggctctccacaaaagaacatctggtgtcattggagaagatgactctcttggtctaacagatgtggaaataaattgcctgtcaatatcatcatcaagtaatggaaccaagaatcgaagaacaagtgtatcccttgccaggattaagaaattcgggagcaaatcagtatgctattctggcagtgacaaagacaatgctgtgctagcccatgaagtgaatgctaggagatacagtggaagactcagctcaaattctccatgctgtgtttgtgggatctcagacctggagccttgcaatcgattaatagagtgcagcaagtgctatatcaaagtgcaccaagcctgctatggtgtactaaaagttcctaggggtcaatggttttgcagaccgtgcaagaataataccatggatacagtctgtgtgctgtgtggttatggaggtggagctatgacaagggcactgaaaaccaagaatattttgaaaagtttgctccaaggtttgatgaatttagaaaggtcagaatattatgttgattccttaggaaatgcaagcagtgagtgtacaagcttgcaaaatccagtagacagtgcacatggggataacattatgaatgcgaagaacatcaccagcaattcctggacctctggaaaatactattcgagtttacttggaccacaaccaatgcagtgggttcacatggtctgtgggctgtggacacctggcacaaaatgcccaaatgacaccacaatgagcgcttttgatgtttcaggtgcttcacctgccaagagaaatactgcatgttcaatatgtgacagaactgggggctcatttgtcaagtgccgagctgtaaattgtttggtattctttcatgcttggtgtgcacatcagaggggtttgctgcaaagtgagcctgaaggcgagcacaatgaaaatattggcttttatgggcgatgcgtgtctcacgccattgttttttctagtcacgttaatcctaagaaagaatactttagaaacaacaattggacatgtgcacgtacagagggttttaaaggccgaaagggagaaggcttttctgatagtagccataaaaaatatgaagagtacagtggcgagttcggtgtttcccaagaacagataaatgcttggttacgcataaatggttcaaagccctgcggacgaggacaggttgtagaatatgtgggtgaaattgttgggcaacgggttgctgacagaagagagatcgaataccagtccgggaaacggcaacaatataagagtgcatgttatttctttaagattgacagggagcatattattgatgccacccgcaaaggtgggattgcaagattcgtcaatcattcatgccagccaaactgcgttgcgaaaataatctcagtcaggaatgagaagaaggtaatgttctttgcagaacggcacataaacccaggggaggaaattacgtacgattaccacttcaaccgggaagatgaaggccagaggatcctttgcttttgtagatcaagatactgcaggcggtacctcaattagtttccggtgggcgtaacatgtctatatataacttatatatctatatgtatatcttatatatttacaaattacaattgcgattcatgcctgctgtatatgtaggaacttgcatctagaactgcctgtttatcttttgtgaagtcaaatgagttatcagctgttcatgtgacactgaataacaaaagcataaaaagtgtcactatctcgtttatgagaaatcatgcgcctaatctgaatgatggatgatccagtgatctactttggcaagaagggcttgaggtcagacttgtccacctgaagctttgttgagatggcctcgatctgctgattcctgcaaatccaagagccatccatctttgggaaacagaatatataaaaaaaaatgaccaataacaga

SEQ ID NO: 22319 - DNA, 4792 bp, Zea Mays
atggacgttgaaatgctgccgtacgggattatttcgacgtttcattgcttgagtgtccgtacttcgccgctaaacatggcgttgttaccgtgcgtgtacatgcagatggacggcgtcactctgcgccacctgctccgccccttcgccgcgcaggaggccgcggcggccggccgagtggcagcagcgccagagcagctgttcgcaagtcattcgaccctgcaatccgggccgcctccgagagtggggccgagcaatgagttgcttactcaagttccggggaactattgcactttcgatcttgcgccggacctcactcgggcaaatgcgagcaatgctgctggtaccattgattttactcgggctggtccctccagcagtgctgccactctgcccaagtatccgagacatggattgccagctagcagtagcaatgagcagtcctcttttggagcgcttttcccgaacagaagtgctaatggaatgggtatttttacttgtcaaagttcggctaacgaaggaatagcaaatgttggtgtgcagtttcaggactcaagtgtccatggactgcagaaattgccattcaaatcgatgactcatcagcatcctacactgcctggtgatcgaatccgtgtcacctgtatgaatgttggcggagagttttttgtgggcgaagctgggctttttggagttatctgcttgtgtcatcggttgcgaatgtctgtagctaaattctgcgagcatgctggaggaattccagaaaaagctggtgaaattgtctgcttggagaatggcatgagtattgcacaatggttcaaattctgcataggggccaggggccatggtacttttgagcgagttgatgactgcacacatagaagtttgagagctttcacaaaaatcagttgcgataatgggaaatcttgttgttcttctcgtgagcttctacctagcttttgccaaaatgatcagccaacattgggaaaatcgatttgtggatgctgttgcaaaattcaggaagatgcttccaagcttggttttatacctggtcacatgtgcagaactcatttttctagtgatgttggtccagttctagccaataagcctactattgaagggctagatgaattttgtgcttgcagttgctccacttttacacaacgatcatcattatgttctcgggaatacgtcttgcagtcttcctgtgactcatgtcccattaatggactgcactgcagaagttgtatgggacatgcagcagatagcttaacaaaacactctctgtttgatcctcttaatacaaaagaacgaggttcttgttgcaatggaagatgctgctactctgtagtcccaaaatgtttgtctagttgtgactttacaaaacactgtgatgtcataattgaccaaataggtcatgctgcacctaaagataaccatcagctgcaaatgcctaccagatgctgcacactgggggagaatgagaagttaatatgccaatgcttaagcaataaaatagctgtaagaaacttgcctcaaacttctcattgtaaagatgtctctgagaaagtaatgaaccagccttctattgctataacggagagactggagaatgtatcagaaccttcagtggctgatgacagttcatccaaagctgtagcagagaaaaaggatgcttatagagattctgcagtatctaaaggacagccaaattttggtttctcatctgggtcgtccagcattatagtgacaaagttccagaaatcacctgaatttaacaatgtatcctctactgctaaacatagcaaacataaaaatctgtgtgatgaaggatcaagaattgagaaaagttcagcatccagctatgtgcctaccagtacaggatgtgaagaacccctaaatagttctgccaaatctgagctgggtccatcaagagtgaagcgcaaatgtaatcagatttctgagggaaggagactggaagaaacagataatgaggaacattgttctgaactgctaaaaaagactagaacactgaggtgctctgttaaaggttctgaatcagatgattgtactagggctagttcccagtcgtcccagaagggggtttatcaaccacaaaatgaggttaactcattttcttgcagggtgttgagaaccaagcgaaaacatcctattatgcatctaaataagcatgtgaaacagcttcacagacagaccaagttttttgaaggtgatgagcaaccagatgccaagggcaattttcttggtggattagattcctatgatagaaagaggcaagtagaggatatgagcactctggataaaacaagacatcaccaggaagggagtcgagcatttgtccgcaaacttcctaaatatgtgtctctgaattgcattgttaatgaaccgaatactaacagtgaaggtgcttgcagtgggagtggtgggattgattctagtttaattgctacagggattacaaacgataacaggaaatctcccaaaattgttcctctcaatctggttcttaaaaaggctaagagatgcaatgctgttaaactccgtaagacagaaagcacccacttgtatgaggagaaaagctcagattgttctgtgaacagctcagattattctatagaaaagtattccgttgatgatgaaaattgcagcccacaagctgaatatgaactgcaggattccaaaaggagtaggtattcatctaatgatctgaggtcacatgtggctctccacaaaagaacatctggtgtcattggagaagatgactctcttggtctaacagatgtggaaataaattgcctgtcaatatcatcatcaagtaatggaaccaagaatcgaagaacaagtgtatcccttgccaggattaagaaattcgggagcaaatcagtatgctattctggcagtgacaaagacaatgctgtgctagcccatgaagtgaatgctaggagatacagtggaagactcagctcaaattctccatgctgtgtttgtgggatctcagacctggagccttgcaatcgattaatagagtgcagcaagtgctatatcaaagtgcaccaagcctgctatggtgtactaaaagttcctaggggtcaatggttttgcagaccgtgcaagaataataccatggatacagtctgtgtgctgtgtggttatggaggtggagctatgacaagggcactgaaaaccaagaatattttgaaaagtttgctccaaggtttgatgaatttagaaaggtcagaatattatgttgattccttaggaaatgcaagcagtgagtgtacaagcttgcaaaatccagtagacagtgcacatggggataacattatgaatgcgaagaacatcaccagcaattcctggacctctggaaaatactattcgagtttacttggaccacaaccaatgcagtgggttcacatggtctgtgggctgtggacacctggcacaaaatgcccaaatgacaccacaatgagcgcttttgatgtttcaggtgcttcacctgccaagagaaatactgcatgttcaatatgtgacagaactgggggctcatttgtcaagtgccgagctgtaaattgtttggtattctttcatgcttggtgtgcacatcagaggggtttgctgcaaagtgagcctgaaggcgagcacaatgaaaatattggcttttatgggcgatgcgtgtctcacgccattgttttttctagtcacgttaatcctaagaaagaatactttagaaacaacaattggacatgtgcacgtacagagggttttaaaggccgaaagggagaaggcttttctgatagtagccataaaaaatatgaagagtacagtggcgagttcggtgtttcccaagaacagataaatgcttggttacgcataaatggttcaaagccctgcggacgaggacagaaggagtacatccattacaagcagttaaaagggtggaagcatttggttgtttacaaatctggcatacatggacttggtctctacacatcagtctttattccacgcggctctatggttgtagaatatgtgggtgaaattgttgggcaacgggttgctgacagaagagagatcgaataccagtccgggaaacggcaacaatataagagtgcatgttatttctttaagattgacagggagcatattattgatgccacccgcaaaggtgggattgcaagattcgtcaatcattcatgccagccaaactgcgttgcgaaaataatctcagtcaggaatgagaagaaggtaatgttctttgcagaacggcacataaacccaggggaggaaattacgtacgattaccacttcaaccgggaagatgaaggccagaggatcctttgcttttgtagatcaagatactgcaggcggtacctcaattagtttccggtgggcgtaacatgtctatatataacttatatatctatatgtatatcttatatatttacaaattacaattgcgattcatgcctgctgtatatgtaggaacttgcatctagaactgcctgtttatcttttgtgaagtcaaatgagttatcagctgttcatgtgacactgaataacaaaagcataaaaagtgtcactatctcgtttatgagaaatcatgcgcctaatctgaatgatggatgatccagtgatctactttggcaagaagggcttgaggtcagacttgtccacctgaagctttgttgagatggcctcgatctgctgattcctgcaaatccaagagccatccatctttgggaaacagaatatataaaaaaaaatgaccaataacaga

SEQ ID NO: 22320 - DNA, 6077 bp, Zea Mays
atggacgttgaaatgctgccgtacgggattatttcgacgtttcattgcttgagtgtccgtacttcgccgctaaacatggcgttgttaccgtgcgtgtacatgcagatggacggcgtcactctgcgccacctgctccgccccttcgccgcgcaggaggccgcggcggccggccgagtggcagcagcgccagagcagctgttcgcaagtcattcgaccctgcaatccgggccgcctccgagagtggggccgagcaatgagttgcttactcaagttccggggaactattgcactttcgatcttgcgccggacctcactcgggcaaatgcgagcaatgctgctggtaccattgattttactcgggctggtccctccagcagtgctgccactctgcccaagtatccgagacatggattgccagctagcagtagcaatgagcagtcctcttttggagcgcttttcccgaacagaagtgctaatggaatgggtatttttacttgtcaaagttcggctaacgaaggaatagcaaatgttggtgtgcagtttcaggactcaagtgtccatggactgcagaaattgccattcaaatcgatgactcatcagcatcctacactgcctggtgatcgaatccgtgtcacctgtatgaatgttggcggagagttttttgtgggcgaagctgggctttttggagttatctgcttgtgtcatcggttgcgaatgtctgtagctaaattctgcgagcatgctggaggaattccagaaaaagctggtgaaattgtctgcttggagaatggcatgagtattgcacaatggttcaaattctgcatagggctttttctttgtcggaggatctattgctaacaccaggtgggattggccggaatgggcacatatgaaaagttctccagaagagcacatattgaaaagtcttgcatcaagaaacagtggaacaggaaaaatggggttgttaagtagatatggaaaaatcactggacatatgaacaaaccggcttattccaatgatctgtccgttgagggtggagggcacactaatgttgagaagctagtaaacaggacagatgaaacatattacagaaagagtgttgatgtgcatgaaacttttacaaagaactctgctttacttcagaattccgctgtggtgaatttagggcccgctaaaaaccatccagttcatgcattcgacttgaacccacttaccactcctagtggaagcccacactttgaagcaagcatgggaagacattacaatggaaatcatttggcccatagtcatggaatccatttggagaaaaactttgatgcgtcattttgtaatcctatgccacgttttacaggagttatgaaccatgatagtagggcgtgcagaccaaatttctccaataaaacattccaggacactttgagcaatgcttcaaacactgaattaaagcttgggcaatcttcttatcatcaatctatgactactctttccccattggggcaatcaacgatgattgaatttcagaaaccccaaacacataggcctccgataaatcaaaatccttctccaaagcaagcaacaaagatcagcaaaagtctatccgaacataatgaaccatccattagtaccggaaataagaagcaaccacttgaagttgttaatggcatgaagcgttctgaaggtgatgagcttacagatgatacatccaagaattcatttatctcattatttctttcacaccttgagaggaataatacacccgaacccatcgatgacattctcaacagtaatgagcactatcttcctaaggccctggatgttgcatgtggttctgatcatccagaaagtgccactagacagattgaaacaagggtgcctaatgataagcactcaaagttggcctcagccattgttcatacgaaaaggagatcagagggcatttctctttcagtggcttcttctggatataatcctcaagatgcatcccatgctaatagtcaggaacacttgattcatggtgattccttgtcacatttgctgcctagtcaacctaacaccggaatctcgaaaatttctgcaagggtttcatgtcatgcaaattgcatgagctgcattcacgtgggtaataaatcccatcaggttgcacatggtgagattggggttccctgtttctatgataaaatggccaggggccatggtacttttgagcgagttgatgactgcacacatagaagtttgagagctttcacaaaaatcagttgcgataatgggaaatcttgttgttcttctcgtgagcttctacctagcttttgccaaaatgatcagccaacattgggaaaatcgatttgtggatgctgttgcaaaattcaggaagatgcttccaagcttggttttatacctggtcacatgtgcagaactcatttttctagtgatgttggtccagttctagccaataagcctactattgaagggctagatgaattttgtgcttgcagttgctccacttttacacaacgatcatcattatgttctcgggaatacgtcttgcagtcttcctgtgactcatgtcccattaatggactgcactgcagaagttgtatgggacatgcagcagatagcttaacaaaacactctctgtttgatcctcttaatacaaaagaacgaggttcttgttgcaatggaagatgctgctactctgtagtcccaaaatgtttgtctagttgtgactttacaaaacactgtgatgtcataattgaccaaataggtcatgctgcacctaaagataaccatcagctgcaaatgcctaccagatgctgcacactgggggagaatgagaagttaatatgccaatgcttaagcaataaaatagctgtaagaaacttgcctcaaacttctcattgtaaagatgtctctgagaaagtaatgaaccagccttctattgctataacggagagactggagaatgtatcagaaccttcagtggctgatgacagttcatccaaagctgtagcagagaaaaaggatgcttatagagattctgcagtatctaaaggacagccaaattttggtttctcatctgggtcgtccagcattatagtgacaaagttccagaaatcacctgaatttaacaatgtatcctctactgctaaacatagcaaacataaaaatctgtgtgatgaaggatcaagaattgagaaaagttcagcatccagctatgtgcctaccagtacaggatgtgaagaacccctaaatagttctgccaaatctgagctgggtccatcaagagtgaagcgcaaatgtaatcagatttctgagggaaggagactggaagaaacagataatgaggaacattgttctgaactgctaaaaaagactagaacactgaggtgctctgttaaaggttctgaatcagatgattgtactagggctagttcccagtcgtcccagaagggggtttatcaaccacaaaatgaggttaactcattttcttgcagggtgttgagaaccaagcgaaaacatcctattatgcatctaaataagcatgtgaaacagcttcacagacagaccaagttttttgaaggtgatgagcaaccagatgccaagggcaattttcttggtggattagattcctatgatagaaagaggcaagtagaggatatgagcactctggataaaacaagacatcaccaggaagggagtcgagcatttgtccgcaaacttcctaaatatgtgtctctgaattgcattgttaatgaaccgaatactaacagtgaaggtgcttgcagtgggagtggtgggattgattctagtttaattgctacagggattacaaacgataacaggaaatctcccaaaattgttcctctcaatctggttcttaaaaaggctaagagatgcaatgctgttaaactccgtaagacagaaagcacccacttgtatgaggagaaaagctcagattgttctgtgaacagctcagattattctatagaaaagtattccgttgatgatgaaaattgcagcccacaagctgaatatgaactgcaggattccaaaaggagtaggtattcatctaatgatctgaggtcacatgtggctctccacaaaagaacatctggtggaaccaagaatcgaagaacaagtgtatcccttgccaggattaagaaattcgggagcaaatcagtatgctattctggcagtgacaaagacaatgctgtgctagcccatgaagtgaatgctaggaggttgagatacagtggaagactcagctcaaattctccatgctgtgtttgtgggatctcagacctggagccttgcaatcgattaatagagtgcagcaagtgctatatcaaagtgcaccaagcctgctatggtgtactaaaagttcctaggggtcaatggttttgcagaccgtgcaagaataataccatggatacagtctgtgtgctgtgtggttatggaggtggagctatgacaagggcactgaaaaccaagaatattttgaaaagtttgctccaaggtttgatgaatttagaaaggtcagaatattatgttgattccttaggaaatgcaagcagtgagtgtacaagcttgcaaaatccagtagacagtgcacatggggataacattatgaatgcgaagaacatcaccagcaattcctggacctctggaaaatactattcgagtttacttggaccacaaccaatgcagtgggttcacatggtctgtgggctgtggacacctggcacaaaatgcccaaatgacaccacaatgagcgcttttgatgtttcaggtgcttcacctgccaagagaaatactgcatgttcaatatgtgacagaactgggggctcatttgtcaagtgccgagctgtaaattgtttggtattctttcatgcttggtgtgcacatcagaggggtttgctgcaaagtgagcctgaaggcgagcacaatgaaaatattggcttttatgggcgatgcgtgtctcacgccattgttttttctagtcacgttaatcctaagaaagaatactttagaaacaacaattggacatgtgcacgtacagagggttttaaaggccgaaagggagaaggcttttctgatagtagccataaaaaatatgaagagtacagtggcgagttcggtgtttcccaagaacagataaatgcttggttacgcataaatggttcaaagccctgcggacgaggacagaaggagtacatccattacaagcagttaaaagggtggaagcatttggttgtttacaaatctggcatacatggacttggtctctacacatcagtctttattccacgcggctctatggttgtagaatatgtgggtgaaattgttgggcaacgggttgctgacagaagagagatcgaataccagtccgggaaacggcaacaatataagagtgcatgttatttctttaagattgacagggagcatattattgatgccacccgcaaaggtgggattgcaagattcgtcaatcattcatgccagccaaactgcgttgcgaaaataatctcagtcaggaatgagaagaaggtaatgttctttgcagaacggcacataaacccaggggaggaaattacgtacgattaccacttcaaccgggaagatgaaggccagaggatcctttgcttttgtagatcaagatactgcaggcggtacctcaattagtttccggtgggcgtaacatgtctatatataacttatatatctatatgtatatcttatatatttacaaattacaattgcgattcatgcctgctgtatatgtaggaacttgcatctagaactgcctgtttatcttttgtgaagtcaaatgagttatcagctgttcatgtgacactgaataacaaaagcataaaaagtgtcactatctcgtttatgagaaatcatgcgcctaatctgaatgatggatgatccagtgatctactttggcaagaagggcttgaggtcagacttgtccacctgaagctttgttgagatggcctcgatctgctgattcctgcaaatccaagagccatccatctttgggaaacagaatatataaaaaaaaatgaccaataacaga

SEQ ID NO: 22321 - DNA, 5992 bp, Zea Mays
atggacgttgaaatgctgccgtacgggattatttcgacgtttcattgcttgagtgtccgtacttcgccgctaaacatggcgttgttaccgtgcgtgtacatgcagatggacggcgtcactctgcgccacctgctccgccccttcgccgcgcaggaggccgcggcggccggccgagtggcagcagcgccagagcagctgttcgcaagtcattcgaccctgcaatccgggccgcctccgagagtggggccgagcaatgagttgcttactcaagttccggggaactattgcactttcgatcttgcgccggacctcactcgggcaaatgcgagcaatgctgctggtaccattgattttactcgggctggtccctccagcagtgctgccactctgcccaagtatccgagacatggattgccagctagcagtagcaatgagcagtcctcttttggagcgcttttcccgaacagaagtgctaatggaatgggtatttttacttgtcaaagttcggctaacgaaggaatagcaaatgttggtgtgcagtttcaggactcaagtgtccatggactgcagaaattgccattcaaatcgatgactcatcagcatcctacactgcctggtgatcgaatccgtgtcacctgtatgaatgttggcggagagttttttgtgggcgaagctgggctttttggagttatctgcttgtgtcatcggttgcgaatgtctgtagctaaattctgcgagcatgctggaggaattccagaaaaagctggtgaaattgtctgcttggagaatggcatgagtattgcacaatggttcaaattctgcataggggtcggaggatctattgctaacaccaggtgggattggccggaatgggcacatatgaaaagttctccagaagagcacatattgaaaagtcttgcatcaagaaacagtggaacaggaaaaatggggttgttaagtagatatggaaaaatcactggacatatgaacaaaccggcttattccaatgatctgtccgttgagggtggagggcacactaatgttgagaagctagtaaacaggacagatgaaacatattacagaaagagtgttgatgtgcatgaaacttttacaaagaactctgctttacttcagaattccgctgtggtgaatttagggcccgctaaaaaccatccagttcatgcattcgacttgaacccacttaccactcctagtggaagcccacactttgaagcaagcatgggaagacattacaatggaaatcatttggcccatagtcatggaatccatttggagaaaaactttgatgcgtcattttgtaatcctatgccacgttttacaggagttatgaaccatgatagtagggcgtgcagaccaaatttctccaataaaacattccaggacactttgagcaatgcttcaaacactgaattaaagcttgggcaatcttcttatcatcaatctatgactactctttccccattggggcaatcaacgatgattgaatttcagaaaccccaaacacataggcctccgataaatcaaaatccttctccaaagcaagcaacaaagatcagcaaaagtctatccgaacataatgaaccatccattagtaccggaaataagaagcaaccacttgaagttgttaatggcatgaagcgttctgaaggtgatgagcttacagatgatacatccaagaattcatttatctcattatttctttcacaccttgagaggaataatacacccgaacccatcgatgacattctcaacagtaatgagcactatcttcctaaggccctggatgttgcatgtggttctgatcatccagaaagtgccactagacagattgaaacaagggtgcctaatgataagcactcaaagttggcctcagccattgttcatacgaaaaggagatcagagggcatttctctttcagtggcttcttctggatataatcctcaagatgcatcccatgctaatagtcaggaacacttgattcatggtgattccttgtcacatttgctgcctagtcaacctaacaccggaatctcgaaaatttctgcaagggtttcatgtcatgcaaattgcatgagctgcattcacgtgggtaataaatcccatcaggttgcacatggtgagattggggttccctgtttctatgataaaatggccaggggccatggtacttttgagcgagttgatgactgcacacatagaagtttgagagctttcacaaaaatcagttgcgataatgggaaatcttgttgttcttctcgtgagcttctacctagcttttgccaaaatgatcagccaacattgggaaaatcgatttgtggatgctgttgcaaaattcaggaagatgcttccaagcttggttttatacctggtcacatgtgcagaactcatttttctagtgatgttggtccagttctagccaataagcctactattgaagggctagatgaattttgtgcttgcagttgctccacttttacacaacgatcatcattatgttctcgggaatacgtcttgcagtcttcctgtgactcatgtcccattaatggactgcactgcagaagttgtatgggacatgcagcagatagcttaacaaaacactctctgtttgatcctcttaatacaaaagaacgaggttcttgttgcaatggaagatgctgctactctgtagtcccaaaatgtttgtctagttgtgactttacaaaacactgtgatgtcataattgaccaaataggtcatgctgcacctaaagataaccatcagctgcaaatgcctaccagatgctgcacactgggggagaatgagaagttaatatgccaatgcttaagcaataaaatagctgtaagaaacttgcctcaaacttctcattgtaaagatgtctctgagaaagtaatgaaccagccttctattgctataacggagagactggagaatgtatcagaaccttcagtggctgatgacagttcatccaaagctgtagcagagaaaaaggatgcttatagagattctgcagtatctaaaggacagccaaattttggtttctcatctgggtcgtccagcattatagtgacaaagttccagaaatcacctgaatttaacaatgtatcctctactgctaaacatagcaaacataaaaatctgtgtgatgaaggatcaagaattgagaaaagttcagcatccagctatgtgcctaccagtacaggatgtgaagaacccctaaatagttctgccaaatctgagctgggtccatcaagagtgaagcgcaaatgtaatcagatttctgagggaaggagactggaagaaacagataatgaggaacattgttctgaactgctaaaaaagactagaacactgaggtgctctgttaaaggttctgaatcagatgattgtactagggctagttcccagtcgtcccagaagggggtttatcaaccacaaaatgaggttaactcattttcttgcagggtgttgagaaccaagcgaaaacatcctattatgcatctaaataagcatgtgaaacagcttcacagacagaccaagttttttgaaggtgatgagcaaccagatgccaagggcaattttcttggtggattagattcctatgatagaaagaggcaagtagaggatatgagcactctggataaaacaagacatcaccaggaagggagtcgagcatttgtccgcaaacttcctaaatatgtgtctctgaattgcattgttaatgaaccgaatactaacagtgaaggtgcttgcagtgggagtggtgggattgattctagtttaattgctacagggattacaaacgataacaggaaatctcccaaaattgttcctctcaatctggttcttaaaaaggctaagagatgcaatgctgttaaactccgtaagacagaaagcacccacttgtatgaggagaaaagctcagattgttctgtgaacagctcagattattctatagaaaagtattccgttgatgatgaaaattgcagcccacaagctgaatatgaactgcaggattccaaaaggagtaggtattcatctaatgatctgaggtcacatgtggctctccacaaaagaacatctggtggaaccaagaatcgaagaacaagtgtatcccttgccaggattaagaaattcgggagcaaatcagtatgctattctggcagtgacaaagacaatgctgtgctagcccatgaagtgaatgctaggagatacagtggaagactcagctcaaattctccatgctgtgtttgtgggatctcagacctggagccttgcaatcgattaatagagtgcagcaaaccgtgcaagaataataccatggatacagtctgtgtgctgtgtggttatggaggtggagctatgacaagggcactgaaaaccaagaatattttgaaaagtttgctccaaggtttgatgaatttagaaaggtcagaatattatgttgattccttaggaaatgcaagcagtgagtgtacaagcttgcaaaatccagtagacagtgcacatggggataacattatgaatgcgaagaacatcaccagcaattcctggacctctggaaaatactattcgagtttacttggaccacaaccaatgcagtgggttcacatggtctgtgggctgtggacacctggcacaaaatgcccaaatgacaccacaatgagcgcttttgatgtttcaggtgcttcacctgccaagagaaatactgcatgttcaatatgtgacagaactgggggctcatttgtcaagtgccgagctgtaaattgtttggtattctttcatgcttggtgtgcacatcagaggggtttgctgcaaagtgagcctgaaggcgagcacaatgaaaatattggcttttatgggcgatgcgtgtctcacgccattgttttttctagtcacgttaatcctaagaaagaatactttagaaacaacaattggacatgtgcacgtacagagggttttaaaggccgaaagggagaaggcttttctgatagtagccataaaaaatatgaagagtacagtggcgagttcggtgtttcccaagaacagataaatgcttggttacgcataaatggttcaaagccctgcggacgaggacagaaggagtacatccattacaagcagttaaaagggtggaagcatttggttgtttacaaatctggcatacatggacttggtctctacacatcagtctttattccacgcggctctatggttgtagaatatgtgggtgaaattgttgggcaacgggttgctgacagaagagagatcgaataccagtccgggaaacggcaacaatataagagtgcatgttatttctttaagattgacagggagcatattattgatgccacccgcaaaggtgggattgcaagattcgtcaatcattcatgccagccaaactgcgttgcgaaaataatctcagtcaggaatgagaagaaggtaatgttctttgcagaacggcacataaacccaggggaggaaattacgtacgattaccacttcaaccgggaagatgaaggccagaggatcctttgcttttgtagatcaagatactgcaggcggtacctcaattagtttccggtgggcgtaacatgtctatatataacttatatatctatatgtatatcttatatatttacaaattacaattgcgattcatgcctgctgtatatgtaggaacttgcatctagaactgcctgtttatcttttgtgaagtcaaatgagttatcagctgttcatgtgacactgaataacaaaagcataaaaagtgtcactatctcgtttatgagaaatcatgcgcctaatctgaatgatggatgatccagtgatctactttggcaagaagggcttgaggtcagacttgtccacctgaagctttgttgagatggcctcgatctgctgattcctgcaaatccaagagccatccatctttgggaaacagaatatataaaaaaaaatgaccaataacaga

SEQ ID NO: 22322 - DNA, 6075 bp, Zea Mays
gtggcctccgccggtgccaccgctgcccagccagatggacggcgtcactctgcgccacctgctccgccccttcgccgcgcaggaggccgcggcggccggccgagtggcagcagcgccagagcagctgttcgcaagtcattcgaccctgcaatccgggccgcctccgagagtggggccgagcaatgagttgcttactcaagttccggggaactattgcactttcgatcttgcgccggacctcactcgggcaaatgcgagcaatgctgctggtaccattgattttactcgggctggtccctccagcagtgctgccactctgcccaagtatccgagacatggattgccagctagcagtagcaatgagcagtcctcttttggagcgcttttcccgaacagaagtgctaatggaatgggtatttttacttgtcaaagttcggctaacgaaggaatagcaaatgttggtgtgcagtttcaggactcaagtgtccatggactgcagaaattgccattcaaatcgatgactcatcagcatcctacactgcctggtgatcgaatccgtgtcacctgtatgaatgttggcggagagttttttgtgggcgaagctgggctttttggagttatctgcttgtgtcatcggttgcgaatgtctgtagctaaattctgcgagcatgctggaggaattccagaaaaagctggtgaaattgtctgcttggagaatggcatgagtattgcacaatggttcaaattctgcatagggctttttctttgtcggaggatctattgctaacaccaggtgggattggccggaatgggcacatatgaaaagttctccagaagagcacatattgaaaagtcttgcatcaagaaacagtggaacaggaaaaatggggttgttaagtagatatggaaaaatcactggacatatgaacaaaccggcttattccaatgatctgtccgttgagggtggagggcacactaatgttgagaagctagtaaacaggacagatgaaacatattacagaaagagtgttgatgtgcatgaaacttttacaaagaactctgctttacttcagaattccgctgtggtgaatttagggcccgctaaaaaccatccagttcatgcattcgacttgaacccacttaccactcctagtggaagcccacactttgaagcaagcatgggaagacattacaatggaaatcatttggcccatagtcatggaatccatttggagaaaaactttgatgcgtcattttgtaatcctatgccacgttttacaggagttatgaaccatgatagtagggcgtgcagaccaaatttctccaataaaacattccaggacactttgagcaatgcttcaaacactgaattaaagcttgggcaatcttcttatcatcaatctatgactactctttccccattggggcaatcaacgatgattgaatttcagaaaccccaaacacataggcctccgataaatcaaaatccttctccaaagcaagcaacaaagatcagcaaaagtctatccgaacataatgaaccatccattagtaccggaaataagaagcaaccacttgaagttgttaatggcatgaagcgttctgaaggtgatgagcttacagatgatacatccaagaattcatttatctcattatttctttcacaccttgagaggaataatacacccgaacccatcgatgacattctcaacagtaatgagcactatcttcctaaggccctggatgttgcatgtggttctgatcatccagaaagtgccactagacagattgaaacaagggtgcctaatgataagcactcaaagttggcctcagccattgttcatacgaaaaggagatcagagggcatttctctttcagtggcttcttctggatataatcctcaagatgcatcccatgctaatagtcaggaacacttgattcatggtgattccttgtcacatttgctgcctagtcaacctaacaccggaatctcgaaaatttctgcaagggtttcatgtcatgcaaattgcatgagctgcattcacgtgggtaataaatcccatcaggttgcacatggtgagattggggttccctgtttctatgataaaatggccaggggccatggtacttttgagcgagttgatgactgcacacatagaagtttgagagctttcacaaaaatcagttgcgataatgggaaatcttgttgttcttctcgtgagcttctacctagcttttgccaaaatgatcagccaacattgggaaaatcgatttgtggatgctgttgcaaaattcaggaagatgcttccaagcttggttttatacctggtcacatgtgcagaactcatttttctagtgatgttggtccagttctagccaataagcctactattgaagggctagatgaattttgtgcttgcagttgctccacttttacacaacgatcatcattatgttctcgggaatacgtcttgcagtcttcctgtgactcatgtcccattaatggactgcactgcagaagttgtatgggacatgcagcagatagcttaacaaaacactctctgtttgatcctcttaatacaaaagaacgaggttcttgttgcaatggaagatgctgctactctgtagtcccaaaatgtttgtctagttgtgactttacaaaacactgtgatgtcataattgaccaaataggtcatgctgcacctaaagataaccatcagctgcaaatgcctaccagatgctgcacactgggggagaatgagaagttaatatgccaatgcttaagcaataaaatagctgtaagaaacttgcctcaaacttctcattgtaaagatgtctctgagaaagtaatgaaccagccttctattgctataacggagagactggagaatgtatcagaaccttcagtggctgatgacagttcatccaaagctgtagcagagaaaaaggatgcttatagagattctgcagtatctaaaggacagccaaattttggtttctcatctgggtcgtccagcattatagtgacaaagttccagaaatcacctgaatttaacaatgtatcctctactgctaaacatagcaaacataaaaatctgtgtgatgaaggatcaagaattgagaaaagttcagcatccagctatgtgcctaccagtacaggatgtgaagaacccctaaatagttctgccaaatctgagctgggtccatcaagagtgaagcgcaaatgtaatcagatttctgagggaaggagactggaagaaacagataatgaggaacattgttctgaactgctaaaaaagactagaacactgaggtgctctgttaaaggttctgaatcagatgattgtactagggctagttcccagtcgtcccagaagggggtttatcaaccacaaaatgaggttaactcattttcttgcagggtgttgagaaccaagcgaaaacatcctattatgcatctaaataagcatgtgaaacagcttcacagacagaccaagttttttgaaggtgatgagcaaccagatgccaagggcaattttcttggtggattagattcctatgatagaaagaggcaagtagaggatatgagcactctggataaaacaagacatcaccaggaagggagtcgagcatttgtccgcaaacttcctaaatatgtgtctctgaattgcattgttaatgaaccgaatactaacagtgaaggtgcttgcagtgggagtggtgggattgattctagtttaattgctacagggattacaaacgataacaggaaatctcccaaaattgttcctctcaatctggttcttaaaaaggctaagagatgcaatgctgttaaactccgtaagacagaaagcacccacttgtatgaggagaaaagctcagattgttctgtgaacagctcagattattctatagaaaagtattccgttgatgatgaaaattgcagcccacaagctgaatatgaactgcaggattccaaaaggagtaggtattcatctaatgatctgaggtcacatgtggctctccacaaaagaacatctggtgtcattggagaagatgactctcttggtctaacagatgtggaaataaattgcctgtcaatatcatcatcaagtaatggaaccaagaatcgaagaacaagtgtatcccttgccaggattaagaaattcgggagcaaatcagtatgctattctggcagtgacaaagacaatgctgtgctagcccatgaagtgaatgctaggagatacagtggaagactcagctcaaattctccatgctgtgtttgtgggatctcagacctggagccttgcaatcgattaatagagtgcagcaagtgctatatcaaagtgcaccaagcctgctatggtgtactaaaagttcctaggggtcaatggttttgcagaccgtgcaagaataataccatggatacagtctgtgtgctgtgtggttatggaggtggagctatgacaagggcactgaaaaccaagaatattttgaaaagtttgctccaaggtttgatgaatttagaaaggtcagaatattatgttgattccttaggaaatgcaagcagtgagtgtacaagcttgcaaaatccagtagacagtgcacatggggataacattatgaatgcgaagaacatcaccagcaattcctggacctctggaaaatactattcgagtttacttggaccacaaccaatgcagtgggttcacatggtctgtgggctgtggacacctggcacaaaatgcccaaatgacaccacaatgagcgcttttgatgtttcaggtgcttcacctgccaagagaaatactgcatgttcaatatgtgacagaactgggggctcatttgtcaagtgccgagctgtaaattgtttggtattctttcatgcttggtgtgcacatcagaggggtttgctgcaaagtgagcctgaaggcgagcacaatgaaaatattggcttttatgggcgatgcgtgtctcacgccattgttttttctagtcacgttaatcctaagaaagaatactttagaaacaacaattggacatgtgcacgtacagagggttttaaaggccgaaagggagaaggcttttctgatagtagccataaaaaatatgaagagtacagtggcgagttcggtgtttcccaagaacagataaatgcttggttacgcataaatggttcaaagccctgcggacgaggacagaaggagtacatccattacaagcagttaaaagggtggaagcatttggttgtttacaaatctggcatacatggacttggtctctacacatcagtctttattccacgcggctctatggttgtagaatatgtgggtgaaattgttgggcaacgggttgctgacagaagagagatcgaataccagtccgggaaacggcaacaatataagagtgcatgttatttctttaagattgacagggagcatattattgatgccacccgcaaaggtgggattgcaagattcgtcaatcattcatgccagccaaactgcgttgcgaaaataatctcagtcaggaatgagaagaaggtaatgttctttgcagaacggcacataaacccaggggaggaaattacgtacgattaccacttcaaccgggaagatgaaggccagaggatcctttgcttttgtagatcaagatactgcaggcggtacctcaattagtttccggtgggcgtaacatgtctatatataacttatatatctatatgtatatcttatatatttacaaattacaattgcgattcatgcctgctgtatatgtaggaacttgcatctagaactgcctgtttatcttttgtgaagtcaaatgagttatcagctgttcatgtgacactgaataacaaaagcataaaaagtgtcactatctcgtttatgagaaatcatgcgcctaatctgaatgatggatgatccagtgatctactttggcaagaagggcttgaggtcagacttgtccacctgaagctttgttgagatggcctcgatctgctgattcctgcaaatccaagagccatccatctttgggaaacagaatatataaaaaaaaatgaccaataacaga

SEQ ID NO: 22323 - DNA, 5960 bp, Zea Mays
gtgccaccgctgcccagccagatggacggcgtcactctgcgccacctgctccgccccttcgccgcgcaggaggccgcggcggccggccgagtggcagcagcgccagagcagctgttcgcaagtcattcgaccctgcaatccgggccgcctccgagagtggggccgagcaatgagttgcttactcaagttccggggaactattgcactttcgatcttgcgccggacctcactcgggcaaatgcgagcaatgctgctggtaccattgattttactcgggctggtccctccagcagtgctgccactctgcccaagtatccgagacatggattgccagctagcagtagcaatgagcagtcctcttttggagcgcttttcccgaacagaagtgctaatggaatgggtatttttacttgtcaaagttcggctaacgaaggaatagcaaatgttggtgtgcagtttcaggactcaagtgtccatggactgcagaaattgccattcaaatcgatgactcatcagcatcctacactgcctggtgatcgaatccgtgtcacctgtatgaatgttggcggagagttttttgtgggcgaagctgggctttttggagttatctgcttgtgtcatcggttgcgaatgtctgtagctaaattctgcgagcatgctggaggaattccagaaaaagctggtgaaattgtctgcttggagaatggcatgagtattgcacaatggttcaaattctgcataggggtcggaggatctattgctaacaccaggtgggattggccggaatgggcacatatgaaaagttctccagaagagcacatattgaaaagtcttgcatcaagaaacagtggaacaggaaaaatggggttgttaagtagatatggaaaaatcactggacatatgaacaaaccggcttattccaatgatctgtccgttgagggtggagggcacactaatgttgagaagctagtaaacaggacagatgaaacatattacagaaagagtgttgatgtgcatgaaacttttacaaagaactctgctttacttcagaattccgctgtggtgaatttagggcccgctaaaaaccatccagttcatgcattcgacttgaacccacttaccactcctagtggaagcccacactttgaagcaagcatgggaagacattacaatggaaatcatttggcccatagtcatggaatccatttggagaaaaactttgatgcgtcattttgtaatcctatgccacgttttacaggagttatgaaccatgatagtagggcgtgcagaccaaatttctccaataaaacattccaggacactttgagcaatgcttcaaacactgaattaaagcttgggcaatcttcttatcatcaatctatgactactctttccccattggggcaatcaacgatgattgaatttcagaaaccccaaacacataggcctccgataaatcaaaatccttctccaaagcaagcaacaaagatcagcaaaagtctatccgaacataatgaaccatccattagtaccggaaataagaagcaaccacttgaagttgttaatggcatgaagcgttctgaaggtgatgagcttacagatgatacatccaagaattcatttatctcattatttctttcacaccttgagaggaataatacacccgaacccatcgatgacattctcaacagtaatgagcactatcttcctaaggccctggatgttgcatgtggttctgatcatccagaaagtgccactagacagattgaaacaagggtgcctaatgataagcactcaaagttggcctcagccattgttcatacgaaaaggagatcagagggcatttctctttcagtggcttcttctggatataatcctcaagatgcatcccatgctaatagtcaggaacacttgattcatggtgattccttgtcacatttgctgcctagtcaacctaacaccggaatctcgaaaatttctgcaagggtttcatgtcatgcaaattgcatgagctgcattcacgtgggtaataaatcccatcaggttgcacatggtgagattggggttccctgtttctatgataaaatggccaggggccatggtacttttgagcgagttgatgactgcacacatagaagtttgagagctttcacaaaaatcagttgcgataatgggaaatcttgttgttcttctcgtgagcttctacctagcttttgccaaaatgatcagccaacattgggaaaatcgatttgtggatgctgttgcaaaattcaggaagatgcttccaagcttggttttatacctggtcacatgtgcagaactcatttttctagtgatgttggtccagttctagccaataagcctactattgaagggctagatgaattttgtgcttgcagttgctccacttttacacaacgatcatcattatgttctcgggaatacgtcttgcagtcttcctgtgactcatgtcccattaatggactgcactgcagaagttgtatgggacatgcagcagatagcttaacaaaacactctctgtttgatcctcttaatacaaaagaacgaggttcttgttgcaatggaagatgctgctactctgtagtcccaaaatgtttgtctagttgtgactttacaaaacactgtgatgtcataattgaccaaataggtcatgctgcacctaaagataaccatcagctgcaaatgcctaccagatgctgcacactgggggagaatgagaagttaatatgccaatgcttaagcaataaaatagctgtaagaaacttgcctcaaacttctcattgtaaagatgtctctgagaaagtaatgaaccagccttctattgctataacggagagactggagaatgtatcagaaccttcagtggctgatgacagttcatccaaagctgtagcagagaaaaaggatgcttatagagattctgcagtatctaaaggacagccaaattttggtttctcatctgggtcgtccagcattatagtgacaaagttccagaaatcacctgaatttaacaatgtatcctctactgctaaacatagcaaacataaaaatctgtgtgatgaaggatcaagaattgagaaaagttcagcatccagctatgtgcctaccagtacaggatgtgaagaacccctaaatagttctgccaaatctgagctgggtccatcaagagtgaagcgcaaatgtaatcagatttctgagggaaggagactggaagaaacagataatgaggaacattgttctgaactgctaaaaaagactagaacactgaggtgctctgttaaaggttctgaatcagatgattgtactagggctagttcccagtcgtcccagaagggggtttatcaaccacaaaatgaggttaactcattttcttgcagggtgttgagaaccaagcgaaaacatcctattatgcatctaaataagcatgtgaaacagcttcacagacagaccaagttttttgaaggtgatgagcaaccagatgccaagggcaattttcttggtggattagattcctatgatagaaagaggcaagtagaggatatgagcactctggataaaacaagacatcaccaggaagggagtcgagcatttgtccgcaaacttcctaaatatgtgtctctgaattgcattgttaatgaaccgaatactaacagtgaaggtgcttgcagtgggagtggtgggattgattctagtttaattgctacagggattacaaacgataacaggaaatctcccaaaattgttcctctcaatctggttcttaaaaaggctaagagatgcaatgctgttaaactccgtaagacagaaagcacccacttgtatgaggagaaaagctcagattgttctgtgaacagctcagattattctatagaaaagtattccgttgatgatgaaaattgcagcccacaagctgaatatgaactgcaggattccaaaaggagtaggtattcatctaatgatctgaggtcacatgtggctctccacaaaagaacatctggtggaaccaagaatcgaagaacaagtgtatcccttgccaggattaagaaattcgggagcaaatcagtatgctattctggcagtgacaaagacaatgctgtgctagcccatgaagtgaatgctaggagatacagtggaagactcagctcaaattctccatgctgtgtttgtgggatctcagacctggagccttgcaatcgattaatagagtgcagtgcaccaagcctgctatggtgtactaaaagttcctaggggtcaatggttttgcagaccgtgcaagaataataccatggatacagtctgtgtgctgtgtggttatggaggtggagctatgacaagggcactgaaaaccaagaatattttgaaaagtttgctccaaggtttgatgaatttagaaaggtcagaatattatgttgattccttaggaaatgcaagcagtgagtgtacaagcttgcaaaatccagtagacagtgcacatggggataacattatgaatgcgaagaacatcaccagcaattcctggacctctggaaaatactattcgagtttacttggaccacaaccaatgcagtgggttcacatggtctgtgggctgtggacacctggcacaaaatgcccaaatgacaccacaatgagcgcttttgatgtttcaggtgcttcacctgccaagagaaatactgcatgttcaatatgtgacagaactgggggctcatttgtcaagtgccgagctgtaaattgtttggtattctttcatgcttggtgtgcacatcagaggggtttgctgcaaagtgagcctgaaggcgagcacaatgaaaatattggcttttatgggcgatgcgtgtctcacgccattgttttttctagtcacgttaatcctaagaaagaatactttagaaacaacaattggacatgtgcacgtacagagggttttaaaggccgaaagggagaaggcttttctgatagtagccataaaaaatatgaagagtacagtggcgagttcggtgtttcccaagaacagataaatgcttggttacgcataaatggttcaaagccctgcggacgaggacagaaggagtacatccattacaagcagttaaaagggtggaagcatttggttgtttacaaatctggcatacatggacttggtctctacacatcagtctttattccacgcggctctatggttgtagaatatgtgggtgaaattgttgggcaacgggttgctgacagaagagagatcgaataccagtccgggaaacggcaacaatataagagtgcatgttatttctttaagattgacagggagcatattattgatgccacccgcaaaggtgggattgcaagattcgtcaatcattcatgccagccaaactgcgttgcgaaaataatctcagtcaggaatgagaagaaggtaatgttctttgcagaacggcacataaacccaggggaggaaattacgtacgattaccacttcaaccgggaagatgaaggccagaggatcctttgcttttgtagatcaagatactgcaggcggtacctcaattagtttccggtgggcgtaacatgtctatatataacttatatatctatatgtatatcttatatatttacaaattacaattgcgattcatgcctgctgtatatgtaggaacttgcatctagaactgcctgtttatcttttgtgaagtcaaatgagttatcagctgttcatgtgacactgaataacaaaagcataaaaagtgtcactatctcgtttatgagaaatcatgcgcctaatctgaatgatggatgatccagtgatctactttggcaagaagggcttgaggtcagacttgtccacctgaagctttgttgagatggcctcgatctgctgattcctgcaaatccaagagccatccatctttgggaaacagaatatataaaaaaaaatgaccaataacaga

SEQ ID NO: 22324 - DNA, 2654 bp, Zea Mays
agaagatccaccgaactaccgaaacttccgcctcgcagcgcgcccgcgcgtcgccgttgcctctagcggtctagccctctactactcacccgacctcccgcgcgacgccgaacctgcgagccataacgccacccaccgcctcgccgcgcagatctctggggcttatccctacccccgggctgtgattctcccgcctcctcaccgatgcggacgccggcgatgctccggtgggccgcggcgctcgcggtcctgctcgccgtcgccgcgccggccgccgggttctacctccccggcgtcgccccgaccgacttcgccaagggtggtccgcttccagtgaaggtgaataagttgacatctatcaagactcaactcccgtatacatattactcccttccattctgcaagccagatgccatagttgacagtgccgaaaatctcggggaggttcttcgtggcgatcgcattgagaactctccttatgtgttcaaaatgcgagagcccaagatgtgtcagattgtctgcaaagcaaagatcactgagaaagaagccaaggagctgaaggaaaagatagaggaagaataccgagtgaacatgatcctggacaacctcccgctagttgttcctgttaataggcaagataagaacagtattgcttatcaaggtggatatcatgttggtctcaaaggcgtgtattctggaactaagaatgagaaatacttcatccacaaccatttgtcatttacggtgaagtatcacagggatgataattcagaactttccagaatagtgggatttgaggtcaacccactcagtgtcaagcatcagattgatgataaatggaatggtgtagacactcgcttgagcacttgtgatcctcatgcaagcaaatttgtcataaactctgattctcctcaggaagttgaagctgacaaggaaatcatattcacatatgatgttcattttgaggagagtgagatcaagtgggcatcacgttgggacacctacctgttgatgactgatgatcagattcattggttttctattgtgaactctctcatgatcgtgctttttctatctggcatggttgccatgataatgcttcgcactctctacagagacatctctagatacaatcagcttgaaactcaagaagaagcgcaagaggaaacaggctggaagcttgttcatggggacgtattccgtcctccaacccactctgacttgctctgtgtttgtgttggcactggcgtccaattctttggcatgctcctagttacaatgatcttcgctgtgttgggtttcctttctccatcaaaccggggaggactgatgactgcaatgcttcttgtctgggtcttgatggggctgcttgctggctattcttcttcacgcctctacaagatgttgaaaggttcagagtggaagaagatcaccctgcaaacggctttcctgtttccaggggttgcatttgttattttcttcatcttgaatgctcttatatggggggagaagtcatctggtgctgtccctttcaccacaatgtttgcactggtcctcctctggtttggcatctcggtacccctcgtctttgttgggagttatcttgggttcaagaaacctgccatggaacctccagtcaagacaagcaagattccacggcagatccccgagcaggcttggtacatgaatccgcttttcactattctgattggtggcgtccttccatttggagcagttttcattgagcttttcttcatcctcacctccatctggctgcaccagttctactacatcttcggcttcctcttcctcgtgtttgtgatccttgtcatcacctgcgccgagatcgcagtcgtgctctgctatttccagctctgcagcgaggactacatgtggtggtggaggtcctaccttacctcaggatcctccgcgctgtacctcttcctgtacgctgctttctacttcttcacgaaactgcagatcactaagctggtgtctggcatcttgtacttcggctacatgtttctcgcctcctatgccttctttgtgctgactggcacaattggcttctgcgcctgcttctggttcactaggttgatttactcgtcagtgaagatcgattaggtgccaatatatgacagaatagcacgtgtttcagtgatggagacaagagaactgtaccattgatgtggattgggaattaccccccttcttttagggttttcagggaaaaaagtttcttcttaggatttagtttatgaattattatggtttgttgtcagattatacactttagggcttgttcgttttggtgataatccacatgtattgggtgggattgagctggtttaaatccataacaagtcaaaatccaccccaatcccactcaatacactccaatacacatgtaatatcaataaccgaacaagcccttagtggtttggaactgagaaaaaatataagggtaaacacattgcgaagaggctgtacctttttgacatttttttgtgcggctctatataaattcaattcattatgaccggtatgcttgtactggtgaattactgtaaggctccagggccagcatgaaataccctcatggcagctggctagaatgtaacctcagtttcttagaaatcagagttggcgcttcg

SEQ ID NO: 22325 - DNA, 3099 bp, Zea Mays
atggagggtgctgccgtttctagtctgacgattgcactcgagaagcagtccaggctcctgcgcgcgatctgtgaccggttgtcggcacaggatgcgccttgggcttcgctcgagtccgccaccaccgagcacctcgatgccgtggaggctgctgcggcaactcgcgtcggcgcgccggaatcgtggcgaccgcacgtcgagctgcgctacgaggagcccgtcaccgccgacaactggggtggcctgttcgagcactcgggtgtcattaccgcggaggttgggagctcaccggaggaggtgatcaccgacgactggggcgacctcttctgcagaggcgtcgactccgacgagcagctctgcgattcgctccattccgcgtcgattcgctctttggaggaggcgtttgcccgtgaggatcccattccctcgcgggcggatctcgggatccaactctcggccaccaccgagcgcctcgatgccgtggaggcggctgtggcaactcacgtcgacgcgctggagtcgtggcgtctgcgtgtcgaggcccgcgcttcggtccacctatgtggattcttcgatggcactgacgtcaccaagctgcctaccacctgttcgacttcggggctcacaaccaaactcgccatggcgcactatggctcgcatctacccggtgataagggaggttctgccgcgtcgtggcagccggtgcggtcgctggcgctcgcggtccacgttgagtcgcagtgccagcaggcgtcctccgcgtgcggcacgccggccatggccagcatggggaagatgagcgtcggggacctcacggaggccgacctcaaggggaagcacatcttcgtgtgcgccgagatccacgagccacccgacgagaaccagaacagcaccaacgacatcctctccacctcgtgcgacactgccgtggaccagaggcggaccgagtgcctaggcagtacaggccgtcgcctgggctgccagcctgccacgccacgagagtgcatgctgtcagtaattcctgggtccgccactgccgtggacgtcgtgaagcggtgccaacgcctgtttccgctcgcggactcgaccggcgcgttcgacgcgaccgtggcggcgcgggtgacccagatggccgtgtcgtcgccagccaggaacacaacgcccacaggctcctccccggagagcacggcgtgctggttcccgtgcgacaacaagagcagcaagcagctgcagcgtggcgggccattgttggatgggtcggacggagcgtcattcagggtcggcatgcagttgaggcagctgtcggggtgctaccagtgccacatggtggtggtccccgttagcggtagcgtctccatgagggccaccatctgcccctggctggactgcggcgatgtgttcgtcaggcaggagagcctccagctccaccagtccatcaggcacgcagtgtcagggcttggcacgatggccacgaacgggcgcgcgcacgacgtcgagggcaaagaggagtacgactcggtggcgaggttgaccaggttgctaatgtcccaccaagacctaacagctcttccttggtacgacaataaggatgccttcaacacgttctacaacaagactggttctagcaagcaggtggccagagccatcttcatcaaccctgagcatggtctgtaccccgagatcttccacctagagcagctcatcttagggaaggaggacacaactaacaacttctctcgtggctaccacactattggaaagggaatggtgctggtagctaacaactttggtaacgacctccttactcgccgcagtgagatcaagcaaccatggcctccacctcaggagttggcgtgcttgggtttgaacatcatggttgctgacacatccgcgcccggcgtccgcatgccgcgctggcctccacctccacgccccccatcccccacccccggtaggcaggtactctcctccaggaccgtcagccatggcagagctatagcggttgctccagttggcccgctcaagccgcgaaattcgggaccccttcccggctcccgcgccatggacggcctccccgacgccgacgcggcgccgttggcggccgcgccgccgcagaagcgcgacgagtggagcgagagcggcatcgcgcgcctgctcgaggcctacgaggccaagtggctgctgcggaaccgcgccaagctcaagtggagcgactgggtcgacatcgcccgcgaggtgtccgtgcattgcgccgacgacgccgcggccgcggggaagccccccggcggcgtcggtagcagcgccaagacccccaaccagtgcaagaacaaggtcgagtccatgaagaagcgctaccgggccgagaccgccgcggtggcgcgcgccggcccggccgccgccggcccgtcgtggaggttcttcgcccgcatggacggcctgctcaagggaccgcccgtcggccctgaccaggtgcagcagcagcaggcgctgactaacagcagaatagacttgcgagctccggcgaaaccggaggccgaggcagaagctgactttgccgcgcagctgcgggatgcggttccaggtgcattcactgatctgatgaacatggacgcgaatggcgccgtcccggataaagcggagaaggctgacaacagcatgcagaaggagagcgggcctgctgatagcgatgccaacgtcagttctccgaggagtaaggtggcgaacgaggacgtggaggaggtggaggacaaggtctgggaccggcccaagaagagaaagagcacagacttcgatatagccaagagcatcgagctgctggctagctccttcttgaaggttgagcaggccaggatggagatgtacagggagacagaaagaatgagggttgaggctgagatcaagaagggggagatggagctcaagaggactgagatcatggcgaaaacacacctgcagatcgctaggcttttcgcgaggaagttgaagcagagcagtggaaagaacggtggcagttcgtcagtaacggctgaagtggacacccttaccaagaagggcgagaatggtgcactcatgaaaacccttccctgcgatgtgaccaag

SEQ ID NO: 22326 - DNA, 4921 bp, Zea Mays
cgctgccgtcgtcgcgccggcctcgatacgttcccgggaagtcggaggcgccgcgctcgtcacgccgccggctccgacgagatggaggatggcgtatctacttatactgtggatgaggcacttgtgtccatggggtttgggaaattccatgcattcgtgcttgcatactctgggatggctaaaatctctgaagcaatggagatgatgcttttgtcatttgttgggcaatcagttcaagctgagtgggggctttctgcacatgaagaaagcctcataacaagtgttgtctttgtggggatgcttgtaggagcatatgcttggggcatagtttcagataactatggaagaagggttgggttcaacttcacagctattgttactggaggagctggccttcttagcgcttttgctccaaattacttatctttgattgtactgagatttatggtcggtgttggactgggtggtgggccagttttaggttcttggttcctagagttcatccctgctcctaaccgaggaacatggatggttatgttctcagcattttggactgttggcacaataatggaagcttctcttgcttgggccgttatgccagcttttggctggaggtggctgctggcactctcatcattgccatcgtttgccctgctactcttctacccagtgacacttgagtcaccaagatacctatgcatgaagggtagaatagctgaagcagttcatgttctggaaacaatgtcacgcgtgaactgtgtttctctcccctctggccgacttgtctctggccatcgggtggaacttcatgatatcggggattcttcagaaacggcacagttggtgacatctaataagaataacactgctgatcgtggtagcaaatccgagattggaggcctcagtgccatcttaaagcttctatctccaaacttaatcagatcgactcttctactctggactgtctttcttggtcatgcctttctgtactatggtcttgttctactcacatcagaactaaatcatggaaataggatctgtggatcagaagagggggcagaagtgacaacaacagcccacatacatgatgagaatctctacagaaatgtatttataacaagctttggagaggtccctggtcttctcctgtcggctgccattgttgacatgatcgggcgcaagctctcgatgtcttccatgctttacatcagttgcctgtgcatatctccgcttatgttcgcccagacggaatcgctgacgaccatctttttgttctgtgcccgggtttgcatctctgcaagcttcactgttctgcacatctacgcccctgagatatacccaactgctgttagggccacgggtgtcgggtttgcaagctcgattgctcgctttggtggaatcctgtgccctctcgtggccgtcggcctggtgcacgcgtgccaccagatggcagctatcctgatattcatcacggtgatgctggcttcaggcatcgccgtgtcatacttccccctggaaacaagcggccgaaagctgagcgaccacgtcgccgccgcgtaagagctgattaattgaagaactgactttttgagagggatacaccaatacagaatcaaggcccaaggggccattattttttttgttcagttgttgacaaaggatacagtgggaaagaaagtgcaaaggaggcactagattgttacgttattatactgttgcttctcaatagaaatctacagatcactatatgatttttgttctcttgtcaatatggtattagtatgaattctaaacgccctcaaaattcattttttgtttcaaaagtgaaacgtctttttatatatgaattgggaaactaaaaaatgaaattccgttgccgggactcgaacccgggtctttcgggtgagagccgaatatcctgaccagctagactacaacggattctgtttatgttgtgcatagtaatttataagattacgtagagctattcacagtaatggcttagcgacattctcgctgctgcaatggcgacggtctcgttccatcactgtcccccgtcattctcgctgctccaatggcgacggtctcgttccatcccccgtctcttcctcctccgtctcctaattttggaaaggccatagtttcccatcgcgagacctgtatccccatggatccatgagagaaaggcggaggagatcaggcgacgtacgcgcgtgggggtctcctcctgcacgctctcagctgaaccgccccgtgctcccctgggcgcgccgcgcgcaatggcccgacgacggcgccccctaccgccgccgctgctcgtctggttggccgtcctcttctctgcggtggcgcccgctgtcgccaagaccgacaagtctgacgttgctgcgctcaatgtgatgttcaatagcatgaacaagccatcgcaattgtccggttggaaatcgagcggcggtgatccctgcgatgacgatgacgagtggaaagggatagagtgcagcggctcatctgtcacagaaattaacttgtcagggcttgaactcagtggctcgctaggatatcagctatcaagcttgaaatcagtaaccaaatttgatctcagcaataacaatctcaacggcgatcttccatatcagcttccaccaaacgtggttgaattaaatctttacggaaactctttaactggaggagttccttattcgatatctcagatgggtgatctggaaacactaaatttgggcaagaaccacctaagcgggcagttgacggatatgttttcagaacttccaaagctctcaacattggatctctccttcaaccgcttctcaggcagcctgcccaagagttttcagcacctaaaagacctcaagacgctgtgagggaactgaaatttgcacatggtagtaattcatccatactttctttcagatctacaatcagtgccattcttttcaaaatgtatgtaggaatgtggagagcaaccaattcagtggtcatatagatgttctagcgaaacttcctctcgaggatctgaatctgcagaacaacaagtttactgggtggatccctagtaaactaaaagacatcagcaatctacagattggagggaaccagtggtcgtccggatcagctcctcctggtatggagaagggctctgcactggagggctcttcaggcggaggtggtcgaagtggagtaaacggtatcgccatcgcagctgtggtgatagcggtgcttgttgcagctctgattctcttgtctgtgttgaagaggaaccgttcttcttcctcgtctcattacctcatggatgagtcaggtcacaaccggtcatttgccccgctagttgatgatggcagaacgatcaacatgaagccactggagcattcatcgtcaattagcagtacgacaccgtctgcaatgcctatcaagccgattagtgacaacgagttcgagaacaaactaaactattcgaggcggagcacagatccagtcaaccttgttgcttattcatcatcagacctccaagcagccactggaagcttccatagtagcaggttactaggtcaggggacaatcggtggtgtttacaaggcaaaatatgctgatggaacggtgctggccgttaagaagtttgatccattgagcttctcgggaagcagcgacttcatggatcttgtgaacagcatttccaagctgcatcatccaaacatctccgtgcttgttggttactgctcagagcctgggcactacatgttggtctatgactacaacatgaatggatccctctatgactttctgcacttgtccgacgactacagcaagccgctgacctgggacacccgcgtaaggattgctgttggtacagcttgtgctctggagtacctacatgacgcgtgttcacctccagtgatccacaagaacatcaaggcatccaacgtcttgctcgatgctgacctcaaccctcacctcactgactgcggccttgcatacttctatgaggtttgcagaatgtctcttgaagaacttgttgagcaaagcatgaggtacgatcctccagagtgcacaaggccatcaggttacgttatgaagagcgatgtctactgctttggtgtcgtcatgcttcagctgttgaccggccggaagccctacgacagctcgaagcctagagcggagcagtccttggtcaagtttgtcggtccacagcttcatgacaccaacgccttggaagctctggcggatccaggccttcgtggcctatatccaccgaaagcattgtcccgtttcgccgatgtcctctcccgctgcgtccagtcggatccagaactccggccatccatgtcagaggtggtgcagttgcttctccagtgcgtccagcgcacaaccagcaacaggaggctgggtggccaccgcaccgtctcgcagcgaagcgacgattctgattggtgatgctctgtttctgcctccatcctgctgctgcggcccagttgctgaaactgtctcagaacagaaccgtaggtgtgcggcccttggcatgccgctgtacaaaagaaaatgctttattagacaatctggttgctcgaacagtgtggcaacaaataagtcggttgatttaggtaaaggtaaaagcagattgggtgttctagtgagtagtgacattgtatttgtactcataaacttaaaaacatatgaccagctaatttttaaaaatatataaaccatcttagaacaactccagcagggcctctcagatccctattctacttttgagaatgcaagagccaaaaaaaaaaaaaacccgaccctgaatagttggaggcactcaaatctccttctcgagcctttatttggtccgctctctctttgcgtgattggtccgcccgtccgtgtatggagctgcacttgcagagaattaaaagtgggc

SEQ ID NO: 22327 - DNA, 4911 bp, Zea Mays
cgctgccgtcgtcgcgccggcctcgatacgttcccgggaagtcggaggcgccgcgctcgtcacgccgccggctccgacgagatggaggatggcgtatctacttatactgtggatgaggcacttgtgtccatggggtttgggaaattccatgcattcgtgcttgcatactctgggatggctaaaatctctgaagcaatggagatgatgcttttgtcatttgttgggcaatcagttcaagctgagtgggggctttctgcacatgaagaaagcctcataacaagtgttgtctttgtggggatgcttgtaggagcatatgcttggggcatagtttcagataactatggaagaagggttgggttcaacttcacagctattgttactggaggagctggccttcttagcgcttttgctccaaattacttatctttgattgtactgagatttatggtcggtgttggactgggtggtgggccagttttaggttcttggttcctagagttcatccctgctcctaaccgaggaacatggatggttatgttctcagcattttggactgttggcacaataatggaagcttctcttgcttgggccgttatgccagcttttggctggaggtggctgctggcactctcatcattgccatcgtttgccctgctactcttctacccagtgacacttgagtcaccaagatacctatgcatgaagggtagaatagctgaagcagttcatgttctggaaacaatgtcacgcgtgaactgtgtttctctcccctctggccgacttgtctctggccatcgggtggaacttcatgatatcggggattcttcagaaacggcacagttggtgacatctaataagaataacactgctgatcgtggtagcaaatccgagattggaggcctcagtgccatcttaaagcttctatctccaaacttaatcagatcgactcttctactctggactgtctttcttggtcatgcctttctgtactatggtcttgttctactcacatcagaactaaatcatggaaataggatctgtggatcagaagagggggcagaagtgacaacaacagcccacatacatgatgagaatctctacagaaatgtatttataacaagctttggagaggtccctggtcttctcctgtcggctgccattgttgacatgatcgggcgcaagctctcgatgtcttccatgctttacatcagttgcctgtgcatatctccgcttatgttcgcccagacggaatcgctgacgaccatctttttgttctgtgcccgggtttgcatctctgcaagcttcactgttctgcacatctacgcccctgagatatacccaactgctgttagggccacgggtgtcgggtttgcaagctcgattgctcgctttggtggaatcctgtgccctctcgtggccgtcggcctggtgcacgcgtgccaccagatggcagctatcctgatattcatcacggtgatgctggcttcaggcatcgccgtgtcatacttccccctggaaacaagcggccgaaagctgagcgaccacgtcgccgccgcgtaagagctgattaattgaagaactgactttttgagagggatacaccaatacagaatcaaggcccaaggggccattattttttttgttcagttgttgacaaaggatacagtgggaaagaaagtgcaaaggaggcactagattgttacgttattatactgttgcttctcaatagaaatctacagatcactatatgatttttgttctcttgtcaatatggtattagtatgaattctaaacgccctcaaaattcattttttgtttcaaaagtgaaacgtctttttatatatgaattgggaaactaaaaaatgaaattccgttgccgggactcgaacccgggtctttcgggtgagagccgaatatcctgaccagctagactacaacggattctgtttatgttgtgcatagtaatttataagattacgtagagctattcacagtaatggcttagcgacattctcgctgctgcaatggcgacggtctcgttccatcactgtcccccgtcattctcgctgctccaatggcgacggtctcgttccatcccccgtctcttcctcctccgtctcctaattttggaaaggccatagtttcccatcgcgagacctgtatccccatggatccatgagagaaaggcggaggagatcaggcgacgtacgcgcgtgggggtctcctcctgcacgctctcagctgaaccgccccgtgctcccctgggcgcgccgcgcgcaatggcccgacgacggcgccccctaccgccgccgctgctcgtctggttggccgtcctcttctctgcggtggcgcccgctgtcgccaagaccgacaagtctgacgttgctgcgctcaatgtgatgttcaatagcatgaacaagccatcgcaattgtccggttggaaatcgagcggcggtgatccctgcgatgacgatgacgagtggaaagggatagagtgcagcggctcatctgtcacagaaattaacttgtcagggcttgaactcagtggctcgctaggatatcagctatcaagcttgaaatcagtaaccaaatttgatctcagcaataacaatctcaacggcgatcttccatatcagcttccaccaaacgtggttgaattaaatctttacggaaactctttaactggaggagttccttattcgatatctcagatgggtgatctggaaacactaaatttgggcaagaaccacctaagcgggcagttgacggatatgttttcagaacttccaaagctctcaacattggatctctccttcaaccgcttctcaggcagcctgcccaagagttttcagcacctaaaagacctcaagacgctgtgagggaactgaaatttgcacatggtagtaattcatccatactttctttcagatctacaatcagtgccattcttttcaaaatgtatgtaggaatgtggagagcaaccaattcagtggtcatatagatgttctagcgaaacttcctctcgaggatctaacaacaagtttactgggtggatccctagtaaactaaaagacatcagcaatctacagattggagggaaccagtggtcgtccggatcagctcctcctggtatggagaagggctctgcactggagggctcttcaggcggaggtggtcgaagtggagtaaacggtatcgccatcgcagctgtggtgatagcggtgcttgttgcagctctgattctcttgtctgtgttgaagaggaaccgttcttcttcctcgtctcattacctcatggatgagtcaggtcacaaccggtcatttgccccgctagttgatgatggcagaacgatcaacatgaagccactggagcattcatcgtcaattagcagtacgacaccgtctgcaatgcctatcaagccgattagtgacaacgagttcgagaacaaactaaactattcgaggcggagcacagatccagtcaaccttgttgcttattcatcatcagacctccaagcagccactggaagcttccatagtagcaggttactaggtcaggggacaatcggtggtgtttacaaggcaaaatatgctgatggaacggtgctggccgttaagaagtttgatccattgagcttctcgggaagcagcgacttcatggatcttgtgaacagcatttccaagctgcatcatccaaacatctccgtgcttgttggttactgctcagagcctgggcactacatgttggtctatgactacaacatgaatggatccctctatgactttctgcacttgtccgacgactacagcaagccgctgacctgggacacccgcgtaaggattgctgttggtacagcttgtgctctggagtacctacatgacgcgtgttcacctccagtgatccacaagaacatcaaggcatccaacgtcttgctcgatgctgacctcaaccctcacctcactgactgcggccttgcatacttctatgaggtttgcagaatgtctcttgaagaacttgttgagcaaagcatgaggtacgatcctccagagtgcacaaggccatcaggttacgttatgaagagcgatgtctactgctttggtgtcgtcatgcttcagctgttgaccggccggaagccctacgacagctcgaagcctagagcggagcagtccttggtcaagtttgtcggtccacagcttcatgacaccaacgccttggaagctctggcggatccaggccttcgtggcctatatccaccgaaagcattgtcccgtttcgccgatgtcctctcccgctgcgtccagtcggatccagaactccggccatccatgtcagaggtggtgcagttgcttctccagtgcgtccagcgcacaaccagcaacaggaggctgggtggccaccgcaccgtctcgcagcgaagcgacgattctgattggtgatgctctgtttctgcctccatcctgctgctgcggcccagttgctgaaactgtctcagaacagaaccgtaggtgtgcggcccttggcatgccgctgtacaaaagaaaatgctttattagacaatctggttgctcgaacagtgtggcaacaaataagtcggttgatttaggtaaaggtaaaagcagattgggtgttctagtgagtagtgacattgtatttgtactcataaacttaaaaacatatgaccagctaatttttaaaaatatataaaccatcttagaacaactccagcagggcctctcagatccctattctacttttgagaatgcaagagccaaaaaaaaaaaaaacccgaccctgaatagttggaggcactcaaatctccttctcgagcctttatttggtccgctctctctttgcgtgattggtccgcccgtccgtgtatggagctgcacttgcagagaattaaaagtgggc

SEQ ID NO: 22328 - DNA, 4770 bp, Zea Mays
cgctgccgtcgtcgcgccggcctcgatacgttcccgggaagtcggaggcgccgcgctcgtcacgccgccggctccgacgagatggaggatggcgtatctacttatactgtggatgaggcacttgtgtccatggggtttgggaaattccatgcattcgtgcttgcatactctgggatggctaaaatctctgaagcaatggagatgatgcttttgtcatttgttgggcaatcagttcaagctgagtgggggctttctgcacatgaagaaagcctcataacaagtgttgtctttgtggggatgcttgtaggagcatatgcttggggcatagtttcagataactatggaagaagggttgggttcaacttcacagctattgttactggaggagctggccttcttagcgcttttgctccaaattacttatctttgattgtactgagatttatggtcggtgttggactgggtggtgggccagttttaggttcttggttcctagagttcatccctgctcctaaccgaggaacatggatggttatgttctcagcattttggactgttggcacaataatggaagcttctcttgcttgggccgttatgccagcttttggctggaggtggctgctggcactctcatcattgccatcgtttgccctgctactcttctacccagtgacacttgagtcaccaagatacctatgcatgaagggtagaatagctgaagcagttcatgttctggaaacaatgtcacgcgtgaactgtgtttctctcccctctggccgacttgtctctggccatcgggtggaacttcatgatatcggggattcttcagaaacggcacagttggtgacatctaataagaataacactgctgatcgtggtagcaaatccgagattggaggcctcagtgccatcttaaagcttctatctccaaacttaatcagatcgactcttctactctggactgtctttcttggtcatgcctttctgtactatggtcttgttctactcacatcagaactaaatcatggaaataggatctgtggatcagaagagggggcagaagtgacaacaacagcccacatacatgatgagaatctctacagaaatgtatttataacaagctttggagaggtccctggtcttctcctgtcggctgccattgttgacatgatcgggcgcaagctctcgatgtcttccatgctttacatcagttgcctgtgcatatctccgcttatgttcgcccagacggaatcgctgacgaccatctttttgttctgtgcccgggtttgcatctctgcaagcttcactgttctgcacatctacgcccctgagatatacccaactgctgttagggccacgggtgtcgggtttgcaagctcgattgctcgctttggtggaatcctgtgccctctcgtggccgtcggcctggtgcacgcgtgccaccagatggcagctatcctgatattcatcacggtgatgctggcttcaggcatcgccgtgtcatacttccccctggaaacaagcggccgaaagctgagcgaccacgtcgccgccgcgtaagagctgattaattgaagaactgactttttgagagggatacaccaatacagaatcaaggcccaaggggccattattttttttgttcagttgttgacaaaggatacagtgggaaagaaagtgcaaaggaggcactagattgttacgttattatactgttgcttctcaatagaaatctacagatcactatatgatttttgttctcttgtcaatatggtattagtatgaattctaaacgccctcaaaattcattttttgtttcaaaagtgaaacgtctttttatatatgaattgggaaactaaaaaatgaaattccgttgccgggactcgaacccgggtctttcgggtgagagccgaatatcctgaccagctagactacaacggattctgtttatgttgtgcatagtaatttataagattacgtagagctattcacagtaatggcttagcgacattctcgctgctgcaatggcgacggtctcgttccatcactgtcccccgtcattctcgctgctccaatggcgacggtctcgttccatcccccgtctcttcctcctccgtctcctaattttggaaaggccatagtttcccatcgcgagacctgtatccccatggatccatgagagaaaggcggaggagatcaggcgacgtacgcgcgtgggggtctcctcctgcacgctctcagctgaaccgccccgtgctcccctgggcgcgccgcgcgcaatggcccgacgacggcgccccctaccgccgccgctgctcgtctggttggccgtcctcttctctgcggtggcgcccgctgtcgccaagaccgacaagtctgacgttgctgcgctcaatgtgatgttcaatagcatgaacaagccatcgcaattgtccggttggaaatcgagcggcggtgatccctgcgatgacgatgacgagtggaaagggatagagtgcagcggctcatctgtcacagaaattaacttgtcagggcttgaactcagtggctcgctaggatatcagctatcaagcttgaaatcagtaaccaaatttgatctcagcaataacaatctcaacggcgatcttccatatcagcttccaccaaacgtggttgaattaaatctttacggaaactctttaactggaggagttccttattcgatatctcagatgggtgatctggaaacactaaatttgggcaagaaccacctaagcgggcagttgacggatatgttttcagaacttccaaagctctcaacattggatctctccttcaaccgcttctcaggcagcctgcccaagagttttcagcacctaaaagacctcaagacgctgaatgtggagagcaaccaattcagtggtcatatagatgttctagcgaaacttcctctcgaggatctgaatctgcagaacaacaagtttactgggtggatccctagtaaactaaaagacatcagcaatctacagattggagggaaccagtggtcgtccggatcagctcctcctggtatggagaagggctctgcactggagggctcttcaggcggaggtggtcgaagtggagtaaacggtatcgccatcgcagctgtggtgatagcggtgcttgttgcagctctgattctcttgtctgtgttgaagaggaaccgttcttcttcctcgtctcattacctcatggatgagtcagcgatcaacatgaagccactggagcattcatcgtcaattagcagtacgacaccgtctgcaatgcctatcaagccgattagtgacaacgagttcgagaacaaactaaactattcgaggcggagcacagatccagtcaaccttgttgcttattcatcatcagacctccaagcagccactggaagcttccatagtagcaggttactaggtcaggggacaatcggtggtgtttacaaggcaaaatatgctgatggaacggtgctggccgttaagaagtttgatccattgagcttctcgggaagcagcgacttcatggatcttgtgaacagcatttccaagctgcatcatccaaacatctccgtgcttgttggttactgctcagagcctgggcactacatgttggtctatgactacaacatgaatggatccctctatgactttctgcacttgtccgacgactacagcaagccgctgacctgggacacccgcgtaaggattgctgttggtacagcttgtgctctggagtacctacatgacgcgtgttcacctccagtgatccacaagaacatcaaggcatccaacgtcttgctcgatgctgacctcaaccctcacctcactgactgcggccttgcatacttctatgaggatccgagtcagagcctgggaccagggtacgatcctccagagtgcacaaggccatcaggttacgttatgaagagcgatgtctactgctttggtgtcgtcatgcttcagctgttgaccggccggaagccctacgacagctcgaagcctagagcggagcagtccttggtcaagtttgtcggtccacagcttcatgacaccaacgccttggaagctctggcggatccaggccttcgtggcctatatccaccgaaagcattgtcccgtttcgccgatgtcctctcccgctgcgtccagtcggatccagaactccggccatccatgtcagaggtggtgcagttgcttctccagtgcgtccagcgcacaaccagcaacaggaggctgggtggccaccgcaccgtctcgcagcgaagcgacgattctgattggtgatgctctgtttctgcctccatcctgctgctgcggcccagttgctgaaactgtctcagaacagaaccgtaggtgtgcggcccttggcatgccgctgtacaaaagaaaatgctttattagacaatctggttgctcgaacagtgtggcaacaaataagtcggttgatttaggtaaaggtaaaagcagattgggtgttctagtgagtagtgacattgtatttgtactcataaacttaaaaacatatgaccagctaatttttaaaaatatataaaccatcttagaacaactccagcagggcctctcagatccctattctacttttgagaatgcaagagccaaaaaaaaaaaaaacccgaccctgaatagttggaggcactcaaatctccttctcgagcctttatttggtccgctctctctttgcgtgattggtccgcccgtccgtgtatggagctgcacttgcagagaattaaaagtgggc

SEQ ID NO: 22329 - DNA, 5327 bp, Zea Mays
cgctgccgtcgtcgcgccggcctcgatacgttcccgggaagtcggaggcgccgcgctcgtcacgccgccggctccgacgaggtagacctcacctaccaatcccgcctctctctctctctctctctctctctctctctctctctctctctctcccaacatctctctaccctctcctccaccccattcatgcctcccggtccctgctcccgacctgcttcctagattggcgggtccgctgatcccatccacccctcctcgtccgctgcgcgggctgcagttctcgattctgttcctctctctctctctctctgatggaggatggcgtatctacttatactgtggatgaggcacttgtgtccatggggtttgggaaattccatgcattcgtgcttgcatactctgggatggctaaaatctctgaagcaatggagatgatgcttttgtcatttgttgggcaatcagttcaagctgagtgggggctttctgcacatgaagaaagcctcataacaagtgttgtctttgtggggatgcttgtaggagcatatgcttggggcatagtttcagataactatggaagaaggcagggtcttcctcactttttccattggctattggaatttgattatgaatgttctaacccttcaatctttttcgaaactttatggagtgttgcacactgttccatggttgggttcaacttcacagctattgttactggaggagctggccttcttagcgcttttgctccaaattacttatctttgattgtactgagatttatggtcggtgttggactgggtggtgggccagttttaggttcttggttcctagagttcatccctgctcctaaccgaggaacatggatggttatgttctcagcattttggactgttggcacaataatggaagcttctcttgcttgggccgttatgccagcttttggctggaggtggctgctggcactctcatcattgccatcgtttgccctgctactcttctacccagtgacacttgagtcaccaagatacctatgcatgaagggtagaatagctgaagcagttcatgttctggaaacaatgtcacgcgtgaactgtgtttctctcccctctggccgacttgtctctggccatcgggtggaacttcatgatatcggggattcttcagaaacggcacagttggtgacatctaataagaataacactgctgatcgtggtagcaaatccgagattggaggcctcagtgccatcttaaagcttctatctccaaacttaatcagatcgactcttctactctggactgtctttcttggtcatgcctttctgtactatggtcttgttctactcacatcagaactaaatcatggaaataggatctgtggatcagaagagggggcagaagtgacaacaacagcccacatacatgatgagaatctctacagaaatgtatttataacaagctttggaggtatgtgtgtttctgctatctggtcaaccagtcatttttcagaaacagtgtcctgggaattcttgatatttagggcaacaatgatgcagaggtccctggtcttctcctgtcggctgccattgttgacatgatcgggcgcaagctctcgatgtcttccatgctttacatcagttgcctgtgcatatctccgcttatgttcgcccagacggaatcgctgacgaccatctttttgttctgtgcccgggtttgcatctctgcaagcttcactgttctgcacatctacgcccctgagatatacccaactgctgttagggccacgggtgtcgggtttgcaagctcgattgctcgctttggtggaatcctgtgccctctcgtggccgtcggcctggtgcacgcgtgccaccagatggcagctatcctgatattcatcacggtgatgctggcttcaggcatcgccgtgtcatacttccccctggaaacaagcggccgaaagctgagcgaccacgtcgccgccgcgtaagagctgattaattgaagaactgactttttgagagggatacaccaatacagaatcaaggcccaaggggccattattttttttgttcagttgttgacaaaggatacagtgggaaagaaagtgcaaaggaggcactagattgttacgttattatactgttgcttctcaatagaaatctacagatcactatatgatttttgttctcttgtcaatatggtattagtatgaattctaaacgccctcaaaattcattttttgtttcaaaagtgaaacgtctttttatatatgaattgggaaactaaaaaatgaaattccgttgccgggactcgaacccgggtctttcgggtgagagccgaatatcctgaccagctagactacaacggattctgtttatgttgtgcatagtaatttataagattacgtagagctattcacagtaatggcttagcgacattctcgctgctgcaatggcgacggtctcgttccatcactgtcccccgtcattctcgctgctccaatggcgacggtctcgttccatcccccgtctcttcctcctccgtctcctaattttggaaaggccatagtttcccatcgcgagacctgtatccccatggatccatgagagaaaggcggaggagatcaggcgacgtacgcgcgtgggggtctcctcctgcacgctctcagctgaaccgccccgtgctcccctgggcgcgccgcgcgcaatggcccgacgacggcgccccctaccgccgccgctgctcgtctggttggccgtcctcttctctgcggtggcgcccgctgtcgccaagaccgacaagtctgacgttgctgcgctcaatgtgatgttcaatagcatgaacaagccatcgcaattgtccggttggaaatcgagcggcggtgatccctgcgatgacgatgacgagtggaaagggatagagtgcagcggctcatctgtcacagaaattaacttgtcagggcttgaactcagtggctcgctaggatatcagctatcaagcttgaaatcagtaaccaaatttacagtgatctcagcaataacaatctcaacggcgatcttccatatcagcttccaccaaacgtggttgaattaaatctttacggaaactctttaactggaggagttccttattcgatatctcagatgggtgatctggaaacactaaatttgggcaagaaccacctaagcgggcagttgacggatatgttttcagaacttccaaagctctcaacattggatctctccttcaaccgcttctcaggcagcctgcccaagagttttcagcacctaaaagacctcaagacgctgaatgtggagagcaaccaattcagtggtcatatagatgttctagcgaaacttcctctcgaggatctgaatctgcagaacaacaagtttactgggtggatccctagtaaactaaaagacatcagcaatctacagattggagggaaccagtggtcgtccggatcagctcctcctggtatggagaagggctctgcactggagggctcttcaggcggaggtggtcgaagtggagtaaacggtatcgccatcgcagctgtggtgatagcggtgcttgttgcagctctgattctcttgtctgtgttgaagaggaaccgttcttcttcctcgtctcattacctcatggatgagtcaggtcacaaccggtcatttgccccgctagttgatgatggcagaagtaaattgctcatagtgccttcttttaacattcatggtaaagcgctcatgctgctttctttgcttcagcgatcaacatgaagccactggagcattcatcgtcaattagcagtacgacaccgtctgcaatgcctatcaagccgattagtgacaacgagttcgagaacaaactaaactattcgaggcggagcacagatccagtcaaccttgttgcttattcatcatcagacctccaagcagccactggaagcttccatagtagcaggttactaggtcaggggacaatcggtggtgtttacaaggcaaaatatgctgatggaacggtgctggccgttaagaagtttgatccattgagcttctcgggaagcagcgacttcatggatcttgtgaacagcatttccaagctgcatcatccaaacatctccgtgcttgttggttactgctcagagcctgggcactacatgttggtctatgactacaacatgaatggatccctctatgactttctgcacttgtccgacgactacagcaagccgctgacctgggacacccgcgtaaggattgctgttggtacagcttgtgctctggagtacctacatgacgcgtgttcacctccagtgatccacaagaacatcaaggcatccaacgtcttgctcgatgctgacctcaaccctcacctcactgactgcggccttgcatacttctatgaggtttgcagaatgtctcttgaagaacttgttgagcaaagcatgaggtacgatcctccagagtgcacaaggccatcaggttacgttatgaagagcgatgtctactgctttggtgtcgtcatgcttcagctgttgaccggccggaagccctacgacagctcgaagcctagagcggagcagtccttggtcaagtttgtcggtccacagcttcatgacaccaacgccttggaagctctggcggatccaggccttcgtggcctatatccaccgaaagcattgtcccgtttcgccgatgtcctctcccgctgcgtccagtcggatccagaactccggccatccatgtcagaggtggtgcagttgcttctccagtgcgtccagcgcacaaccagcaacaggaggctgggtggccaccgcaccgtctcgcagcgaagcgacgattctgattggtgatgctctgtttctgcctccatcctgctgctgcggcccagttgctgaaactgtctcagaacagaaccgtaggtgtgcggcccttggcatgccgctgtacaaaagaaaatgctttattagacaatctggttgctcgaacagtgtggcaacaaataagtcggttgatttaggtaaaggtaaaagcagattgggtgttctagtgagtagtgacattgtatttgtactcataaacttaaaaacatatgaccagctaatttttaaaaatatataaaccatcttagaacaactccagcagggcctctcagatccctattctacttttgagaatgcaagagccaaaaaaaaaaaaaacccgaccctgaatagttggaggcactcaaatctccttctcgagcctttatttggtccgctctctctttgcgtgattggtccgcccgtccgtgtatggagctgcacttgcagagaattaaaagtgggc

SEQ ID NO: 22330 - DNA, 5133 bp, Zea Mays
cgctgccgtcgtcgcgccggcctcgatacgttcccgggaagtcggaggcgccgcgctcgtcacgccgccggctccgacgaggtagacctcacctaccaatcccgcctctctctctctctctctctctctctctctctctctctctctctctcccaacatctctctaccctctcctccaccccattcatgcctcccggtccctgctcccgacctgcttcctagattggcgggtccgctgatcccatccacccctcctcgtccgctgcgcgggctgcagttctcgattctgttcctctctctctctctctctgatggaggatggcgtatctacttatactgtggatgaggcacttgtgtccatggggtttgggaaattccatgcattcgtgcttgcatactctgggatggctaaaatctctgaagcaatggagatgatgcttttgtcatttgttgggcaatcagttcaagctgagtgggggctttctgcacatgaagaaagcctcataacaagtgttgtctttgtggggatgcttgtaggagcatatgcttggggcatagtttcagataactatggaagaagggttgggttcaacttcacagctattgttactggaggagctggccttcttagcgcttttgctccaaattacttatctttgattgtactgagatttatggtcggtgttggactgggtggtgggccagttttaggttcttggttcctagagttcatccctgctcctaaccgaggaacatggatggttatgttctcagcattttggactgttggcacaataatggaagcttctcttgcttgggccgttatgccagcttttggctggaggtggctgctggcactctcatcattgccatcgtttgccctgctactcttctacccagtgacacttgagtcaccaagatacctatgcatgaagggtagaatagctgaagcagttcatgttctggaaacaatgtcacgcgtgaactgtgtttctctcccctctggccgacttgtctctggccatcgggtggaacttcatgatatcggggattcttcagaaacggcacagttggtgacatctaataagaataacactgctgatcgtggtagcaaatccgagattggaggcctcagtgccatcttaaagcttctatctccaaacttaatcagatcgactcttctactctggactgtctttcttggtcatgcctttctgtactatggtcttgttctactcacatcagaactaaatcatggaaataggatctgtggatcagaagagggggcagaagtgacaacaacagcccacatacatgatgagaatctctacagaaatgtatttataacaagctttggagaggtccctggtcttctcctgtcggctgccattgttgacatgatcgggcgcaagctctcgatgtcttccatgctttacatcagttgcctgtgcatatctccgcttatgttcgcccagacggaatcgctgacgaccatctttttgttctgtgcccgggtttgcatctctgcaagcttcactgttctgcacatctacgcccctgagatatacccaactgctgttagggccacgggtgtcgggtttgcaagctcgattgctcgctttggtggaatcctgtgccctctcgtggccgtcggcctggtgcacgcgtgccaccagatggcagctatcctgatattcatcacggtgatgctggcttcaggcatcgccgtgtcatacttccccctggaaacaagcggccgaaagctgagcgaccacgtcgccgccgcgtaagagctgattaattgaagaactgactttttgagagggatacaccaatacagaatcaaggcccaaggggccattattttttttgttcagttgttgacaaaggatacagtgggaaagaaagtgcaaaggaggcactagattgttacgttattatactgttgcttctcaatagaaatctacagatcactatatgatttttgttctcttgtcaatatggtattagtatgaattctaaacgccctcaaaattcattttttgtttcaaaagtgaaacgtctttttatatatgaattgggaaactaaaaaatgaaattccgttgccgggactcgaacccgggtctttcgggtgagagccgaatatcctgaccagctagactacaacggattctgtttatgttgtgcatagtaatttataagattacgtagagctattcacagtaatggcttagcgacattctcgctgctgcaatggcgacggtctcgttccatcactgtcccccgtcattctcgctgctccaatggcgacggtctcgttccatcccccgtctcttcctcctccgtctcctaattttggaaaggccatagtttcccatcgcgagacctgtatccccatggatccatgagagaaaggcggaggagatcaggcgacgtacgcgcgtgggggtctcctcctgcacgctctcagctgaaccgccccgtgctcccctgggcgcgccgcgcgcaatggcccgacgacggcgccccctaccgccgccgctgctcgtctggttggccgtcctcttctctgcggtggcgcccgctgtcgccaagaccgacaagtctgacgttgctgcgctcaatgtgatgttcaatagcatgaacaagccatcgcaattgtccggttggaaatcgagcggcggtgatccctgcgatgacgatgacgagtggaaagggatagagtgcagcggctcatctgtcacagaaattaacttgtcagggcttgaactcagtggctcgctaggatatcagctatcaagcttgaaatcagtaaccaaatttacagtgatctcagcaataacaatctcaacggcgatcttccatatcagcttccaccaaacgtggttgaattaaatctttacggaaactctttaactggaggagttccttattcgatatctcagatgggtgatctggaaacactaaatttgggcaagaaccacctaagcgggcagttgacggatatgttttcagaacttccaaagctctcaacattggatctctccttcaaccgcttctcaggcagcctgcccaagagttttcagcacctaaaagacctcaagacgctgaatgtggagagcaaccaattcagtggtcatatagatgttctagcgaaacttcctctcgaggatctgaatctgcagaacaacaagtttactgggtggatccctagtaaactaaaagacatcagcaatctacagattggagggaaccagtggtcgtccggatcagctcctcctggtatggagaagggctctgcactggagggctcttcaggcggaggtggtcgaagtggagtaaacggtatcgccatcgcagctgtggtgatagcggtgcttgttgcagctctgattctcttgtctgtgttgaagaggaaccgttcttcttcctcgtctcattacctcatggatgagtcaggtcacaaccggtcatttgccccgctagttgatgatggcagaagtaaattgctcatagtgccttcttttaacattcatggtaaagcgctcatgctgctttctttgcttcagcgatcaacatgaagccactggagcattcatcgtcaattagcagtacgacaccgtctgcaatgcctatcaagccgattagtgacaacgagttcgagaacaaactaaactattcgaggcggagcacagatccagtcaaccttgttgcttattcatcatcagacctccaagcagccactggaagcttccatagtagcaggttactaggtcaggggacaatcggtggtgtttacaaggcaaaatatgctgatggaacggtgctggccgttaagaagtttgatccattgagcttctcgggaagcagcgacttcatggatcttgtgaacagcatttccaagctgcatcatccaaacatctccgtgcttgttggttactgctcagagcctgggcactacatgttggtctatgactacaacatgaatggatccctctatgactttctgcacttgtccgacgactacagcaagccgctgacctgggacacccgcgtaaggattgctgttggtacagcttgtgctctggagtacctacatgacgcgtgttcacctccagtgatccacaagaacatcaaggcatccaacgtcttgctcgatgctgacctcaaccctcacctcactgactgcggccttgcatacttctatgaggtttgcagaatgtctcttgaagaacttgttgagcaaagcatgaggtacgatcctccagagtgcacaaggccatcaggttacgttatgaagagcgatgtctactgctttggtgtcgtcatgcttcagctgttgaccggccggaagccctacgacagctcgaagcctagagcggagcagtccttggtcaagtttgtcggtccacagcttcatgacaccaacgccttggaagctctggcggatccaggccttcgtggcctatatccaccgaaagcattgtcccgtttcgccgatgtcctctcccgctgcgtccagtcggatccagaactccggccatccatgtcagaggtggtgcagttgcttctccagtgcgtccagcgcacaaccagcaacaggaggctgggtggccaccgcaccgtctcgcagcgaagcgacgattctgattggtgatgctctgtttctgcctccatcctgctgctgcggcccagttgctgaaactgtctcagaacagaaccgtaggtgtgcggcccttggcatgccgctgtacaaaagaaaatgctttattagacaatctggttgctcgaacagtgtggcaacaaataagtcggttgatttaggtaaaggtaaaagcagattgggtgttctagtgagtagtgacattgtatttgtactcataaacttaaaaacatatgaccagctaatttttaaaaatatataaaccatcttagaacaactccagcagggcctctcagatccctattctacttttgagaatgcaagagccaaaaaaaaaaaaaacccgaccctgaatagttggaggcactcaaatctccttctcgagcctttatttggtccgctctctctttgcgtgattggtccgcccgtccgtgtatggagctgcacttgcagagaattaaaagtgggc

SEQ ID NO: 22331 - DNA, 4983 bp, Zea Mays
cgctgccgtcgtcgcgccggcctcgatacgttcccgggaagtcggaggcgccgcgctcgtcacgccgccggctccgacgagatggaggatggcgtatctacttatactgtggatgaggcacttgtgtccatggggtttgggaaattccatgcattcgtgcttgcatactctgggatggctaaaatctctgaagcaatggagatgatgcttttgtcatttgttgggcaatcagttcaagctgagtgggggctttctgcacatgaagaaagcctcataacaagtgttgtctttgtggggatgcttgtaggagcatatgcttggggcatagtttcagataactatggaagaaggcagggtcttcctcactttttccattggctattggaatttgattatgaatgttctaacccttcaatctttttcgaaactttatggagtgttgcacactgttccatggttgggttcaacttcacagctattgttactggaggagctggccttcttagcgcttttgctccaaattacttatctttgattgtactgagatttatggtcggtgttggactgggtggtgggccagttttaggttcttggttcctagagttcatccctgctcctaaccgaggaacatggatggttatgttctcagcattttggactgttggcacaataatggaagcttctcttgcttgggccgttatgccagcttttggctggaggtggctgctggcactctcatcattgccatcgtttgccctgctactcttctacccagtgacacttgagtcaccaagatacctatgcatgaagggtagaatagctgaagcagttcatgttctggaaacaatgtcacgcgtgaactgtgtttctctcccctctggccgacttgtctctggccatcgggtggaacttcatgatatcggggattcttcagaaacggcacagttggtgacatctaataagaataacactgctgatcgtggtagcaaatccgagattggaggcctcagtgccatcttaaagcttctatctccaaacttaatcagatcgactcttctactctggactgtctttcttggtcatgcctttctgtactatggtcttgttctactcacatcagaactaaatcatggaaataggatctgtggatcagaagagggggcagaagtgacaacaacagcccacatacatgatgagaatctctacagaaatgtatttataacaagctttggagaggtccctggtcttctcctgtcggctgccattgttgacatgatcgggcgcaagctctcgatgtcttccatgctttacatcagttgcctgtgcatatctccgcttatgttcgcccagacggaatcgctgacgaccatctttttgttctgtgcccgggtttgcatctctgcaagcttcactgttctgcacatctacgcccctgagatatacccaactgctgttagggccacgggtgtcgggtttgcaagctcgattgctcgctttggtggaatcctgtgccctctcgtggccgtcggcctggtgcacgcgtgccaccagatggcagctatcctgatattcatcacggtgatgctggcttcaggcatcgccgtgtcatacttccccctggaaacaagcggccgaaagctgagcgaccacgtcgccgccgcgtaagagctgattaattgaagaactgactttttgagagggatacaccaatacagaatcaaggcccaaggggccattattttttttgttcagttgttgacaaaggatacagtgggaaagaaagtgcaaaggaggcactagattgttacgttattatactgttgcttctcaatagaaatctacagatcactatatgatttttgttctcttgtcaatatggtattagtatgaattctaaacgccctcaaaattcattttttgtttcaaaagtgaaacgtctttttatatatgaattgggaaactaaaaaatgaaattccgttgccgggactcgaacccgggtctttcgggtgagagccgaatatcctgaccagctagactacaacggattctgtttatgttgtgcatagtaatttataagattacgtagagctattcacagtaatggcttagcgacattctcgctgctgcaatggcgacggtctcgttccatcactgtcccccgtcattctcgctgctccaatggcgacggtctcgttccatcccccgtctcttcctcctccgtctcctaattttggaaaggccatagtttcccatcgcgagacctgtatccccatggatccatgagagaaaggcggaggagatcaggcgacgtacgcgcgtgggggtctcctcctgcacgctctcagctgaaccgccccgtgctcccctgggcgcgccgcgcgcaatggcccgacgacggcgccccctaccgccgccgctgctcgtctggttggccgtcctcttctctgcggtggcgcccgctgtcgccaagaccgacaagtctgacgttgctgcgctcaatgtgatgttcaatagcatgaacaagccatcgcaattgtccggttggaaatcgagcggcggtgatccctgcgatgacgatgacgagtggaaagggatagagtgcagcggctcatctgtcacagaaattaacttgtcagggcttgaactcagtggctcgctaggatatcagctatcaagcttgaaatcagtaaccaaatttgatctcagcaataacaatctcaacggcgatcttccatatcagcttccaccaaacgtggttgaattaaatctttacggaaactctttaactggaggagttccttattcgatatctcagatgggtgatctggaaacactaaatttgggcaagaaccacctaagcgggcagttgacggatatgttttcagaacttccaaagctctcaacattggatctctccttcaaccgcttctcaggcagcctgcccaagagttttcagcacctaaaagacctcaagacgctgaatgtggagagcaaccaattcagtggtcatatagatgttctagcgaaacttcctctcgaggatctatagtggaaactacgcttcgtctttctgagaactaaagctataatggcttcccctttgtgctcaaggaatctgcagaacaacaagtttactgggtggatccctagtaaactaaaagacatcagcaatctacagattggagggaaccagtggtcgtccggatcagctcctcctggtatggagaagggctctgcactggagggctcttcaggcggaggtggtcgaagtggagtaaacggtatcgccatcgcagctgtggtgatagcggtgcttgttgcagctctgattctcttgtctgtgttgaagaggaaccgttcttcttcctcgtctcattacctcatggatgagtcaggtcacaaccggtcatttgccccgctagttgatgatggcagaacgatcaacatgaagccactggagcattcatcgtcaattagcagtacgacaccgtctgcaatgcctatcaagccgattagtgacaacgagttcgagaacaaactaaactattcgaggcggagcacagatccagtcaaccttgttgcttattcatcatcagacctccaagcagccactggaagcttccatagtagcaggttactaggtcaggggacaatcggtggtgtttacaaggcaaaatatgctgatggaacggtgctggccgttaagaagtttgatccattgagcttctcgggaagcagcgacttcatggatcttgtgaacagcatttccaagctgcatcatccaaacatctccgtgcttgttggttactgctcagagcctgggcactacatgttggtctatgactacaacatgaatggatccctctatgactttctgcacttgtccgacgactacagcaagccgctgacctgggacacccgcgtaaggattgctgttggtacagcttgtgctctggagtacctacatgacgcgtgttcacctccagtgatccacaagaacatcaaggcatccaacgtcttgctcgatgctgacctcaaccctcacctcactgactgcggccttgcatacttctatgaggatccgagtcagagcctgggaccagggtacgatcctccagagtgcacaaggccatcaggttacgttatgaagagcgatgtctactgctttggtgtcgtcatgcttcagctgttgaccggccggaagccctacgacagctcgaagcctagagcggagcagtccttggtcaagtttgtcggtccacagcttcatgacaccaacgccttggaagctctggcggatccaggccttcgtggcctatatccaccgaaagcattgtcccgtttcgccgatgtcctctcccgctgcgtccagtcggatccagaactccggccatccatgtcagaggtggtgcagttgcttctccagtgcgtccagcgcacaaccagcaacaggaggctgggtggccaccgcaccgtctcgcagcgaagcgacgattctgattggtgatgctctgtttctgcctccatcctgctgctgcggcccagttgctgaaactgtctcagaacagaaccgtaggtgtgcggcccttggcatgccgctgtacaaaagaaaatgctttattagacaatctggttgctcgaacagtgtggcaacaaataagtcggttgatttaggtaaaggtaaaagcagattgggtgttctagtgagtagtgacattgtatttgtactcataaacttaaaaacatatgaccagctaatttttaaaaatatataaaccatcttagaacaactccagcagggcctctcagatccctattctacttttgagaatgcaagagccaaaaaaaaaaaaaacccgaccctgaatagttggaggcactcaaatctccttctcgagcctttatttggtccgctctctctttgcgtgattggtccgcccgtccgtgtatggagctgcacttgcagagaattaaaagtgggc

SEQ ID NO: 22332 - DNA, 4775 bp, Zea Mays
cgctgccgtcgtcgcgccggcctcgatacgttcccgggaagtcggaggcgccgcgctcgtcacgccgccggctccgacgagatggaggatggcgtatctacttatactgtggatgaggcacttgtgtccatggggtttgggaaattccatgcattcgtgcttgcatactctgggatggctaaaatctctgaagcaatggagatgatgcttttgtcatttgttgggcaatcagttcaagctgagtgggggctttctgcacatgaagaaagcctcataacaagtgttgtctttgtggggatgcttgtaggagcatatgcttggggcatagtttcagataactatggaagaagggttgggttcaacttcacagctattgttactggaggagctggccttcttagcgcttttgctccaaattacttatctttgattgtactgagatttatggtcggtgttggactgggtggtgggccagttttaggttcttggttcctagagttcatccctgctcctaaccgaggaacatggatggttatgttctcagcattttggactgttggcacaataatggaagcttctcttgcttgggccgttatgccagcttttggctggaggtggctgctggcactctcatcattgccatcgtttgccctgctactcttctacccagtgacacttgagtcaccaagatacctatgcatgaagggtagaatagctgaagcagttcatgttctggaaacaatgtcacgcgtgaactgtgtttctctcccctctggccgacttgtctctggccatcgggtggaacttcatgatatcggggattcttcagaaacggcacagttggtgacatctaataagaataacactgctgatcgtggtagcaaatccgagattggaggcctcagtgccatcttaaagcttctatctccaaacttaatcagatcgactcttctactctggactgtctttcttggtcatgcctttctgtactatggtcttgttctactcacatcagaactaaatcatggaaataggatctgtggatcagaagagggggcagaagtgacaacaacagcccacatacatgatgagaatctctacagaaatgtatttataacaagctttggagaggtccctggtcttctcctgtcggctgccattgttgacatgatcgggcgcaagctctcgatgtcttccatgctttacatcagttgcctgtgcatatctccgcttatgttcgcccagacggaatcgctgacgaccatctttttgttctgtgcccgggtttgcatctctgcaagcttcactgttctgcacatctacgcccctgagatatacccaactgctgttagggccacgggtgtcgggtttgcaagctcgattgctcgctttggtggaatcctgtgccctctcgtggccgtcggcctggtgcacgcgtgccaccagatggcagctatcctgatattcatcacggtgatgctggcttcaggcatcgccgtgtcatacttccccctggaaacaagcggccgaaagctgagcgaccacgtcgccgccgcgtaagagctgattaattgaagaactgactttttgagagggatacaccaatacagaatcaaggcccaaggggccattattttttttgttcagttgttgacaaaggatacagtgggaaagaaagtgcaaaggaggcactagattgttacgttattatactgttgcttctcaatagaaatctacagatcactatatgatttttgttctcttgtcaatatggtattagtatgaattctaaacgccctcaaaattcattttttgtttcaaaagtgaaacgtctttttatatatgaattgggaaactaaaaaatgaaattccgttgccgggactcgaacccgggtctttcgggtgagagccgaatatcctgaccagctagactacaacggattctgtttatgttgtgcatagtaatttataagattacgtagagctattcacagtaatggcttagcgacattctcgctgctgcaatggcgacggtctcgttccatcactgtcccccgtcattctcgctgctccaatggcgacggtctcgttccatcccccgtctcttcctcctccgtctcctaattttggaaaggccatagtttcccatcgcgagacctgtatccccatggatccatgagagaaaggcggaggagatcaggcgacgtacgcgcgtgggggtctcctcctgcacgctctcagctgaaccgccccgtgctcccctgggcgcgccgcgcgcaatggcccgacgacggcgccccctaccgccgccgctgctcgtctggttggccgtcctcttctctgcggtggcgcccgctgtcgccaagaccgacaagtctgacgttgctgcgctcaatgtgatgttcaatagcatgaacaagccatcgcaattgtccggttggaaatcgagcggcggtgatccctgcgatgacgatgacgagtggaaagggatagagtgcagcggctcatctgtcacagaaattaacttgtcagggcttgaactcagtggctcgctaggatatcagctatcaagcttgaaatcagtaaccaaatttacagtgatctcagcaataacaatctcaacggcgatcttccatatcagcttccaccaaacgtggttgaattaaatctttacggaaactctttaactggaggagttccttattcgatatctcagatgggtgatctggaaacactaaatttgggcaagaaccacctaagcgggcagttgacggatatgttttcagaacttccaaagctctcaacattggatctctccttcaaccgcttctcaggcagcctgcccaagagttttcagcacctaaaagacctcaagacgctgaatgtggagagcaaccaattcagtggtcatatagatgttctagcgaaacttcctctcgaggatctgaatctgcagaacaacaagtttactgggtggatccctagtaaactaaaagacatcagcaatctacagattggagggaaccagtggtcgtccggatcagctcctcctggtatggagaagggctctgcactggagggctcttcaggcggaggtggtcgaagtggagtaaacggtatcgccatcgcagctgtggtgatagcggtgcttgttgcagctctgattctcttgtctgtgttgaagaggaaccgttcttcttcctcgtctcattacctcatggatgagtcagcgatcaacatgaagccactggagcattcatcgtcaattagcagtacgacaccgtctgcaatgcctatcaagccgattagtgacaacgagttcgagaacaaactaaactattcgaggcggagcacagatccagtcaaccttgttgcttattcatcatcagacctccaagcagccactggaagcttccatagtagcaggttactaggtcaggggacaatcggtggtgtttacaaggcaaaatatgctgatggaacggtgctggccgttaagaagtttgatccattgagcttctcgggaagcagcgacttcatggatcttgtgaacagcatttccaagctgcatcatccaaacatctccgtgcttgttggttactgctcagagcctgggcactacatgttggtctatgactacaacatgaatggatccctctatgactttctgcacttgtccgacgactacagcaagccgctgacctgggacacccgcgtaaggattgctgttggtacagcttgtgctctggagtacctacatgacgcgtgttcacctccagtgatccacaagaacatcaaggcatccaacgtcttgctcgatgctgacctcaaccctcacctcactgactgcggccttgcatacttctatgaggatccgagtcagagcctgggaccagggtacgatcctccagagtgcacaaggccatcaggttacgttatgaagagcgatgtctactgctttggtgtcgtcatgcttcagctgttgaccggccggaagccctacgacagctcgaagcctagagcggagcagtccttggtcaagtttgtcggtccacagcttcatgacaccaacgccttggaagctctggcggatccaggccttcgtggcctatatccaccgaaagcattgtcccgtttcgccgatgtcctctcccgctgcgtccagtcggatccagaactccggccatccatgtcagaggtggtgcagttgcttctccagtgcgtccagcgcacaaccagcaacaggaggctgggtggccaccgcaccgtctcgcagcgaagcgacgattctgattggtgatgctctgtttctgcctccatcctgctgctgcggcccagttgctgaaactgtctcagaacagaaccgtaggtgtgcggcccttggcatgccgctgtacaaaagaaaatgctttattagacaatctggttgctcgaacagtgtggcaacaaataagtcggttgatttaggtaaaggtaaaagcagattgggtgttctagtgagtagtgacattgtatttgtactcataaacttaaaaacatatgaccagctaatttttaaaaatatataaaccatcttagaacaactccagcagggcctctcagatccctattctacttttgagaatgcaagagccaaaaaaaaaaaaaacccgaccctgaatagttggaggcactcaaatctccttctcgagcctttatttggtccgctctctctttgcgtgattggtccgcccgtccgtgtatggagctgcacttgcagagaattaaaagtgggc

SEQ ID NO: 22333 - DNA, 1362 bp, Zea Mays
ccatatcaccatagcacttttgaaacataatttactagaaatataaccaaaacttataacattgtcattggttgtttcaaataagagagaaaatagcagagaatcaaataagaaagaaaatagcagagaaatataaccaaaattcgtggacaagtaaattcatcagaggcttttgaatcaccggtttcttatttgagtccaatatttattttatttctcatataacatgattgagccaaaagagaaagagaatcaaaagaaggcaaaagcaaggtgtccgcgcttcatgctacttggaaggtccttcagtattccttgccaaagtttttgcaccacagttgagatgggattggccggactgggtgatgcgggcgttgctgcatagaagtattatagtacatttgttatgcactgtgatttccacaatctatttcagaaacaaaatgacgaacacattaagactgaaccatataacacaaacggcagttccttatcgtatatacatccgtagatgatctcagtcaagcaggtctacgtagatgatctcagtcaagcaggtcttcagtttagtatgcattcatgtcactagcccgctttcaataaaattataatgtgaaattttcagattgttctaacggagggagaacaatccggggataacaattgacaggaagatagccggcaaagtcaccgtggagggagactagagtatttgggggagttggatagttcttccttcattgcttttttcctccttggtacatcactttcctttatatagagagatatcctggccacctaaggaaggcctaatcaaatcataacaaataatatccaaacctatccctaactgacccaatctaatcctatctctaattgatcaaattcctctaattgagctaatctaattaatttcttaatcctttactcctctagcaaaggaccaagagtgaggcggttgtgatcagtcaggataactcaaaggtctggagttttctaatatgttctactgctctattgagaaatggccaattaagtacttcagggttccagtttcaggttctaaacttcatgtagccacctggttacctattgtggaaaatatgttctagaggttggatgattatgccatgtatttgttgcctttgtcaacaattaataagatgggacactgctagaaagagattttttttggcaggggggcagcttgaataaaaagtaccatttaatcaagtggatcaagattactaaacccaaatagaaagggggtcaaagatttgagaagaatgaatattagtctcctttgcaagtggtgatggaaaatgggaagggaatttggcaggaaactgtacacaattaaag

SEQ ID NO: 22334 - DNA, 511 bp, Zea Mays
atggatcccattatccccgatgatgaggcaagacacattgaaccaatagaagaagttgctgcacttgatgatgatgagaggcagtatcctgagtttgttgacaagtgggatatgctagaatttgaggactatgatggagatattgtcacaggggctcaatttgaagagactgatgaagaggaggaggagaacatagctatgggggtggatgagcaaggagagggtgatgatgtaccaagaattgattatgacagagataatccatccttaaaagaaggagtcacatttgcatcgatgacctagtttaggaatgcacttgctacctattgcatcaaaggtgagtatgattatgtaattgacaagagtgagccaactagaatgaatgttcattgcgcatttgaggtgtcagtggaggatacatgcttcctgtatgcgtaataatacacttatccaggtcaaagtgaatccatctcctcacacttgtctaagtgaaagataagagtcacataag

SEQ ID NO: 22335 - DNA, 606 bp, Zea Mays
attaaaccacgtgtctaaaccttgttttgtggcttctgttgggtttcaactctagcctactccaacttgtttgggactaaggctttgtcgttgttgttgttgtcaatttagtttatttctttccctagttaggtggcaggcccttttagctcattctagcaagttttgggccgacccaatgacagaaaataagcggaacttgcattaggaactgctttccatggcaataatagatcaaggattcaaggggcacttccaacaggatcaaaagcattggcaatgtcaccactttggaattttacagctaaatgaacagaaaaagtaccatattaacgaactggtcattacatccgcattcgaattgtgtgctgtaccgaatgggtaagcgaagtctctctataaagaacactgaagtatatattgagacgtttcgcgcagatctaatatctaggatatatcaagcataagctcaaatcctgaagaccgtgcacgccaaggagagatcgtagggtcagagtctgggtgatggggatacacatgtatacctcgagctcggcggacttcatggctatgggaatgcagatgaggaagacgccgaacatggcg

SEQ ID NO: 22336 - DNA, 794 bp, Zea Mays
ttgcagctccctgcataagatttgtacgccgtttccggtaatatacgaacgggccacttactagcaacattccggccatcattatctggaaaacaacataactttatgattcatgctttaagaaacaaagataaatttgtcttggattctcattgacaaatgaaaattaaaaaagaaaacaaaccatcaatacggtgttacattttcagtgcagaacgagcaagattgtgctacaaatagaaagaaatgcaactcatgctttgcactcttacagtacgaaactacataggcacaccttttgatgcttcaatttcacgagtattttggaatttatcaaacatcatgctcagaacatcaacaaacagctctagatatatatcacagctgcaaagaaaaggtaaggtctgcttgcatgtttaagggcaaaattcagagtccaattttagtctaatgaaattaccccagaaatgcttctcaatttactaagatttttctgcctttcactattatttctcactatcaagtctttggtctcagtctgtgtccagcttgctcggcagtgatggcggcgactgcagctgcatttgccacagccatcagtaccgagcgctcctggtgcattaacattagaaaaacaagtaacattatagagtaaataaagaattcatgatataagtccaacaatatctgtaatatagaagagaaaagtgttgcaattttaatacctcaaaaccaagaacagataaattctcctctccaaccaacggcacacaacttctgtaagtaatataatg

SEQ ID NO: 22337 - DNA, 7382 bp, Zea Mays
accagttttatggctaataccagtttaaaatacagttccagcaatttttacaggtcaagctgaaaaacttgtttggatgagttataaatctattaattttacacctttatttgagttttccaactagaaaaaatcacctcagtggaccacatttatttgccggccgaaatcaagctcacctcgctcctcgtttctcgtgatcctgaatgagttgtaaatctaataattttacacctgtatttgagcttttttactggaaaaaattaataactacagtggactacactaattccagtgacccgtctgttacctcacacacattgagaatggccagaggcggcaagcctgccagctgtcaacccgttagagcagaaaactcagccagcagccatgaggcctgccttgaggtagcgtgctcagccagtgggtgcaaggaccaggttgaggctccagctcttcatgactgccagcccaagtggcactacagtgagcctgagtcagctaacaagggtgtcggccaaacaagtctgcacaatggcaagttcgtttcgagcatcaggttgagaagtgcaagtattccatcacttacccaaacaactagtgtgaaaaatcagtgtaactacaagcctattttcagaatatttatgggaccattttaaggtcatattttttgcaatggcaagcaattctgaaacttatatgacagaattgataaggtggagggcaagtctaagggtgagggcgagagttgatggttaggaatatgaccaatcttataagattacattatgggtctataagataagcttgtcttaagttgtaatatcttttttgtaagtaaacaatttccacagggaaattattttagcaatcaaataagtgaaatatttgggctttctggcatcaggcggtaacacacatgtaatcctttttattttgtaacagtgtgtaatctgtcaggccaagaaagaggcagcatagaaactaagattcaaccatcagttccgatgcagaaactttgcattctatgcacaacttaaatgacatcaagaggcacacttcagtgttgttttcaacaaaaaggttgggcacaaagaaacctttggagtaatttgaaaccaatgatgtccatatccttcaatccataatacccccttcttttcaaacacatactaagtactatatcacacattttgccatacatgttgtagcataaaccaaaaaaatcaggatatgaaagtaccagacaatgtgattgacaaattaatgaaatactaaaggctcctacttcaccgaccaagaactacattttgcaatgtcatgaagaccgttatattagcttcaaagaccagtggtatactaattttactaacaaagcatcactaccgacacatattatcctgtacagccaaccccaaccaccctgaaaaaagttacccattagcaagttaactaaaatccagggcgtgttaggaaggaaagtatttcaaaaccatggttttggaatactacggttttaagatgtcatgacacaactacaatattttttacatcactcttagcaatacatgtttggagacaaagtattttaaaccatggtatttggtatacatgtgcaaggctagtcattgacaaaaactttgggttggagtgaagtttcaaatactccaaaaattacatggtatttataaaaccatggtattcaaaacaaagtttttttacgaggtagccaaacacctcttggcaaagaatactatgggcctatttgtgttgtggactcattcttctacaggaacacctatgggcgcaggcacaagaagggaacctccaccaataaggcaaccgagctagaggagctggaagaataggaaaggaagcaagcaatcaggcagccgaattggaagcaatcaggcgagtcctatctccagtatatcaatcagtagtttcctatttctgctatagcagacagtagagtttcctatttccattatagaaagtaataagttgattgggtgtgttccctgccgcctatactataaaggctggctgctagtttgtaagaaggcatcgaagaataatacagttacctcctagaggtgggctgttcttcgacggtggcgccttcagccgccggcgacgacagacctcctcgctacgttctgcgttcttgttctcaagccgctctcctcctccactctcccctgcatacccctcgcctaccaccacgccgcagccataacaaattggtatcggagacaagtgccctgaccatgtccagcgtcgcgggcgatcctgagcctgattcggtgaagctggaccgcatcagcgcgctgctcacaaccatgaacaaccgcctgaacgcgcatgaccagcgcatcgcgcgcacggagaaatttcagtccggtgatgaaggggaccacgagccgcagggttcgcctgatcgtcgacgacacggaggcacgaaggaaggcagcttcagtgggggccgcgggaatggccctcgacgtcatgacagcagtggcccacgcgaacccaacctcaacttctcgcactacgatggtgagtcggatccgctcccatggttgaacaagtgtgaaggcttttttcgcggctaccgcacgctgcaggaggataaggtgtggatggcctctctccatctcgacggcacggcggcacaatggtactaccagttggagcgtgatctcggcatcatcacatggccgcgctttgtcgaattcaccaacatgcgcttcggcccgcccatccgctccaacgcgcttggggagttgaaggagctccaccgtaccggcacggtggaggaataccagcgccagttcttggctctcctgtgccgctgcgacaacctgacccggcagcaccaaatcgacttgttcactgccgggttgggtcagcccttgtcatccgacgtcgagatgcaacatccggcgaaccttcagacagccatgagtctggcccgggccttcgagcgtcgttccgccgaggcggctcgcgccatctacccgtccacgccgcgccagccttcccgtcctcgtccaccgtcaacgacaccagcaccgacgacggaggaaccacagcgaccccgcgttcgtcggctgtcggctgaggagatcgccgacaaacgtgccaaggggcaatgttatttttgcccagagaaattctcccgggatcacaagtgtgcggcgcggggcggcgtgttctgtctgtccctggacgacgctgcgccagaggacgacgacatcacggaggaagtctgcatctcgctgaacgcgttgacgggggtccctgctggtgacaccatccgtcttcgcgtcaagatccaaggggaagagctgacggcactggtggactccgactccacccactccttcatcaaccagggcgtcgcccaccgactcggcctcgccatcacccatcggccgggtctggtggtcactgttgctaatggacagcagctgcacagtccgggcatctgtgcagcaatgccattggccatccaggaccagacgttctccatcgactgctatgccttagctctcgagggcttcgacgtcgtcctcggtgtccactggctcaagacgctgggacccattacatgggacttcacggcgcgatccatggctttctggcaccatgatcgtgccgtcatgtggcgtgggatcggtggtgaggaagttagccttgctgctctgacggcgaccagagacctcatgaattcattactgcaagattttactgacctgtttgcagaaccgcgtggactgccgcccgcgcgacgccatgaccatcacattcatttgttgccgggtacggctcctattgcagtccgaccgtaccgatacccgcagcttttgaaagatgagattgagcgccaatgtcaggaaatgctggcacaggggattattcgggaaaccacatcccctttctcctcccctgttctccttgtgaagaagcatgatggtacttggcgattttgtgtggattttcgggccttaaatgacaagacggtcaagaacaaatttcctatcccagtggtcgacgagctccttgatgagctgtcgggcgcttgtttcttcaccaagattgatctccgcagcgggtaccaccaggtccggatgcatccagaggacattgccaagaccgcgtttcgcacgcatcatggccattttgagttcctcgtcatgcctttcggcttgacgaacgcgccagcaacatttcaagctctcatgaataccatcctcaagccatttctccgccggttcgttctagtcttttttgatgatatactcatctatagttcttcttgggagacacatgtgcagcaggtcaggatggtttttcagttgttacgcgccaactgcctcttcatcaagcagtctaaatgtttcttcggcgaaccaacggtggcctacctgggccatattatctccaaggagggcgtggccatggacccatccaaggtggcggctgtggaggcatggccacaaccgcggactgcacgggcgctgcggggttttcttggcctcaccgggtactaccgcaagtttattgcggggtacggtgcggtggccgagcccttaactgctctcctcaagggggcggctttctcctggacttcccaagcgacatcggccttccaagccctgaagaaggcgctagtgtctgctccactgctccgactaccagacttctccaagcgcttctacgtcgactgcgatgcttcgggctccggctttggcgcggtgctgcaccagggagagggcgccgtggcttacttcagtcgcgccgtggcccctcaccacgccaagttgcccgcatatgaaagagagctgatcggcttagtcaaagccgttcgcaattggaggccatacttgtggggaaggtcattcacagtccgcactgatcatcgcagcttgaagtacatattggaccaacgtctgaccactattccacagcacacttgggtcacgaagctatttggttatgatctggatgtggtgtaccgcccagggaagcaaaatgcagcagcagatgccttatctcgtcgggatgaggaggccttcagtattcatgccctatcgacaacatcctttgcagtttttgatgcaattcgtcaagaactccttgctgatccaagagcacaagaaattcgggcccagttagccagtggcactgcaccagcagggtggacggaggtggatggactgctgttatttcagggcaaagcatatgttccagattcatctcccctatggccacagctactggagaatgcacatacagcaggacatgagggtattcagaagacactctatcgtcttcggttatccttcttcaactctcatagcagccgtttggtcagagagtatgtcaaaggttgtggagtttgtcagcgcaataaaactgagcacttgcacccagctggactgctgcagcccctgccagttccctcttctgtttggagtgatattgctatggacttcgttgagggctttcccaaagttggtgggaaatcagttattttgactgtggtggaccggttttccaaatatgctcatttcatcccactcagccatccatattcagccaccgttgttgccaaagccttctttgatgagattgttcggctacatgggttcccatgttctattgttagtgaccgggacccggtttttactagcactttttggactgaattattccgtttagcaggggtgacattgcttctcagttcagcttttcacccacaaacggatgggcagtcggaggtcactaatcgcattatcactatgtatcttcgttgcttagcaggcgatcgaccccgttcttggctacagtggttaccgtgggcagaattttgctacaattcttccttccaaacagctattggtgtttctcctttccaggtggtttatggccggcctccaccaaccttgctgcaatttgaacagggggcggcaaaggtggcagcagtagaagcccaactcagagatagagatgaattccttgctgaaatccgtgatcggttattgttggctcaggaggtaatgcgtgctcagcatgataagaagcaccgggaggttgtctttgcagtaggagactgggtttggctccgtttgcatcaccgcacagccgtgggtatcactccagctcgtgccaccaagctgggccctaagtactttggaccttatgaagtgctagagcagattggatcagtagcttatcgtcttcgtttaccagcagcagctcgcatccataatgtgtttcatgtggctcttcttaagcctttcgtgggtacccctccggtgggtgatccagtgcagttgccatcgcttgtgcatggaagagtggttcctaaacccttgaagatcattcgtgctcgtctcaaccatggagtatgggaattgttggtacattgggacggacagacagctgttgatgcttcttggatttcactagaagaattcaagaaagaatatccggtgtttcagctcgaggacgagctgttccagggggaggggggaagtgttgtggactcattcttctacaggaacacctatgggcgcaggcacaagaagggaacctccaccaataaggcaaccgagctagaggagctggaagaataggaaaggaagcaagcaatcaggcagccgaattggaagcaatcaggcgagtcctatctccagtatatcaatcagtagtttcctatttctgctatagcagacagtagagtttcctatttccattatagaaagtaataagttgattgggtgtgttccctgccgcctatactataaaggctggctgctagtttgtaagaaggcatcgaagaataatacagttacctcctagaggtgggctgttcttcgacggtggcgccttcagccgccggcgacgacagacctcctcgctacgttctgcgttcttgttctcaagccgctctcctcctccactctcccctgcatacccctcgcctaccaccacgccgcagccataacaatttggtagcatggttatttcatagtttcgatgcaataatgcggtattgtaggatactacagtattttaggcctatatgtgtttggttggtccttctaaaacattgttttcaatactgtggtttagataaaactgtagtatttttaaagtattggatactgcactccccaccaaagttttcctccgtctgtgccgcccgcgcgcccccctccccctgccccgttggctacgccagaggcccgcctgttgcctgccgccaagtcacaagcctgaacagcatgtgccagtcctcagagcaccctgcatggctgcatgcaccagaggccccctagaaaaatagagacgatggcaagaacgaagccagg

SEQ ID NO: 22338 - DNA, 1278 bp, Zea Mays
ccgacggagctcatctctttgagcgggagtgctggactgcagctgccagctgcatttgcgtgcagcactgcctgcgcctgctgtgccgcccagtccaatggagagggccgcgtcggtcatctcctcgctcctcggcggcggcggcggctccggggcacaggcggcaacggtgaagtccgtcctcgtgtaccccatcaagtcctgcaggggaatctccgtgccccaagcccccatcaccgccacggggttcaggtgggatcgccagtggatgctcgtcaactccaaagggagagcatgcacccagagggtggagcccaagcttgctctggttgaggtccagatgccgccggaggcctttgccgaggactggcaccccacgcccgacgaccacatggttatcagagcacctggaatggaacccttgaaggtccctctttctgtggaatgtgccacaatcagtgatgtctctgtgtgggagtggactggcgctgcttatgatgaaggtgctgaagcagccgaatggttttccacatttttggggtgcccaactcgactggtgcgctttaacgaagtattttagtggaggggtgccacccatatgcagaggatatgtggaaatcagtaaagataaacaagttaacatttcaaggtgtgaagttatgtggccgttgcaaggtccctacaattaaccaagacactggaatacctagccctactgaaccaactgaaactctgcagacatatcggtcgggtgaagtgctgcttcgtagccacaaaaacaaacgccaggtgtactttgggcaaaatgcagtctgcaaggaatctctgtcagcaaatggggaaggaaggatcgtcaaggtcggggatccagtttaggccttgttcgtttacatcggattgtacccggaatcattccggctaatcaaagtttatataaattagagaagcaatccggctcggaatcgttccgacccaccaatccgacacaaacgaacaaggccttatgtgacacagtcgttctcttcatctgttgaagtgccagcctgagtgaccgaatcaggacggctatgtaacaaccacttgtataatttttagcactattttagatttatatttgctgaggaaagttaaattaatatttacgaagttttaagtttaagtttaaagagttttagttaagtttttctataagaaataattgtttattctccattatattaaaatcagcgtggatatttaatttgagagtactaaaaaatattgaggttaagttatttt

SEQ ID NO: 22339 - DNA, 1175 bp, Zea Mays
ccgacggagctcatctctttgagcgggagtgctggactgcagctgccagctgcatttgcgtgcagcactgcctgcgcctgctgtgccgcccagtccaatggagagggccgcgtcggtcatctcctcgctcctcggcggcggcggcggctccggggcacaggcggcaacggtgaagtccgtcctcgtgtaccccatcaagtcctgcaggggaatctccgtgccccaagcccccatcaccgccacggggttcaggtgggatcgccagtggatgctcgtcaactccaaagggagagcatgcacccagagggtggagcccaagcttgctctggttgaggtccagatgccgccggaggcctttgccgaggactggcaccccacgcccgacgaccacatggttatcagagcacctggaatggaacccttgaaggtccctctttctgtggaatgtgccacaatcagtgatgtctctgtgtgggagtggactggcgctgcttatgatgaaggtgctgaagcagccgaatggttttccacatttttggggtgcccaactcgactggtgcgctttaacgaaggtccctacaattaaccaagacactggaatacctagccctactgaaccaactgaaactctgcagacatatcggtcgggtgaagtgctgcttcgtagccacaaaaacaaacgccaggtgtactttgggcaaaatgcagtctgcaaggaatctctgtcagcaaatggggaaggaaggatcgtcaaggtcggggatccagtttaggccttgttcgtttacatcggattgtacccggaatcattccggctaatcaaagtttatataaattagagaagcaatccggctcggaatcgttccgacccaccaatccgacacaaacgaacaaggccttatgtgacacagtcgttctcttcatctgttgaagtgccagcctgagtgaccgaatcaggacggctatgtaacaaccacttgtataatttttagcactattttagatttatatttgctgaggaaagttaaattaatatttacgaagttttaagtttaagtttaaagagttttagttaagtttttctataagaaataattgtttattctccattatattaaaatcagcgtggatatttaatttgagagtactaaaaaatattgaggttaagttatttt

SEQ ID NO: 22340 - DNA, 1426 bp, Zea Mays
ccgacggagctcatctctttgagcgggagtgctggactgcagctgccagctgcatttgcgtgcagcactgcctgcgcctgctgtgccgcccagtccaatggagagggccgcgtcggtcatctcctcgctcctcggcggcggcggcggctccggggcacaggcggcaacggtgaagtccgtcctcgtgtaccccatcaagtcctgcaggggaatctccgtgccccaagcccccatcaccgccacggggttcaggtgggatcgccagtggatgctcgtcaactccaaagggagagcatgcacccagagggtggagcccaagcttgctctggttgaggtccagatgccgccggaggcctttgccgaggactggcaccccacgcccgacgaccacatggttatcagagcacctggaatggaacccttgaaggtccctctttctgtggaatgtgccacaatcagtgatgtctctgtgtgggagtggactggcgctgcttatgatgaaggtgctgaagcagccgaatggttttccacatttttggggtgcccaactcgactggtgcgctttaacgaagaaactaggctgactgaccctgactatgcacgaggttacaaaaccatgttttctgatggcttcccttatctgatagtctctcagggctcattggatgcattaaatgagatactcaaagagcctataccaattaaccgcttcagaccaaatattttagtggaggggtgccacccatatgcagaggatatgtggaaatcagtaaagataaacaagttaacatttcaaggtgtgaagttatgtggccgttgcaaggtccctacaattaaccaagacactggaatacctagccctactgaaccaactgaaactctgcagacatatcggtcgggtgaagtgctgcttcgtagccacaaaaacaaacgccaggtgtactttgggcaaaatgcagtctgcaaggaatctctgtcagcaaatggggaaggaaggatcgtcaaggtcggggatccagtttaggccttgttcgtttacatcggattgtacccggaatcattccggctaatcaaagtttatataaattagagaagcaatccggctcggaatcgttccgacccaccaatccgacacaaacgaacaaggccttatgtgacacagtcgttctcttcatctgttgaagtgccagcctgagtgaccgaatcaggacggctatgtaacaaccacttgtataatttttagcactattttagatttatatttgctgaggaaagttaaattaatatttacgaagttttaagtttaagtttaaagagttttagttaagtttttctataagaaataattgtttattctccattatattaaaatcagcgtggatatttaatttgagagtactaaaaaatattgaggttaagttatttt

SEQ ID NO: 22341 - DNA, 1410 bp, Zea Mays
ccgacggagctcatctctttgagcgggagtgctggactgcagctgccagctgcatttgcgtgcagcactgcctgcgcctgctgtgccgcccagtccaatggagagggccgcgtcggtcatctcctcgctcctcggcggcggcggcggctccggggcacaggcggcaacggtgaagtccgtcctcgtgtaccccatcaagtcctgcaggggaatctccgtgccccaagcccccatcaccgccacggggttcaggtgggatcgccagtggatgctcgtcaactccaaagggagagcatgcacccagagggtggagcccaagcttgctctggttgaggtccagatgccgccggaggcctttgccgaggactggcaccccacgcccgacgaccacatggttatcagagcacctggaatggaacccttgaaggtccctctttctgtggaatgtgccacaatcagtgatgtctctgtgtgggagtggactggcgctgcttatgatgaaggtgctgaagcagccgaatggttttccacatttttggggtgcccaactcgactggtgcgctttaacgaagattcagaaactaggctgactgaccctgactatgcacgaggttacaaaaccatgttttctgatggcttcccttatctgatagtctctcagggctcattggatgcattaaatgagatactcaaagagcctataccaattaaccgcttcagaccaaatattttagtggaggggtgccacccatatgcagaggatatgtggaaatcagtaaagataaacaagttaacatttcaaggtgtgaagttatgtggccgttgcaaggtccctacaattaaccaagacactggaatacctagccctactgaaccaactgaaactctgcagacatatcggtcgggtgaagtgctgcttcgtagccacaaaaacaaacgccagtctgcaaggaatctctgtcagcaaatggggaaggaaggatcgtcaaggtcggggatccagtttaggccttgttcgtttacatcggattgtacccggaatcattccggctaatcaaagtttatataaattagagaagcaatccggctcggaatcgttccgacccaccaatccgacacaaacgaacaaggccttatgtgacacagtcgttctcttcatctgttgaagtgccagcctgagtgaccgaatcaggacggctatgtaacaaccacttgtataatttttagcactattttagatttatatttgctgaggaaagttaaattaatatttacgaagttttaagtttaagtttaaagagttttagttaagtttttctataagaaataattgtttattctccattatattaaaatcagcgtggatatttaatttgagagtactaaaaaatattgaggttaagttatttt

SEQ ID NO: 22342 - DNA, 1614 bp, Zea Mays
agctaataggtcgagtgcttcgctaccagccagccagtagtatcgagtatactactcacgccatcttgcactcctccgacaccgaggcagctccaagccatggccatggagaaggctgcctcctccctcttaggcggaggcggcggggagccggcagcgactgtgaaatctatcttcatataccctatcaagtcctgcaggggtctcgccgtgtcacaggcgctcatcatctctaccgggttccggtgggatcggcagtgggtggtggtgaacggcaaagggcgagcatacacccagagggtggaacccaagctcgctctggtccaggtagagttgccgccggaggccttcgccgaggactggcagcccacgccctacgaccacctggttatcagagcacccggaatggacacgctgaagatacctctagcagcggaacacaccacaatcgatgatgtctctgtgtgggagtggtctggctctgcgtacgatgaaggggctgaagtgtctgagtggttctccacttactttgggaagccaagtcgactagtgcgcttcaaagaagcatcggaaactaggccaaccgatccagattatgcccaaggttataagatcatgttcaccgattgcttcccatttctgatagcttctcagggttcactggatgcactaaatgagattcttaaagaacctgtaccaatgaaccgcttcagaccaaatattttagtggatggatgccacccatactcagaggacctgtggaaaaccataaagataaacaacctaacattcctaggtgtgaagttatgcaaccgctgcaaggtgccaaccattaatcaagaggatggagtacctggtactgaaccaactgaaactctacagacttttcggtccgaccaagtgcttcgtccaagccacaaaaataaacgacaggtgtactttgggcagaatttagtctgcaaggaatctctatcaggtgaaggaaaggtcatcaaggttggcgatccagtttatgttgtgcaggcattcgcttcttctaatgaagccccagcctgattcagggttaaaagtagtgacagggtgttcaaaataagtgagtttgtcttgcacactggataaacaaaaaacagtgggctgttgaaactgttaatgagacaataaaacacttgccgctggacagtaattatgaattagctgtaccttcatcaggggcttatttacttctatgatattacataccttgtacatcagaataatacaaaacaataagaagtgccaaaaaaggaggtgagttagaagagactgtctaaataggatggaatggatggctgatggagtcttttgtaccctatacaaaatcagtgacccactgcaagttccttcagtaacatcagaacagcatgtttgtctatagttccaaggatcttccaaagctcttcaggccacgattgatactaaagaaattgtcacatgaacagtgcagtggctgctttgtcggtgagactggcgtgatcacatcaaaatgtagtggcagccatcatagcctgaaaagaaggcatgcatggtttagataacatgcattgagctgaataatttggtatgaatatagacgca

SEQ ID NO: 22343 - DNA, 1540 bp, Zea Mays
gtatcatcctgctggcgcggcacaagacgccaccgagccaagaatttgcatcctcatcctgcggctgtcagtgtcaagcagccaggctcaggggtaaggtttcagcaattcagctccctcgcctccgccgcggcaccggcactacgagtgcttcgctaccagccagccagcacactctacgagtcgccatcttccactccaccgaggcagctccaagccatggccatggagaaggccgcctccttcctctcctccctcttaggcggcggcggccttcgctgagaactggcagcccacgcccgacgaccacctggttatcagagcacccggaatggacacactgaagatacctctaataacggaacacaccacaatcgatgatgtctctgtctgggagtggtctggctctgcgtatgatgaaggggctgaagcgtctgaatggttctccacttactttgggaagccaagtcgactagtgcgcttcaaagaagcatcggaaactaggccaaccgatccagattatgcccaaggttataagatcatgttcaccgattgcttcccatttctgatagcttctcagggttcactggatgcactaaatgagattcttaaagaacctgtaccaatgaaccgcttcagaccaaatattttagtggatggatgccacccatactcagaggacctgtggaaaaccataaagataaacaacctaacattcctaggtgtgaagttatgcaaccgctgcaaggtgccaaccattaatcaagaggatggagtacctggtactgaaccaactgaaactctacagacttttcggtccgaccaagtgcttcgtccaagccacaaaaataaacgacaggtgtactttgggcagaatttagtctgcaaggaatctctatcaggtgaaggaaaggtcatcaaggttggcgatccagtttatgttgtgcaggcattcgcttcttctaatgaagccccagcctgattcagggttaaaagtagtgacagggtgttcaaaataagtgagtttgtcttgcacactggataaacaaaaaacagtgggctgttgaaactgttaatgagacaataaaacacttgccgctggacagtaattatgaattagctgtaccttcatcaggggcttatttacttctatgatattacataccttgtacatcagaataatacaaaacaataagaagtgccaaaaaaggaggtgagttagaagagactgtctaaataggatggaatggatggctgatggagtcttttgtaccctatacaaaatcagtgacccactgcaagttccttcagtaacatcagaacagcatgtttgtctatagttccaaggatcttccaaagctcttcaggccacgattgatactaaagaaattgtcacatgaacagtgcagtggctgctttgtcggtgagactggcgtgatcacatcaaaatgtagtggcagccatcatagcctgaaaagaaggcatgcatggtttagataacatgcattgagctgaataatttggtatgaatatagacgca

SEQ ID NO: 22344 - DNA, 1683 bp, Zea Mays
gtatcatcctgctggcgcggcacaagacgccaccgagccaagaatttgcatcctcatcctgcggctgtcagtgtcaagcagccaggctcaggggtaaggtttcagcaattcagctccctcgcctccgccgcggcaccggcactacgagtgcttcgctaccagccagccagcacactctacgagtcgccatcttccactccaccgaggcagctccaagccatggccatggagaaggccgcctccttcctctcctccctcttaggcggcggcggcggggagccggcggcgactgtgaaatctatcttcatataccctatcaagtcctgcaggggtcttgccgtgtcacaggcgcccatcacctccactgggttccggtgggatcggcagtgggtggtggtgaacgccaaagggcgagcatacacccagagggtggagcccaagcttgctctggtccaggtggagttgccgccggaggccttcgctgagaactggcagcccacgcccgacgaccacctggttatcagagcacccggaatggacacactgaagatacctctaataacggaacacaccacaatcgatgatgtctctgtctgggagtggtctggctctgcgtatgatgaaggggctgaagcgtctgaatggttctccacttactttgggaagccaagtcgactagtgcgcttcaaagaagcatcggaaactaggccaaccgatccagattatgcccaaggttataagatcatgttcaccgattgcttcccatttctgatagcttctcagggttcactggatgcactaaatgagattcttaaagaacctgtaccaatgaaccgcttcagaccaaatattttagtggatggatgccacccatactcagaggacctgtggaaaaccataaagataaacaacctaacattcctaggtgtgaagttatgcaaccgctgcaagacttttcggtccgaccaagtgcttcgtccaagccacaaaaataaacgacaggtgtactttgggcagaatttagtctgcaaggaatctctatcaggtgaaggaaaggtcatcaaggttggcgatccagtttatgttgtgcaggcattcgcttcttctaatgaagccccagcctgattcagggttaaaagtagtgacagggtgttcaaaataagtgagtttgtcttgcacactggataaacaaaaaacagtgggctgttgaaactgttaatgagacaataaaacacttgccgctggacagtaattatgaattagctgtaccttcatcaggggcttatttacttctatgatattacataccttgtacatcagaataatacaaaacaataagaagtgccaaaaaaggaggtgagttagaagagactgtctaaataggatggaatggatggctgatggagtcttttgtaccctatacaaaatcagtgacccactgcaagttccttcagtaacatcagaacagcatgtttgtctatagttccaaggatcttccaaagctcttcaggccacgattgatactaaagaaattgtcacatgaacagtgcagtggctgctttgtcggtgagactggcgtgatcacatcaaaatgtagtggcagccatcatagcctgaaaagaaggcatgcatggtttagataacatgcattgagctgaataatttggtatgaatatagacgca

SEQ ID NO: 22345 - DNA, 1539 bp, Zea Mays
gtatcatcctgctggcgcggcacaagacgccaccgagccaagaatttgcatcctcatcctgcggctgtcagtgtcaagcagccaggctcaggggtaaggtttcagcaattcagctccctcgcctccgccgcggcaccggcactacgagtgcttcgctaccagccagccagcacactctacgagtcgccatcttccactccaccgaggcagctccaagccatggccatggagaaggccgcctccttcctctcctccctcttaggcggcggcggcggggagccggcggcgactgtgaaatctatcttcatataccctatcaaagcacccggaatggacacactgaagatacctctaataacggaacacaccacaatcgatgatgtctctgtctgggagtggtctggctctgcgtatgatgaaggggctgaagcgtctgaatggttctccacttactttgggaagccaagtcgactagtgcgcttcaaagaagcatcggaaactaggccaaccgatccagattatgcccaaggttataagatcatgttcaccgattgcttcccatttctgatagcttctcagggttcactggatgcactaaatgagattcttaaagaacctgtaccaatgaaccgcttcagaccaaatattttagtggatggatgccacccatactcagaggacctgtggaaaaccataaagataaacaacctaacattcctaggtgtgaagttatgcaaccgctgcaaggtgccaaccattaatcaagaggatggagtacctggtactgaaccaactgaaactctacagacttttcggtccgaccaagtgcttcgtccaagccacaaaaataaacgacaggtgtactttgggcagaatttagtctgcaaggaatctctatcaggtgaaggaaaggtcatcaaggttggcgatccagtttatgttgtgcaggcattcgcttcttctaatgaagccccagcctgattcagggttaaaagtagtgacagggtgttcaaaataagtgagtttgtcttgcacactggataaacaaaaaacagtgggctgttgaaactgttaatgagacaataaaacacttgccgctggacagtaattatgaattagctgtaccttcatcaggggcttatttacttctatgatattacataccttgtacatcagaataatacaaaacaataagaagtgccaaaaaaggaggtgagttagaagagactgtctaaataggatggaatggatggctgatggagtcttttgtaccctatacaaaatcagtgacccactgcaagttccttcagtaacatcagaacagcatgtttgtctatagttccaaggatcttccaaagctcttcaggccacgattgatactaaagaaattgtcacatgaacagtgcagtggctgctttgtcggtgagactggcgtgatcacatcaaaatgtagtggcagccatcatagcctgaaaagaaggcatgcatggtttagataacatgcattgagctgaataatttggtatgaatatagacgca

SEQ ID NO: 22346 - DNA, 1480 bp, Zea Mays
gtatcatcctgctggcgcggcacaagacgccaccgagccaagaatttgcatcctcatcctgcggctgtcagtgtcaagcagccaggctcagggggttccggtgggatcggcagtgggtggtggtgaacgccaaagggcgagcatacacccagagggtggagcccaagcttgctctggtccaggtggagttgccgccggaggccttcgctgagaactggcagcccacgcccgacgaccacctggttatcagagcacccggaatggacacactgaagatacctctaataacggaacacaccacaatcgatgatgtctctgtctgggagtggtctggctctgcgtatgatgaaggggctgaagcgtctgaatggttctccacttactttgggaagccaagtcgactagtgcgcttcaaagaagcatcggaaactaggccaaccgatccagattatgcccaaggttataagatcatgttcaccgattgcttcccatttctgatagcttctcagttgtactgcagggttcactggatgcactaaatgagattcttaaagaacctgtaccaatgaaccgcttcagaccaaatattttagtggatggatgccacccatactcagaggacctgtggaaaaccataaagataaacaacctaacattcctaggtgtgaagttatgcaaccgctgcaaggtgccaaccattaatcaagaggatggagtacctggtactgaaccaactgaaactctacagacttttcggtccgaccaagtgcttcgtccaagccacaaaaataaacgacaggtgtactttgggcagaatttagtctgcaaggaatctctatcaggtgaaggaaaggtcatcaaggttggcgatccagtttatgttgtgcaggcattcgcttcttctaatgaagccccagcctgattcagggttaaaagtagtgacagggtgttcaaaataagtgagtttgtcttgcacactggataaacaaaaaacagtgggctgttgaaactgttaatgagacaataaaacacttgccgctggacagtaattatgaattagctgtaccttcatcaggggcttatttacttctatgatattacataccttgtacatcagaataatacaaaacaataagaagtgccaaaaaaggaggtgagttagaagagactgtctaaataggatggaatggatggctgatggagtcttttgtaccctatacaaaatcagtgacccactgcaagttccttcagtaacatcagaacagcatgtttgtctatagttccaaggatcttccaaagctcttcaggccacgattgatactaaagaaattgtcacatgaacagtgcagtggctgctttgtcggtgagactggcgtgatcacatcaaaatgtagtggcagccatcatagcctgaaaagaaggcatgcatggtttagataacatgcattgagctgaataatttggtatgaatatagacgca

SEQ ID NO: 22347 - DNA, 1435 bp, Zea Mays
tccaagaattctatactatacttaaagcaccaatttcaacggtcatcatgcgtcatctttttaaaataacccctcagctatttcaaattaatctgctgcacgtctatatagatggccaaacggcgaccggcacaggctagacgcacgcgtggggttcgaacccatgtcctgatggaagaaggacgaaagacactgggtgaagctgtctaaccagtagaacatcatgctaagatgtttttaatattgaatataaattgtatataggtatatatgtttttttgtaaaataaaaaaataatcgtgtcgggccgggccagcactacgggctgaggctacagcccaagcacggcacgacgttcttggctcttgcaaacattagatcgtttctgagaccacattggcgcaatggactaaatggtgtttgaggttgccgaattggatggagtaacaatgatttgtcatactaacaacaaaatgaaatgttatttgttggttttaaacattagtaattgctacgaagtagcataatttatatggagtgcatccggtttttattgatgcctgactttagcaatcactccatattttgatctatcttttttataagtttgacttcatgggacttattttagaaacttgagctcacaaattttgtcttatttggtctctgtatgatggaattatgtcattttataatctttgttcattcagtcagtcgttgtgaactattttctaatcgctcacttcattggtcgtgttgtaccaagacatattgcatggagtaaacaataacatcagttagccaaatcaaaaaaatattatacagagagcggagacaatcattaaaaatcttgaattttttatggatagtttacgtgggtattattgtaagctgtcgcaacgcacgggcaaccgactagtcactccttatgtgcaagtacataatgtagaatacatggttcacaacatcagtaaatgcaactgaggtgagccaccaccaccactttaacacaaaatcttttgtcccaagcaagttgggcttaaaacaaacaatgaaggtcaccgctcaaagcccatcttcaggataacagaaatgcctttgaatactgcaacagcctaacattaaaaatcaccctactacccctacaatgaacttcctatatgagtgcacaccaaagaagatacaactagcatgtatacactttaggcaagaattgggtagaactcggaagcgtcaaaataacatatcgctattgctcattgctgaactgcagattgagcgataaaccttttgtttgagaaactacaataatagtatcataagaaacacaacttacctggctagtttcatcatgcacctgatactttggcaacgacaaccttctttcctcctacaaaagacagcaaaaaattgagattattaacatttcaatcat

SEQ ID NO: 22348 - DNA, 1664 bp, Zea Mays
gtcattcagcattatcctcacacccatttccgcaaatttttgcacctaaaaagtctactcggagaaatactacgtactcccacctcacctcccttcccttcccctctccgagtccgctctccgctccaatgccgttgcctctctcctccacctgcttcttctcataaacgcttccggcctcccggagtcccggacacaaaccctagcattcaaccacgccgagctcgccggaacaagcccaacccgagcccaatcccgctcgggccccagccgatccgacggctcctcaccagcacaatccggggtaccccgcggatgctagcctgatcgggtccccacggtcgatgggttcgcccgggtccgccaatggcagacgcggcgactatgtgaggatcccggaggaggcggaggtggcgtccaagggggagggagatgccgcggcggccgtcaaggcggccgcggcggcggagtgccctagggtgctgcggtgcagcgcgatccggtggtgggccaaggtcgccgtgctcgggatcgtccttgctggggccggagctgccgcggtcgtcttcctcggcccgctccttatcaagaaggtttagaatattaggtcagatcagacgcttatatgtataataagtcaatagcacgtgcaaggagcagctgtaagattgttgtacctattcttcactgggaatcaacaacgttcagcaggccatctattgctctaatatgtttcggcacaatcgcattattcccaagtgttttgttaccttcttcgcccttcatgtggcttgcggggatgacttttggatatctttatggttttttaataatcacagtgggtatgagcataggcatgtcattgccgtattttataggttctgcattccactgtaggatacatagatggctggagaagtggccaaagaaagcagcttttgtaaggcttgctggcgagggagattggcaccatcaatttaaggctgtagctttactcaggatttctccatttccatatatagtttttaactatgcttctgtggctacgaatgtcaaatattacccatatatcgctggttccatggctggaaccatacatgaaactttccttgcaatatacagtgggaaacttttacagagcttggctgtagcaactagccaagggtccttcttgtctgtggatcagatcatctacaatggaatcggatttatagttgcagcagcttctactgccacgatcactatttatgcaaagaaagcacttcaaaggctccaagcagaggaggagatattgtgagcgcatgaggtccaagcccaggatcaaaacccataacgctagtttcctttcaggtgtattatacatgaagggcttgtttggcagcaaggggggaggggaatctagcccctccaaccccctccatttcccttgctgccaaacatgcctgaacagttgctactaatctggtttcctgtgtcgactacctgactgccactaccatctgaggagagggaagggtgggtgctgaagcaattgtaaagaaaaacagacccagaaaaacttacgttttcggttcttgtttagttttctgtaaagagaactatcaacttcagtgtattgcattgcgcgatgtagattcccaagtctaaagttgtttcctcttgga

SEQ ID NO: 22349 - DNA, 1466 bp, Zea Mays
aaaaagtctactcggagaaatactacgtactcccacctcacctcccttcccttcccctctccgagtccgctctccgctccaatgccgttgcctctctcctccacctgcttcttctcataaacgcttccggcctcccggagtcccggacacaaaccctagcattcaaccacgccgagctcgccggaacaagcccaacccgagcccaatcccgctcgggccccagccgatccgacggctcctcaccagcacaatccggggtaccccgcggatgctagcctgatcgggtccccacggtcgatgggttcgcccgggtccgccaatggcagacgcggcgactatgtgaggatcccggaggaggcggaggtggcgtccaagggggagggagatgccgcggcggccgtcaaggcggccgcggcggcggagtgccctagggtgctgcggtgcagcgcgatccggtggtgggccaaggtcgccgtgctcgggatcgtccttgctggggccggagctgccgcggtcgtcttcctcggcccgctccttatcaagaagattgttgtacctattcttcactgggaatcaacaacgttcagcaggccatctattgctctaatatgtttcggcacaatcgcattattcccaagtgttttgttaccttcttcgcccttcatgtggcttgcggggatgacttttggatatctttatggttttttaataatcacagtgggtatgagcataggcatgtcattgccgtattttataggttctgcattccactgtaggatacatagatggctggagaagtggccaaagaaagcagcttttgtaaggcttgctggcgagggagattggcaccatcaatttaaggctgtagctttactcaggatttctccatttccatatatagtttttaactatgcttctgtggctacgaatgtcaaatattacccatatatcgctggttccatggctggaaccatacatgaaactttccttgcaatatacagtgggaaacttttacagagcttggctgtagcaactagccaagggtccttcttgtctgtggatcagatcatctacaatggaatcggatttatagttgcagcagcttctactgccacgatcactatttatgcaaagaaagcacttcaaaggctccaagcagaggaggagatattgtgagcgcatgaggtccaagcccaggatcaaaacccataacgctagtttcctttcaggtgtattatacatgcctgaacagttgctactaatctggtttcctgtgtcgactacctgactgccactaccatctgaggagagggaagggtgggtgctgaagcaattgtaaagaaaaacagacccagaaaaacttacgttttcggttcttgtttagttttctgtaaagagaactatcaacttcagtgtattgcattgcgcgatgtagattcccaagtctaaagttgtttcctcttgga

SEQ ID NO: 22350 - DNA, 1927 bp, Zea Mays
gtactcccacctcacctcccttcccttcccctctccgagtccgctctccgctccaatgccgttgcctctctcctccacctgcttcttctcataaacgcttccggcctcccggagtcccggacacaaaccctagcattcaaccacgccgagctcgccggaacaagcccaacccgagcccaatcccgctcgggccccagccgatccgacggctcctcaccagcacaatccggggtaccccgcggatgctagcctgatcgggtccccacggtcgatgggttcgcccgggtccgccaatggcagacgcggcgactatgtgaggatcccggaggaggcggaggtggcgtccaagggggagggagatgccgcggcggccgtcaaggcggccgcggcggcggagtgccctagggtgctgcggtgcagcgcgatccggtggtgggccaaggtcgccgtgctcgggatcgtccttgctggggccggagctgccgcggtcgtcttcctcggcccgctccttatcaagaagattgttgtacctattcttcactgggaatcaacaacgttcagcaggccatctattgctctaatatgtttcggcacaatcgcattattcccaagtgttttgttaccttcttcgcccttcatgtggcttgcggggatgacttttggatatctttatggttttttaataatcacagtgggtatgagcataggcatgtcattgccgtattttataggttctgcattccactgtaggatacatagatggctggagaagtggccaaagaaagcagcttttgtaaggcttgctggcgagggagattggcaccatcaatttaaggctgtagctttactcaggatttctccatttccatatatagtttttaactatgcttctgtggctacgaatgtcaaatattacccatatatcgctggttccatggctggaaccatacatgaaactttccttgcaatatacaggtttgtacttgcctcatgccttttattctttggatgtactttttttcctgctcacctgagcatgcctaatacacattgtggtgaatttttgttattaaatcgatatggaacactttggatgaaacctttggcgtgttatatcagatttactctttttgtgatagctggtcctggtttttgtagtcacctattcattaatgcagtttgatgggttgctgtccttataattataaagatggcttgtgatatatatttacgcatgaatacttgagtaatgacgtgcatcctatatgtgctatgttgatgtgagcagttgagcataaactcacaactcaaacatattgtctgagccgctgtaagattgtattcaccatcggtcatgagaaactaatgccaatttttgtaaacagtgggaaacttttacagagcttggctgtagcaactagccaagggtccttcttgtctgtggatcagatcatctacaatggaatcggatttatagttgcagcagcttctactgccacgatcactatttatgcaaagaaagcacttcaaaggctccaagcagaggaggagatattgtgagcgcatgaggtccaagcccaggatcaaaacccataacgctagtttcctttcaggtgtattatacatgaagggcttgtttggcagcaaggggggaggggaatctagcccctccaaccccctccatttcccttgctgccaaacatgcctgaacagttgctactaatctggtttcctgtgtcgactacctgactgccactaccatctgaggagagggaagggtgggtgctgaagcaattgtaaagaaaaacagacccagaaaaacttacgttttcggttcttgtttagttttctgtaaagagaactatcaacttcagtgtattgcattgcgcgatgtagattcccaagtctaaagttgtttcctcttgga

SEQ ID NO: 22351 - DNA, 520 bp, Zea Mays
caaatggcagcaaagagcaacagggaagaaggccagcactggattgcaaacaggctcggttcgctatgaaggatactggaaggcaaattgtttgctaggcaaaaaccttcctatagatctcccgggtcactcttaccatttccattgatccattgatcagcattaagcatgcactaataacggttcatcgttgcagaaaccgaggagtagatcaaatggctaaatggagaggcagaaaaacgcatattgaattttgatcatgtagatgaacccattagacagcctggtttttgcgtggaatacttctattcaatcgggactagcatctagatatgtaacagctggaccgttgtcgcctgtataacttccggaatctggatgctaggctggaccgttgtcgaattctcaccatggcgcaactaatgttcaggaccacttgatgattcttcgctttcattttcattccttctatttgtgttataaggcatgcaggagcacttcacattcattaaggcaggag

SEQ ID NO: 22352 - DNA, 3022 bp, Zea Mays
ctttgactcacaacagcaaagctgaataacagatcactcccgtctcccatccccttcctctcctagcaatcctctgccggagtccaagctccaatcagatccggacccacccctccccctccgaagaagccctaggcatgccccgcagccgatgaggtcgctccgccgggtcctcatcccgctcgtcctcctcgcaggactcgtcttccgcgtggacgacggcggcggcgcgttcctcccgcccccgccccccgcgctccccgctcccccgccccgcctcgcacttaacggagaagcggctccggaggatgatggggcggcggtttcccgctccacggagatcgtcgcggcggaggcgcgctccaccgagttcgtcgccccagcgaggcccaagaagcagagcttccgggagctccttgtccggccgcagcctgcgcgccacgagccggctagtttggttaccgacgaggcgaaagccgaatccagctctgtgcttcagttttgggataatggcacaattcagcttgtggacaaactgtcgcaatctcctctgtgggagatcaccacagggcctccactatcagaccagattaataccgctgagtctggtctgaattacctcatttatcctttcaatgagaacaagaacatgaatggtactgaactttgggaggtttataatgggaacaccgtgaggctcccatggaaattggaggaattcgttgccagaagcccatacattcgggattctgttgttactattggatcaaaagtttcaaccgtttttgttgttgattctgatagtggtgagattatttacaggcacagtattccagctgtgttaaatgaattggaaggaccagggattgaaggaacaccatccaagctaaatgcccgtactaattatgacagcgataatatcatggtgcttgtgagaaatgactattctcttagtgcatcagatcttggcaagcatttatttaactggacaagaacttctttctctgtgaaatacaaccaccctgacattccatgcatcagaagtgagggtttgccacttgctttacctgattcacgttcagctaatgtaattgtcttgaaagaaggtaccccttttatttccatccatggttctgatgccctggaaccagttcaaaccccaaggaagctaccaaacactgctgggaagtcagatatcgtattggatgattctcaaaatcaaacgtatgatggtgctcgatctcatgtcatctctgctgattctgaagctaccgaaacccccactaggaacacttatgcaatttgtgattcagcttattaagccattcacgcgcgacaagaaatcggtggacattagaggcaggtcagagggatctcctaaaagaagaaaaacacggaagaaggatggacttgtcaatagccctgagaccttgacagcatctgacaaggagtgcagtgaaactggtgggtcaactgaggcaccaatggaaaattctgcactaaaagatgcccttggtggtcgtcacattggtaaactatatgtctccaataaagaaattggtagagggagcaatggcacagttgtttttgaaggatcgtatgatggtcgtcaagttgctgttaaacgtctgctgcgttcccacaatgacatagctgaaaaggagactcagaatcttattatatctgatcatgatccaaatattgttagactatatggttgtgactatgacagcgattttgtttatatctcccttgagaggtgtcactgcagtttggctgatctaattcaaaaacactcatatctgtcttctggagagtctgtttctaacaatgaggccagtttcagcatcaagtcaaagatttcaaatgttaagggaatggatgtggaattgtggacacatgatgggcttccttcagcacaactcctgaagctgatgagagatgtggttgctggccttgtgcatctgcatgacttgggaattattcatcgtgatttgaagcctcaaaatgtcttaataagcgcaggaggacctattagagcaaagctttctgatatgggtatcagtaagcacctgcaagatgacatgacttctgttagccatcatggtacaggatttggaagctctggctggcgggcacctgaacagcttcgtcatggtcgtcaaactcgtgcaatggatctttttagtttgggctgccttattttctattgtatcactaaaggcaagcatccgtttggtgagtactatgaaagggatgtgaacattgcaaacaatcgctttgatctctttatggtggactacataccagaagcagtccatcttatatctcatttgttacaaccaaacccagaggcaagaccgacagcagtatatgtcatgcaccatccactcttttggagccctgaattgcgtctttcgtttctaagggataccagtgacagaattgagaaaaccagtgaaactgacctcataaacacactggaaagcataggatctttggcgtttggtggaaaatggggagagaaattggatgctgctttggttacagacatgggtcgttatagaaaatataactttgggtctattcgtgatcttctgaggtatatcagaaataaatcgggtcattacagagaactttcagatgatctcaagggcatacttgggtcactaccagaggggtttgatcgctattttgctagccgatttccaaagttgctaattgaggtgtacaaggtcttgtgggtgcactgcaaggacgaggaagctttcagtaaatatttcaaaggaagttagttatagctggagaggattgtcctttcctactgtacatactaaccctgatgtagaacaagtacatgtgtaccatatgactcgtattataggataaaaaagagctcaatctgtacattatgcaccggtatggtaggaccgtgtcatttgcacagcctaatgctctgatggcttggacattgtgcatcgtggaatcttcgtaatcgttgtgtgtttgatgaagtcttaac

SEQ ID NO: 22353 - DNA, 2894 bp, Zea Mays
ctttgactcacaacagcaaagctgaataacagatcactcccgtctcccatccccttcctctcctagcaatcctctgccggagtccaagctccaatcagatccggacccacccctccccctccgaagaagccctaggcatgccccgcagccgatgaggtcgctccgccgggtcctcatcccgctcgtcctcctcgcaggactcgtcttccgcgtggacgacggcggcggcgcgttcctcccgcccccgccccccgcgctccccgctcccccgccccgcctcgcacttaacggagaagcggctccggaggatgatggggcggcggtttcccgctccacggagatcgtcgcggcggaggcgcgctccaccgagttcgtcgccccagcgaggcccaagaagcagagcttccgggagctccttgtccggccgcagcctgcgcgccacgagccggctagtttggttaccgacgaggcgaaagccgaatccagaggctcccatggaaattggaggaattcgttgccagaagcccatacattcgggattctgttgttactattggatcaaaagtttcaaccgtttttgttgttgattctgatagtggtgagattatttacaggcacagtattccagctgtgttaaatgaattggaaggaccagggattgaaggaacaccatccaagctaaatgcccgtactaattatgacagcgataatatcatggtgcttgtgagaaatgactattctcttagtgcatcagatcttggcaagcatttatttaactggacaagaacttctttctctgtgaaatacaaccaccctgacattccatgcatcagaagtgagggtttgccacttgctttacctgattcacgttcagctaatgtaattgtcttgaaagaaggtaccccttttatttccatccatggttctgatgccctggaaccagttcaaaccccaaggaagctaccaaacactgctgggaagtcagatatcgtattggatgattctcaaaatcaaacgtatgatggtgctcgatctcatgtcatctctgctgattctgaagctaccgaaacccccactaggaacacttatgtatggttattttcttttttccccatatttttggtcattggttatctgttgagcttgacctctgcaagcaagtcttgcaggcaatttgtgattcagcttattaagccattcacgcgcgacaagaaatcggtggacattagaggcaggtcagagggatctcctaaaagaagaaaaacacggaagaaggatggacttgtcaatagccctgagaccttgacagcatctgacaaggagtgcagtgaaactggtgggtcaactgaggcaccaatggaaaattctgcactaaaagatgcccttggtggtcgtcacattggtaaactatatgtctccaataaagaaattggtagagggagcaatggcacagttgtttttgaaggatcgtatgatggtcgtcaagttgctgttaaacgtctgctgcgttcccacaatgacatagctgaaaaggagactcagaatcttattatatctgatcatgatccaaatattgttagactatatggttgtgactatgacagcgattttgtttatatctcccttgagaggtgtcactgcagtttggctgatctaattcaaaaacactcatatctgtcttctggagagtctgtttctaacaatgaggccagtttcagcatcaagtcaaagatttcaaatgttaagggaatggatgtggaattgtggacacatgatgggcttccttcagcacaactcctgaagctgatgagagatgtggttgctggccttgtgcatctgcatgacttgggaattattcatcgtgatttgaagcctcaaaatgtcttaataagcgcaggaggacctattagagcaaagctttctgatatgggtatcagtaagcacctgcaagatgacatgacttctgttagccatcatggtacaggatttggaagctctggctggcgggcacctgaacagcttcgtcatggtcgtcaaactcgtgcaatggatctttttagtttgggctgccttattttctattgtatcactaaaggcaagcatccgtttggtgagtactatgaaagggatgtgaacattgcaaacaatcgctttgatctctttatggtggactacataccagaagcagtccatcttatatctcatttgttacaaccaaacccagaggcaagaccgacagcagtatatgtcatgcaccatccactcttttggagccctgaattgcgtctttcgtttctaagggataccagtgacagaattgagaaaaccagtgaaactgacctcataaacacactggaaagcataggatctttggcgtttggtggaaaatggggagagaaattggatgctgctttggttacagacatgggtcgttatagaaaatataactttgggtctattcgtgatcttctgaggtatatcagaaataaatcgggtcattacagagaactttcagatgatctcaagggcatacttgggtcactaccagaggggtttgatcgctattttgctagccgatttccaaagttgctaattgaggtgtacaaggtcttgtgggtgcactgcaaggacgaggaagctttcagtaaatatttcaaaggaagttagttatagctggagaggattgtcctttcctactgtacatactaaccctgatgtagaacaagtacatgtgtaccatatgactcgtattataggataaaaaagagctcaatctgtacattatgcaccggtatggtaggaccgtgtcatttgcacagcctaatgctctgatggcttggacattgtgcatcgtggaatcttcgtaatcgttgtgtgtttgatgaagtcttaac

SEQ ID NO: 22354 - DNA, 3212 bp, Zea Mays
caacagcaaagctgaataacagatcactcccgtctcccatccccttcctctcctagcaatcctctgccggagtccaagctccaatcagatccggacccacccctccccctccgaagaagccctaggcatgccccgcagccgatgaggtcgctccgccgggtcctcatcccgctcgtcctcctcgcaggactcgtcttccgcgtggacgacggcggcggcgcgttcctcccgcccccgccccccgcgctccccgctcccccgccccgcctcgcacttaacggagaagcggctccggaggatgatggggcggcggtttcccgctccacggagatcgtcgcggcggaggcgcgctccaccgagttcgtcgccccagcgaggcccaagaagcagagcttccgggagctccttgtccggccgcagcctgcgcgccacgagccggctagtttggttaccgacgaggcgaaagccgaatccaggggctttcttggtcttatctccataataaaagcattttgggccatattcttgttttgtgttgatctggagcacggaaggaggagcctttgctgattaggtttcttataatgtggccactgctctgtgcttcagttttgggataatggcacaattcagcttgtggacaaactgtcgcaatctcctctgtgggagatcaccacagggcctccactatcagaccagattaataccgctgagtctggtctgaattacctcatttatcctttcaatgagaacaagaacatgaatggtactgaactttgggaggtttataatgggaacaccgtgaggctcccatggaaattggaggaattcgttgccagaagcccatacattcgggattctgttgttactattggatcaaaagtttcaaccgtttttgttgttgattctgatagtggtgagattatttacaggcacagtattccagctgtgttaaatgaattggaaggaccagggattgaaggaacaccatccaagctaaatgcccgtactaattatgacagcgataatatcatggtgcttgtgagaaatgactattctcttagtgcatcagatcttggcaagcatttatttaactggacaagaacttctttctctgtgaaatacaaccaccctgacattccatgcatcagaagtgagggtttgccacttgctttacctgattcacgttcagctaatgtaattgtcttgaaagaaggtaccccttttatttccatccatggttctgatgccctggaaccagttcaaaccccaaggaagctaccaaacactgctgggaagtcagatatcgtattggatgattctcaaaatcaaacgtatgatggtgctcgatctcatgtcatctctgctgattctgaagctaccgaaacccccactaggaacacttatgtatggttattttcttttttccccatatttttggtcattggttatctgttgagcttgacctctgcaagcaagtcttgcaggcaatttgtgattcagcttattaagccattcacgcgcgacaagaaatcggtggacattagaggcaggtcagagggatctcctaaaagaagaaaaacacggaagaaggatggacttgtcaatagccctgagaccttgacagcatctgacaaggagtgcagtgaaactggtgggtcaactgaggcaccaatggaaaattctgcactaaaagatgcccttggtggtcgtcacattggtaaactatatgtctccaataaagaaattggtagagggagcaatggcacagttgtttttgaaggatcgtatgatggtcgtcaagttgctgttaaacgtctgctgcgttcccacaatgacatagctgaaaaggagactcagaatcttattatatctgatcatgatccaaatattgttagactatatggttgtgactatgacagcgattttgtttatatctcccttgagaggtgtcactgcagtttggctgatctaattcaaaaacactcatatctgtcttctggagagtctgtttctaacaatgaggccagtttcagcatcaagtcaaagatttcaaatgttaagggaatggatgtggaattgtggacacatgatgggcttccttcagcacaactcctgaagctgatgagagatgtggttgctggccttgtgcatctgcatgacttgggaattattcatcgtgatttgaagcctcaaaatgtcttaataagcgcaggaggacctattagagcaaagctttctgatatgggtatcagtaagcacctgcaagatgacatgacttctgttagccatcatggtacaggatttggaagctctggctggcgggcacctgaacagcttcgtcatggtcgtcaaactcgtgcaatggatctttttagtttgggctgccttattttctattgtatcactaaaggcaagcatccgtttggtgagtactatgaaagggatgtgaacattgcaaacaatcgctttgatctctttatggtggactacataccagaagcagtccatcttatatctcatttgttacaaccaaacccagaggcaagaccgacagcagtatatgtcatgcaccatccactcttttggagccctgaattgcgtctttcgtttctaagggataccagtgacagaattgagaaaaccagtgaaactgacctcataaacacactggaaagcataggatctttggcgtttggtggaaaatggggagagaaattggatgctgctttggttacagacatgggtcgttatagaaaatataactttgggtctattcgtgatcttctgaggtatatcagaaataaatcgggtcattacagagaactttcagatgatctcaagggcatacttgggtcactaccagaggggtttgatcgctattttgctagccgatttccaaagttgctaattgaggtgtacaaggtcttgtgggtgcactgcaaggacgaggaagctttcagtaaatatttcaaaggaagttagttatagctggagaggattgtcctttcctactgtacatactaaccctgatgtagaacaagtacatgtgtaccatatgactcgtattataggataaaaaagagctcaatctgtacattatgcaccggtatggtaggaccgtgtcatttgcacagcctaatgctctgatggcttggacattgtgcatcgtggaatcttcgtaatcgttgtgtgtttgatgaagtcttaac

SEQ ID NO: 22355 - DNA, 3082 bp, Zea Mays
agcaaagctgaataacagatcactcccgtctcccatccccttcctctcctagcaatcctctgccggagtccaagctccaatcagatccggacccacccctccccctccgaagaagccctaggcatgccccgcagccgatgaggtcgctccgccgggtcctcatcccgctcgtcctcctcgcaggactcgtcttccgcgtggacgacggcggcggcgcgttcctcccgcccccgccccccgcgctccccgctcccccgccccgcctcgcacttaacggagaagcggctccggaggatgatggggcggcggtttcccgctccacggagatcgtcgcggcggaggcgcgctccaccgagttcgtcgccccagcgaggcccaagaagcagagcttccgggagctccttgtccggccgcagcctgcgcgccacgagccggctagtttggttaccgacgaggcgaaagccgaatccagctctgtgcttcagttttgggataatggcacaattcagcttgtggacaaactgtcgcaatctcctctgtgggagatcaccacagggcctccactatcagaccagattaataccgctgagtctggtctgaattacctcatttatcctttcaatgagaacaagaacatgaatggtactgaactttgggaggtttataatgggaacaccgtgaggctcccatggaaattggaggaattcgttgccagaagcccatacattcgggattctgttgttactattggatcaaaagtttcaaccgtttttgttgttgattctgatagtggtgagattatttacaggcacagtattccagctgtgttaaatgaattggaaggaccagggattgaaggaacaccatccaagctaaatgcccgtactaattatgacagcgataatatcatggtgcttgtgagaaatgactattctcttagtgcatcagatcttggcaagcatttatttaactggacaagaacttctttctctgtgaaatacaaccaccctgacattccatgcatcagaagtgagggtttgccacttgctttacctgattcacgttcagctaatgtaattgtcttgaaagaaggtaccccttttatttccatccatggttctgatgccctggaaccagttcaaaccccaaggaagctaccaaacactgctgggaagtcagatatcgtattggatgattctcaaaatcaaacgtatgatggtgctcgatctcatgtcatctctgctgattctgaagctaccgaaacccccactaggaacacttatgtatggttattttcttttttccccatatttttggtcattggttatctgttgagcttgacctctgcaagcaagtcttgcaggcaatttgtgattcagcttattaagccattcacgcgcgacaagaaatcggtggacattagaggcaggtcagagggatctcctaaaagaagaaaaacacggaagaaggatggacttgtcaatagccctgagaccttgacagcatctgacaaggagtgcagtgaaactggtgggtcaactgaggcaccaatggaaaattctgcactaaaagatgcccttggtggtcgtcacattggtaaactatatgtctccaataaagaaattggtagagggagcaatggcacagttgtttttgaaggatcgtatgatggtcgtcaagttgctgttaaacgtctgctgcgttcccacaatgacatagctgaaaaggagactcagaatcttattatatctgatcatgatccaaatattgttagactatatggttgtgactatgacagcgattttgtttatatctcccttgagaggtgtcactgcagtttggctgatctaattcaaaaacactcatatctgtcttctggagagtctgtttctaacaatgaggccagtttcagcatcaagtcaaagatttcaaatgttaagggaatggatgtggaattgtggacacatgatgggcttccttcagcacaactcctgaagctgatgagagatgtggttgctggccttgtgcatctgcatgacttgggaattattcatcgtgatttgaagcctcaaaatgtcttaataagcgcaggaggacctattagagcaaagctttctgatatgggtatcagtaagcacctgcaagatgacatgacttctgttagccatcatggatttggaagctctggctggcgggcacctgaacagcttcgtcatggtcgtcaaactcgtgcaatggatctttttagtttgggctgccttattttctattgtatcactaaaggcaagcatccgtttggtgagtactatgaaagggatgtgaacattgcaaacaatcgctttgatctctttatggtggactacataccagaagcagtccatcttatatctcatttgttacaaccaaacccagaggcaagaccgacagcagtatatgtcatgcaccatccactcttttggagccctgaattgcgtctttcgtttctaagggataccagtgacagaattgagaaaaccagtgaaactgacctcataaacacactggaaagcataggatctttggcgtttggtggaaaatggggagagaaattggatgctgctttggttacagacatgggtcgttatagaaaatataactttgggtctattcgtgatcttctgaggtatatcagaaataaatcgggtcattacagagaactttcagatgatctcaagggcatacttgggtcactaccagaggggtttgatcgctattttgctagccgatttccaaagttgctaattgaggtgtacaaggtcttgtgggtgcactgcaaggacgaggaagctttcagtaaatatttcaaaggaagttagttatagctggagaggattgtcctttcctactgtacatactaaccctgatgtagaacaagtacatgtgtaccatatgactcgtattataggataaaaaagagctcaatctgtacattatgcaccggtatggtaggaccgtgtcatttgcacagcctaatgctctgatggcttggacattgtgcatcgtggaatcttcgtaatcgttgtgtgtttgatgaagtcttaac

SEQ ID NO: 22356 - DNA, 3606 bp, Zea Mays
caacagtatacagagcgcagggcgaaccacgtgacagaggaagtcgtgcagacggcgaggcagcccaacggttgttcggccggccatttcgcaatctctcctcgccgctcatccctgagcgcacgcaaaagaaagggacgtgagtagctgcaatggcgagccatcagcgcggaggaggtcgggttggcggcggcggctggggtcaggcgaaccccaacgttattcagggccaggcggggcggggctacggcggcggtcgaggtggtcagtactacggcgacgacagccgcggtcgaggtggtcagtactacggcgacgacagcggcggacgtggcggcggcaggggcggtggtcgtggcttcgacggccgcgacggcggcggataccaggaaggtcgtggcgggggccgcggcggcggcggataccaggaagggcgtggcgggggccgcggcggcggcagataccaggaaggacgtggtggtggccggggtggcggcggctactactatgaaggacgtggcggggaccgtggtggcggcggctactatggaggacatggtgggggctaccaggaaggccgtggcgggggccgaggtggtcgcggctaccagggacagggaggcagcgactacggccgcgagcgcgggcatggcggcctacaaaccccacgtcctgctctgcgccaagccggtccgcccctcgcggaccgctacgcggccgacgcagccgcgttgagggacaagttcaagacgatggacattcaccgcgacgagcccatgtttccagcgcgcccgggcttcggcgccgtggggacgccgtgcgtcgtcaaggccaaccacttctttgtcggcctcgtcgaaaagggcctgcaccactacgacgtggccatctcaccagagacgacgctaaggggcatatacaggcaagtcatgtcgaagctggtttccgagaaccggcagaccgagcttggcggccgcctgcctgcatacgacgggcagaagtcactgttcaccgccggagagctgcccttcaagaccaaggaattcgttgtcaccttgtctggcaggatggaaaggaggtacaaggtggtgatcaagcatgccacggcggtcagcctcgaccagctgttgatgctcatggcagggtacccaacggacatcccggcgcaggcgctgcaggtgcttgacattgtgctgcgtgacattgtgctcaacgaacgcaacaccatggagtacgttgcagttggccggtccttcttctcaccactcatagactcaatgggacccaagaaccttggcttgggtgtggagggatggaagggtttctatcagaccatcaggccgacacaaaaaggcttatctgtgatcatagacatttcttcatcagctttcattcgacccctgccactgattgactttgttatggagattctgaacaaagataacaggacctttagaagtattacttccatggatcttgtcaagctcaagaaagccctcaagggtatgaggattgaagtcacacaccgaggagacatacgccggaagtaccgaattgccagcttgacaaacagtcctccatcttcacagttctttgaatcatctgctggagttcagaagtccgtagcagattacttcagagaggcataccatctggaaatgcactatgattttctcccatgcctccaagttggcagtgatcagaggccgaattacctccctatggaggtttgcaagatagtagctggacagcaataccggaagaagttggaaggccaacaggtctctaaactaatggactccacctgccagcgcccatctctccgcgaggacaacatttgtcagattgttgagcaaaatgactacaataaaactgagcgtgcaagtgaatttggcatggaggttgattatcgtcctacttcagtgcaggctagagttctgccagctcccactctgaagtaccgtggcactggatctgacagtttgtgttgtccaaaggatggtcagtggaacatgataaaaaagcaagtagtagatggtgcaagggtgggcaactgggcctgcgttaacttttgtcaagagttgcgtgcagatggtgttggtaaattttgctctgatctggtcaagtggtctcgcactactggagtggacatggataacttgagacttccaatatataccgctcgtcctgaacaagctgaaactgatcttcgtaggctctatcaggatgctcggaacaagctaagagggcaaaagtttgatcttttgcttgctatactgccagagaaaaatggcagcttatatggtaatttcaaaaggatctgcgagacagagattggtatcatgtcgcagtgttgtttggataaaaatgttagaagtgcaggccctgcatattttgctaatgttgctattaagatcaatgccaagtttggaggaagaaacttagaatttgctaatcccaaagaaagcttaccgggtgttacaattgaaccaacaattatatttggtgctgatgtcactcaccctgccgctctagatgataccgccccttccattgcttctgttgttgcctcccaagactggcccaaggtggctaactataatgggattgtccgtgcacaaggtcatcgtaaagagctcatcaatggcctggaagacattgtcaaggaactcctacttgcattcgaggagaggtctaagcggagacccaagcagctgatcttctacagggatggcgtaagtgagggccaattcaaacaagtgctggaacaagaaatccctgagatagagaaggcatggaaagctctttacaatgagaagccaaagatcaccttcctagtggtgcagaagaggcaccacacaaggctcttcccaaacaacccaaatgatcgccaatgggcggacaagagtggaaatattctacctggcactgttgttgacaaggatatctgccacccaacagaatttgatttcttcctgtgcagccatgctgggatcaagggaactagccgtcctgcgcattaccatgtcctgagagacgacaacaacttcactgcagacgcgctgcagtctctcacatataacctatgcttcttgtattcaagctgcactcgctctgtgtcaatcgctcccccagcatactacgcccacaagttagcgttccgcgcccgcttctacgtcaaccaagactctgatgcggcgacaagtgtcggctcttatggttcatcagctccctctgctgctgctgctgctgctggtccgaagccgcttccggagatcaagggtgaactgagaaggctcatgttctactgctagtccttgaccacgggaaaccctttcctgaacaaggctttgctcttctgaagactgaacaaggctgctgcattatttattatgaacaagcctgaacaaggctgcattatactagcttaacgtttgtagtttgcattttatttcatataaacgatccaagtctttgccgaacttgattattatattcagttattcagcattcacgggacgctagagggaaaaatcgaaattttgaaacgctttggtgaaccattttatattcagttaagcattccaattaaggcattgttcggtt

SEQ ID NO: 22357 - DNA, 4114 bp, Zea Mays
gacgtttgtttgtctcttttaggatcctttggggttttctcttctttcgaacgcgttgagttcttctctgtgcgacgcggtctgggtttgggatctagtgcggtgacttctcgtcttccttgtctggcgacgattagaaaaggactcgccctcgccatcgccatcgccatcgcccggttgttgcttggctctttctctttgtctcgcacggtcatttcttcttgacacacttcggtttcttttttttttcttttgcttcctagtttggacacaaggtttatttgaaaaagcgggattgttgatccctacctatgtgttccatttcatatgtatatattttctaatatttttgtaaaacgactgttgtgcgaaaagattggggttttgtggcctaccacatagtcgtgggcctcgtggggttttagatgacgaactccgcgttggttttctgagtcgtggggttttcgatgacgaatggtgttctatataaataaagtttaatcatttatggaatttatcatgcgagctagccttcctcttccgcgtttcttcttggagatattaacgtcaaatggtgcaatgcgattttttcccccattgccatttgccccgcctacgccttccatctttatttccatctcccggacgtgagtagctgcaatggcgagccatcagcgcggaggaggtcgggttggcggcggcggctggggtcaggcgaaccccaacgttattcagggccaggcggggcggggctacggcggcggtcgaggtggtcagtactacggcgacgacagccgcggtcgaggtggtcagtactacggcgacgacagcggcggacgtggcggcggcaggggcggtggtcgtggcttcgacggccgcgacggcggcggataccaggaaggtcgtggcgggggccgcggcggcggcggataccaggaagggcgtggcgggggccgcggcggcggcagataccaggaaggacgtggtggtggccggggtggcggcggctactactatgaaggacgtggcggggaccgtggtggcggcggctactatggaggacatggtgggggctaccaggaaggccgtggcgggggccgaggtggtcgcggctaccagggacagggaggcagcgactacggccgcgagcgcgggcatggcggcctacaaaccccacgtcctgctctgcgccaagccggtccgcccctcgcggaccgctacgcggccgacgcagccgcgttgagggacaagttcaagacgatggacattcaccgcgacgagcccatgtttccagcgcgcccgggcttcggcgccgtggggacgccgtgcgtcgtcaaggccaaccacttctttgtcggcctcgtcgaaaagggcctgcaccactacgacgtggccatctcaccagagacgacgctaaggggcatatacaggcaagtcatgtcgaagctggtttccgagaaccggcagaccgagcttggcggccgcctgcctgcatacgacgggcagaagtcactgttcaccgccggagagctgcccttcaagaccaaggaattcgttgtcaccttgtctggcaggatggaaaggaggtacaaggtggtgatcaagcatgccacggcggtcagcctcgaccagctgttgatgctcatggcagggtacccaacggacatcccggcgcaggcgctgcaggtgcttgacattgtgctgcgtgacattgtgctcaacgaacgcaacaccatggagtacgttgcagttggccggtccttcttctcaccactcatagactcaatgggacccaagaaccttggcttgggtgtggagggatggaagggtttctatcagaccatcaggccgacacaaaaaggcttatctgtgatcatagacatttcttcatcagctttcattcgacccctgccactgattgactttgttatggagattctgaacaaagataacaggacctttagaagtattacttccatggatcttgtcaagctcaagaaagccctcaagggtatgaggattgaagtcacacaccgaggagacatacgccggaagtaccgaattgccagcttgacaaacagtcctccatcttcacagttctttgaatcatctgctggagttcagaagtccgtagcagattacttcagagaggcataccatctggaaatgcactatgattttctcccatgcctccaagttggcagtgatcagaggccgaattacctccctatggaggtttgcaagatagtagctggacagcaataccggaagaagttggaaggccaacaggtctctaaactaatggactccacctgccagcgcccatctctccgcgaggacaacatttgtcagattgttgagcaaaatgactacaataaaactgagcgtgcaagtgaatttggcatggaggttgattatcgtcctacttcagtgcaggctagagttctgccagctcccactctgaagtaccgtggcactggatctgacagtttgtgttgtccaaaggatggtcagtggaacatgataaaaaagcaagtagtagatggtgcaagggtgggcaactgggcctgcgttaacttttgtcaagagttgcgtgcagatggtgttggtaaattttgctctgatctggtcaagtggtctcgcactactggagtggacatggataacttgagacttccaatatataccgctcgtcctgaacaagctgaaactgatcttcgtaggctctatcaggatgctcggaacaagctaagagggcaaaagtttgatcttttgcttgctatactgccagagaaaaatggcagcttatatggtaatttcaaaaggatctgcgagacagagattggtatcatgtcgcagtgttgtttggataaaaatgttagaagtgcaggccctgcatattttgctaatgttgctattaagatcaatgccaagtttggaggaagaaacttagaatttgctaatcccaaagaaagcttaccgggtgttacaattgaaccaacaattatatttggtgctgatgtcactcaccctgccgctctagatgataccgccccttccattgcttctgttgttgcctcccaagactggcccaaggtggctaactataatgggattgtccgtgcacaaggtcatcgtaaagagctcatcaatggcctggaagacattgtcaaggaactcctacttgcattcgaggagaggtctaagcggagacccaagcagctgatcttctacagggatggcgtaagtgagggccaattcaaacaagtgctggaacaagaaatccctgagatagagaaggcatggaaagctctttacaatgagaagccaaagatcaccttcctagtggtgcagaagaggcaccacacaaggctcttcccaaacaacccaaatgatcgccaatgggcggacaagagtggaaatattctacctggcactgttgttgacaaggatatctgccacccaacagaatttgatttcttcctgtgcagccatgctgggatcaagggaactagccgtcctgcgcattaccatgtcctgagagacgacaacaacttcactgcagacgcgctgcagtctctcacatataacctatgcttcttgtattcaagctgcactcgctctgtgtcaatcgctcccccagcatactacgcccacaagttagcgttccgcgcccgcttctacgtcaaccaagactctgatgcggcgacaagtgtcggctcttatggttcatcagctccctctgctgctgctgctgctgctggtccgaagccgcttccggagatcaagggtgaactgagaaggctcatgttctactgctagtccttgaccacgggaaaccctttcctgaacaaggctttgctcttctgaagactgaacaaggctgctgcattatttattatgaacaagcctgaacaaggctgcattatactagcttaacgtttgtagtttgcattttatttcatataaacgatccaagtctttgccgaacttgattattatattcagttattcagcattcacgggacgctagagggaaaaatcgaaattttgaaacgctttggtgaaccattttatattcagttaagcattccaattaaggcattgttcggtt

SEQ ID NO: 22358 - DNA, 1927 bp, Zea Mays
cacaaagccaaattccccagctctcattcctcactccgatccgatcctcgcagatcagtagatcactacaccgcgcggcgtagcaagctaagagcgagaggattcttggagctcagctctcatcaccagcagctataggtacgtgcacgcagtgcatggcgcaggagggctccgaggcctccgtcgccagctccccgccgccgccggcctcctcgtcctcctcctcgtggtggcgcgacatgcacccggcggcggctgcctacggcggcgcgtggccgccgcccccgcccaccgcggcgaggtggcccccgatggcggcctcgtcgtcgcgccaccagcagcagcagcagcaacacggcggcggccgcacgacgtcctccggcggcggcgccgacgacgacctctcggcctccaacgccaccatgacgtcgtcgtccttcaccaacacctccgccaccaaccgatccggcctcagcatggacgacgactccggcggtggcggacctgctgaggcggccgccgccgccgccgcagagagccaccacctctggaaccaagtcctcatcatgggcggcggcggcggcgaggttgggaggagcatgcacgacgcccacgacgacagcgagaacttcctcgagctgctcaactcgaggacgctcgtgccggagctcttcgccgaccctccggcctgcgactacctcaagaagatggagtacggcagcagccacggcggcggcgggtggccggaccaccaccagttcacgacagcagccgcgctggagaagcacctgagctccggctacggcggcggcgcgctcgcgcaccagcaccagcacgcggcggccggaggcgcgccggagcggctcacggcgaacctgtccgacctcgtgagcaactggtccatcgcgccgccgaacccgtgcctcggcgacgcgcaccaccaccaccgcaccggcgtcgtcgccgcggcatgcgataacgacaacgccaaggccggcatgttcctgggctccggcggcggcgtctgcaatcacgagataggcggacacggcgcgatgctggagggagcggcgacgggcggcggcggcggcggcggccaggagtttctccggcccgccgcaggcgcagggtacagctccatgctcgggctcagcaggaacaacaggacgatgtatatggaggcgccgtggggaagcaatgccgccggcgcgacgaggagcctgtcggacctgatatctttcggcggagctccgctgggaaaagcagaggaaccggcgccgcccacgtcaacgaaggcgctggcggagtacaagaagcaagggcacgacatcccttcgccggcgaagacgagtagcggaggtggaagcaaggggagctcggaggggaagaagaagagatcagagcagcaagggtcgtcggaagggaacaccaagaagtccaagagtgaggtctcctcgcccacgtcgtctctcaaggtgcctaaagtgaagttaggagacaagatcactgcactgcaacagatcgtttcaccatttggaaagaccgatacggcatcagttctgtatgaggcgataaattacatcaagtggttgcacgaacaagttcagttgctgagtgatccatacatgaagactagtagcaaggactacaactacaacgcatggggaaggttagaagataaggagggcgccgagatggtggacctgcgaagtagaggcctgtgcttggtgcccgtctcatgcacgcctcaggcgtacagggacagcaacgacggcccagactactggacgcccccatataggagctgcttgtaccgatgatgaactgattcaattcctgctgccgtgcatgcgtacgtgtaatacgtagctgtttattccatccattggttatataccttactcagtggtaataaatttgtggtgaa

SEQ ID NO: 22359 - DNA, 546 bp, Zea Mays
ctgggccgttgttcatttgagatgcaccaatttcttcatgagatcccgccatcaggagcaatgaaacttacaggatcaatcacgtctccactcgtcatagcagtattgaatatgggatctaaatagaaaattattttattgttgttgtatcatgtgcgcctgccgccgctagtgaataaaaatttattgttgtgattggagaaattgtggcgggaatgacatcttgacatgttgtttggtgctaacttgccgccagatttgtttttggaaaaaaaagtgtcgtggccagaatggctggtgaacgtgtgtggagagagaaaggagggatgatccagtatctagcaccacgggtggagaagtgggcatggtatgtatagagagttaagtgggtcgtgctaaataggccggcgcagtcacaattcatatattgtcagtgctgatataatatggatctagtatcgtacttggtcctccattcaatacgatgagctggcacgattaagtggtcggcataattaggcatggcttaaaccactggtagtctgt

SEQ ID NO: 22360 - DNA, 1018 bp, Zea Mays
atacgttccagtaccccgcgctagacgctactgccacaataccgcttgattgtagggcacaactgtcagctacaggtggccgtgtggcacggccgggatccagctcgtcgtctcaccctcttctcctcttccaccgacggcgaccgcccccaattttctcctacccctccgccttcactgaggtccccgagatccgagtttccttgccctggtaaaccataatatcatcacgcctcgtgcccaaatcggacgcacgcactcccggtcgaattccctcgagcggagcagatttggatccggctcggccagatggatcccgaggacaccaccccaccggcgccgagccaaggtgatgcggagacaactccgccgccggtgttggaagtggcggcgggggaggacagcctagctagcgggggcgaggcggccgagcgggcccacgaggaggaggagctcgcgcgggaggtcatggagctcggcctccagaacgagtaccttaggtcccagattgctggcgtccgcccggcgggtgacgcggacgaggtccccgggcttgtgaggggctggaaggagcaggtggagaggatgagcagggaggtgcaggaacagcggctgacgcgggaggccacggagaaggccctggagcacgtcaacgtggcctatgctgaggctgacggcaaggtgcaggagcttacggccaagctggcacaagttccatgcatgtagctgaacaaaaaatggaaaaggaactaaaagaacgcgatgacaaatatcttgagctggaaaccaagcttcagaggcttctcaagcgtgcaaaacaacgtatacaagatatacaaaaggaaaaagttgatctggaagctcggtttaatgaagttaatcagaaggctgagcaggctgcttctctgcaattagcagcacagcaggaactggaacgtgctcgtcagcaggctagtgagggcttaagatcaatggatgctgaaagacagcagttgcggacagtgaacagcaagtgagt

SEQ ID NO: 22361 - DNA, 953 bp, Zea Mays
cttgattgtagggcacaactgtcagctacaggtggccgtgtggcacggccgggatccagctcgtcgtctcaccctcttctcctcttccaccgacggcgaccgcccccaattttctcctacccctccgccttcactgaggtccccgagatccgagtttccttgccctggtaaaccataatatcatcacgcctcgtgcccaaatcggacgcacgcactcccggtcgaattccctcgagcggagcagatttggatccggctcggccagatggatcccgaggacaccaccccaccggcgccgagccaaggtgatgcggagacaactccgccgccggtgttggaagtggcggcgggggaggacagcctagctagcgggggcgaggcggccgagcgggcccacgaggaggaggagctcgcgcgggaggtcatggagctcggcctccagaacgagtaccttaggtcccagattgctggcgtccgcccggcgggtgacgcggacgaggtccccgggcttgtgaggggctggaaggagcaggtggagaggatgagcagggaggtgcaggaacagcggctgacgcgggaggccacggagaaggccctggagcacgtcaacgtggcctatgctgaggctgacggcaaggtgcaggagcttacggccaagctggcacaagctgaacaaaaaatggaaaaggaactaaaagaacgcgatgacaaatatcttgagctggaaaccaagcttcagaggcttctcaagcgtgcaaaacaacgtatacaagatatacaaaagttgatctggaagctcggtttaatgaagttaatcagaaggctgagcaggctgcttctctgcaattagcagcacagcaggaactggaacgtgctcgtcagcaggctagtgagggcttaagatcaatggatgctgaaagacagcagttgcggacagtgaacagcaagtgagt

SEQ ID NO: 22362 - DNA, 315 bp, Zea Mays
aggggacactatagtacgatgaaataatagatggcttctccttaacagcagtgaaacttcattaacatttggagttagaggagacagtagagtacataatagatggcttcacttcattgacatttggagttagagaactcacttattagtcgactggaaagtgaattttctgcatacaaggtccgggcacatgcacttctgcaaaaaaaggatgctgagcttaccgcagctaaaagttcagatttcattaaagaacatgaagaggccataaggctgaaaaggaggtggcagctgctttagcagaaagagataaag

SEQ ID NO: 22363 - DNA, 241 bp, Zea Mays
cagattagtcgactggaaagtgaattttctgcatacaaggtccgggcacatgcacttctgcaaaaaaaggatgctgagcttaccgcagctaaaagttcagatttcattaaagaacatgaagaggccataagggaagctgaaaaggaggtggcagctgctttagcagaaagagataaagcaatagatgatctccaaaaggcagaatccagacatggtgatgagattgaggcaagagatatca

SEQ ID NO: 22364 - DNA, 900 bp, Zea Mays
atcatattaagttgcatgcaccaaccagtcgaacccaaaagattaagctgataggagaaggtggacaattcacttatattatattccaacatgttgatgtccagatgtggtcaaagcagcctgtttggatgttgtagtttagaaaaatgtggtatcaagaaactagagttttaggatcagcgagatagtatcatatggtacaaaaagaggtctggaatgcattttctagaatctggacaacaaagcaccaccttttaggcaatactctgggtttaaaactaagagatctgttaaggagcatcttctagttttcaatcccccctctgatactttgtatcctacacaatttaaaataagacctattattttgagactatgttgatgatattattgcattgatgtcacaggttagcaacaatgatcatcaaagtcaaggacctgttaaggatacaatgagtgttgaattggctgagcaacaaattttgcttctcgcaaggcaacaagcacaacgagaagaggaattggctcagtcacagaggcatatcttagcacttcaacaagaaattgaagagctcgagcgtgaaaatcgtctccatgatcaacaggaagcaatgttgaaaaccgagcttcgcaatatggagagatcacaaaagcgagaaggaatagatatgacatatctcaaaaatgtgattctaaaacttcttgaaacaggggaagtgggagcgttgttgcctgtggttgggacgttactacagtttagtcctgacgagtttgtgaaaggaaaatcttgttatggcaaagcggcaagctacgactacgactactgtgcccatgatgttggaaaatcagaaaatgcacaccaataaaaaaaattcatcattttgaatgtgagttttgaca

SEQ ID NO: 22365 - DNA, 1139 bp, Zea Mays
atcatattaagttgcatgcaccaaccagtcgaacccaaaagattaagctgataggagaaggtggacaattcacttatattatattccaacatgttgatgtccagatgtggtcaaagcagcctgtttggatgttgtagtttagaaaaatgtggtatcaagaaactagagttttaggatcagcgagatagtatcatatggtacaaaaagaggtctggaatgcattttctagaatctggacaacaaagcaccaccttttaggcaatactctgggtttaaaactaagagatctgttaaggagcatcttctagttttcaatcccccctctgatactttgtatcctacacaatttaaaataagacctattattttgagactatgttgatgatattattgcattgatgtcacaggttagcaacaatgatcatcaaagtcaaggacctgttaaggatacaatgagtgttgaattggctgagcaacaaattttgcttctcgcaaggcaacaagcacaacgagaagaggaattggctcagtcacagaggcatatcttagcacttcaacaagaaattgaagagctcgagcgtgaaaatcgtctccatgatcaacaggaagcaatgttgaaaaccgagcttcgcaatatggagagatcacaaaagcgagaaggaatagatatgacatatctcaaaaatgtgattctaaaacttcttgaaacagctcaagaagtgccagcaaggtgtcctttcgagtgtggtctcttcacaagctactgcagtgtcagatggcacaaccacacagaattcgttctttgcaagattctcgttctgaggcattgccctcgaagatcagcagtttagctgggggagaggatgtcctgagccttcagattcacagttttgttgaccgtagaaaacgtttattcatttattagttacaagcgtccttacccccccccccccccccctctccttttgtaaaagtagtgcatatagcaggattaagataaacacatgtaatggagtatatattgtgcaactgccatatattatatgatatatagcggctcatattaggttgccgaatgtagaagggaatggtttttacactttttttttctcgaacgcgcatgagaactgcgcccaatt

SEQ ID NO: 22366 - DNA, 524 bp, Zea Mays
cggtggctcggacccatctatcagcatgggtccacaggggaagtgggagcgttgttgcctgtggttgggacgttactacagtttagtcctgacgagctcaagaagtgccagcaaggtgtcctttcgagtgtggtctcttcacaagctactgcagtgtcagatggcacaaccacacagaattcgttctttgcaagattctcgttctgaggcattgccctcgaagatcagcagtttagctgggggagaggatgtcctgagccttcagattcacagttttgttgaccgtagaaaacgtttattcatttattagttacaagcgtccttacccccccccccccccccctctccttttgtaaaagtagtgcatatagcaggattaagataaacacatgtaatggagtatatattgtgcaactgccatatattatatgatatatagcggctcatattaggttgccgaatgtagaagggaatggtttttacactttttttttctcgaacgcgcatgagaactgcgcccaatt

SEQ ID NO: 22367 - DNA, 675 bp, Zea Mays
ctccgtctctcatccagtccatggcgagattggccctacagctgtcatggtgctccatggcgtggcggtgtcctttctccttccatctttccggtgacgagcaagggatggtctatggctgcacatgggtatgaggcagcagggtggtctgcagcagcacaaatgcacatggacacagctatggggaggggaagtgggagcgttgttgcctgtggttgggacgttactacagtttagtcctgacgagctcaagaagtgccagcaaggtgtcctttcgagtgtggtctcttcacaagctactgcagtgtcagatggcacaaccacacagaattcgttctttgcaagattctcgttctgaggcattgccctcgaagatcagcagtttagctgggggagaggatgtcctgagccttcagattcacagttttgttgaccgtagaaaacgtttattcatttattagttacaagcgtccttacccccccccccccccccctctccttttgtaaaagtagtgcatatagcaggattaagataaacacatgtaatggagtatatattgtgcaactgccatatattatatgatatatagcggctcatattaggttgccgaatgtagaagggaatggtttttacactttttttttctcgaacgcgcatgagaactgcgcccaatt

SEQ ID NO: 22368 - DNA, 1403 bp, Zea Mays
atttattcagagttaaaagcatctctctaaatatctcgtctcgcaggattttttttatagaattagttagtaaagcttgatatgctttactttcactctaaaaatcagaaataacatacaacaatgtagattagaacggagaaaattagaactcatttatatataatttatattagaatggaacggaacgagtagcaaagagcacatgggtggggtctgtacggctgtacgtatcgggatttgttattcctttatcacttgtatccaagcctacactaccacgtgcagacaataccatgccccgtccaggacttccgtttcaggagtacactggattcgttcacagcgccggtgccacggcgacggcggagaccatgctgtcgacgccgcatacgttgcttccgcggcacaggcggtagtacccttgctcaccccactgctttccccacgagttcttgatgatccagtaggggcggtagcccagccgcagcgccgcgaagccgcgcgcgccgtagccgacgaggagcacgccgtggttgacccacgcgcgcgggcagatgagagggcacgacaccccgcccacgtacgtctgcatgaacgccgcgttgagccccaccgcgaggggcccgcggcggacgagcgccgcgcggatctgggcctcgtcgccggccggcacggcggtgaagttggccacgcggacggcgacctgggtcgggtcgaagcggcagggccccgccgcgcccgtgtacgggtacgcgctctgctccatcaggccgccggactccatcaggtacgagtacgcgttcgtcatcagcccgccggcgcagccgttgttgcactcgttctgcgccaccgcgcgtgtggtcgcagtcgaccagctgctgctcgctgaggtcgacgagctcccccgtggcgaggaagttggcgccctccaccgcgcccgtcgtgctgaacgcccagcacgacccgcacgcgccctgcgtcttgacgcccgtgacggcgcccttgtcgcgccagtcgaagctggccggcagacgggccacctcctccttcgaggccggcggggcggccggcacgccactcatgagccgctggacgtccccgccggcgcgcaggcccgtgaggcgcgcctcgaactcctcccgcgtgaggtcggagaagggcgtgaccccgtggcgcgccgtcgggtccagcgcctggtgcgccgccgcgcgggccaggttggccgcgaacacgcgcagccgacgcgcatactccttgggcccggagtaccgccgcccgtgccgcctcacgaacgctgcgaactgcgcctccgggagcagacccgggcccgcgccggcgcgggtaccttgcgtcgtcacctgccggatgaatttgtcgtcggcggacgcgccggcgagtag

SEQ ID NO: 22369 - DNA, 1245 bp, Zea Mays
cctcgggcgagccggagatgtgtccgccgttggaggggggccttgggcgagacggaaatcctccggggtcagctgcccctgtccgagtctaggctcggacgagacatgatcgagtcgctcgaatttactgatccctgacttaatcgcacccatcaggcctttgcagctttatgctgatggagttaccaactgagaattaggcgtcttgaggttacccataattatggttcccgacagacctaaaccacattccttcctttcatcgttgcatcttccctccgatccttccggtgggggcggccagatgcgaccaaattcctcctattccctctcctctccgcccacccttctctcgcccgcgtaactcctctctgtcgcctaccaaaagcggagcaaccgaggcaagaggaagggggtgggcgaggaaaagcgatttggcttctcttccagttccggattcatcgtaagaaacacatgactgcagtggatatttgaagcatgaaaaggcaaaccatctcactcttcaaacagttcacttagcacacttaatgacggaggtgtttgcatgacattctctttgagctgatatatatgggaagacgatggcaatcgagtctagaagcaatggagaagaatgttagcatatcagtttctcttgaggggaatatctcttctattcccaactcgatagtcaacgattctaaaacgttaatggaaaatggggtagatacatcatttatcaaccatgctgctaaagaatggactgagatgagaagacaatgggttggacatcaggcagaagttccgagaaaggcccctcaagagccagtgataagttggtccgcaacatatgatgatctcttgtcgacaagtgagcgttttccacagcgaatcccactatctgagatggttgattttttggtcgacatatggcacgaagaagggctctatggttagctgacgtctggctttctttccgccttgcatttagaatgtggtcaacttcctccccacaaaagatgtaatcttttgaagaaatgaaaaaaaaactacttagtcgcaaaattagttttagcatttgatttttttttaaaaaaactgttatttggaaagatactacagtggtttggtatatttggtgatgagctgtcagaggtttgtttatgttaaatgactcgatgacctgtcattcctgaatgggcggttgcttaagaatagaagagggagcattttctgtagtatcat

SEQ ID NO: 22370 - DNA, 1339 bp, Zea Mays
cctcgggcgagccggagatgtgtccgccgttggaggggggccttgggcgagacggaaatcctccggggtcagctgcccctgtccgagtctaggctcggacgagacatgatcgagtcgctcgaatttactgatccctgacttaatcgcacccatcaggcctttgcagctttatgctgatggagttaccaactgagaattaggcgtcttgaggttacccataattatggttcccgacagacctaaaccacattccttcctttcatcgttgcatcttccctccgatccttccggtgggggcggccagatgcgaccaaattcctcctattccctctcctctccgcccacccttctctcgcccgcgtaactcctctctgtcgcctaccaaaagcggagcaaccgaggcaagaggaagggggtgggcgaggaaaagcgatttggcttctcttccagttccggattcatcaaacacatgactgcagtggatatttgaagcatgaaaaggcaaaccatctcactcttcaaacagttcacttagcacacttaatgacggaggtgtttgcatgacattctctttgagctgatatatatgggtggctgcattggtaatttaagaaaatctcagtcacttccagattctaagccgaaacgatctttaagaaagaaatctctggattcatctactggaaacagaagacgatggcaatcgagtctagaagcaatggagaagaatgttagcatatcagtttctcttgaggggaatatctcttctattcccaactcgatagtcaacgattctaaaacgttaatggaaaatggggtagatacatcatttatcaaccatgctgctaaagaatggactgagatgagaagacaatgggttggacatcaggcagaagttccgagaaaggcccctcaagagccagtgataagttggtccgcaacatatgatgatctcttgtcgacaagtgagcgttttccacagcgaatcccactatctgagatggttgattttttggtcgacatatggcacgaagaagggctctatggttagctgacgtctggctttctttccgccttgcatttagaatgtggtcaacttcctccccacaaaagatgtaatcttttgaagaaatgaaaaaaaaactacttagtcgcaaaattagttttagcatttgatttttttttaaaaaaactgttatttggaaagatactacagtggtttggtatatttggtgatgagctgtcagaggtttgtttatgttaaatgactcgatgacctgtcattcctgaatgggcggttgcttaagaatagaagagggagcattttctgtagtatcat

SEQ ID NO: 22371 - DNA, 1259 bp, Zea Mays
cctcgggcgagccggagatgtgtccgccgttggaggggggccttgggcgagacggaaatcctccggggtcagctgcccctgtccgagtctaggctcggacgagacatgatcgagtcgctcgaatttactgatccctgacttaatcgcacccatcaggcctttgcagctttatgctgatggagttaccaactgagaattaggcgtcttgaggttacccataattatggttcccgacagacctaaaccacattccttcctttcatcgttgcatcttccctccgatccttccggtgggggcggccagatgcgaccaaattcctcctattccctctcctctccgcccacccttctctcgcccgcgtaactcctctctgtcgcctaccaaaagcggagcaaccgaggcaagaggaagggggtgggcgaggaaaagcgatttggcttctcttccagttccggattcatcgtaagaaacacatgactgcagtggatatttgaagcatgaaaagagcagtggctgcattggtaatttaagaaaatctcagtcacttccagattctaagccgaaacgatctttaagaaagaaatctctggattcatctactggaaacagaagacgatggcaatcgagtctagaagcaatggagaagaatgttagcatatcagtttctcttgaggggaatatctcttctattcccaactcgatagtcaacgattctaaaacgttaatggaaaatggggtagatacatcatttatcaaccatgctgctaaagaatggactgagatgagaagacaatgggttggacatcaggcagaagttccgagaaaggcccctcaagagccagtgataagttggtccgcaacatatgatgatctcttgtcgacaagtgagcgttttccacagcgaatcccactatctgagatggttgattttttggtcgacatatggcacgaagaagggctctatggttagctgacgtctggctttctttccgccttgcatttagaatgtggtcaacttcctccccacaaaagatgtaatcttttgaagaaatgaaaaaaaaactacttagtcgcaaaattagttttagcatttgatttttttttaaaaaaactgttatttggaaagatactacagtggtttggtatatttggtgatgagctgtcagaggtttgtttatgttaaatgactcgatgacctgtcattcctgaatgggcggttgcttaagaatagaagagggagcattttctgtagtatcat

SEQ ID NO: 22372 - DNA, 175 bp, Zea Mays
tccagccaaaaccgttggagccattccacaatatctaaataaccactgtatagggaaagcaggtgaaacattgtaatcagacaacgtattaataaagtttgatgatcttcattgaactgctccgtgggacctggcacatctttattggcaacacaaaagcaaagttagaataaac

SEQ ID NO: 22373 - DNA, 521 bp, Zea Mays
atacaggcacacataattagacgcatggaagaacctttaactagtgccaagggaaaggcgagggaacctggggaagcttcacggtggtggatgcggcgacgatggcgtagccgagcagcttagagatgagcgggagcaggcagcccttgtcggggatcttggcgtcggacagagccgcgaggacgcacccgaaattcatgcctaggatctcgagctccatcgctgccaccatggccgtctcctccgtcgccacggaggttcagtcgcagcttgcgtcggcaatggtgagtggtgacgagacgacgaacagcgaagaagcccacggcccacaagccacgcgcccacaagccgaccagcgtatctcttcagtgagatgggccttttgtgacgggctggacgtctagctggcaagtctcggctgtcggctcgttaaaaagcgggaaacttggctagggaagatattagtgcacctctaagactctctatattgttcttaattgatataatagttatttaaatgg

SEQ ID NO: 22374 - DNA, 644 bp, Zea Mays
cttttgttcgctgctgacaaaattagttctattatattctgtggaattggaagattctacggaagaatgttgattcactagatttggctgtcagtcaattgcttcgccttccctagtcaatggatactatcaatgaagttacaaggcaactgactgctggaaatatgaagtggcttatagcaacagaggactggacactggaggacttcccctttttatggcatgataaaacactactagttcttgatttgatttacgtttccatcttatctgtatttgtaaacaacacatttattgaaaacatctctatcttcttgtgatgcgtgcatgaagtttgtatgtaaaatgggtcattgagcccatggactatctctgtaaattggagggaaatggcaacagaagtttttctgtatctttgctctaccattccttatctttgttttctcccttgaaattgtgacactgaacccacttgtgtaaatttcgtacagtatttatactcatacttgttttatattttgccaacaattttgattacttccatattttaagtgaaacttagtagcttaaactagagacagatactgtgtgagcttagcatgaaaatggtaactttgtaactgttttaggcacctcgaatattg

SEQ ID NO: 22375 - DNA, 625 bp, Zea Mays
gacaaaattagttctattatattctgtggaattgattctacggaagaatgttgattcactagatttggctgtcagtcaattgcttcgccttccctagtcaatggatactatcaatgaagttacaaggcaactgactgctggaaatatgaagtggcttatagcaacagaggactggacactggaggacttcccctttttatggcatgataaaacactactagttcttgatttgatttacgtttccatcttatctgtatttgtaaacaacacatttattgaaaacatctctatcttcttgtgatgcgtgcatgaagtttgtatgtaaaatgggtcattgagcccatggactatctctgtaaattggagggaaatggcaacagaagtttttctgtatctttgctctaccattccttatctttgttttctcccttgaaattgtgacactgaacccacttgtgtaaatttcgtacagtatttatactcatacttgttttatattttgccaacaattttgattacttccatattttaagtgaaacttagtagcttaaactagagacagatactgtgtgagcttagcatgaaaatggtaactttgtaactgttttaggcacctcgaatattg

SEQ ID NO: 22376 - DNA, 525 bp, Zea Mays
ctgtgcagtgggcgctgtgttacaaggcaactgactgctggaaatatgaagtggcttatagcaacagaggactggacactggaggacttcccctttttatggcatgataaaacactactagttcttgatttgatttacgtttccatcttatctgtatttgtaaacaacacatttattgaaaacatctctatcttcttgtgatgcgtgcatgaagtttgtatgtaaaatgggtcattgagcccatggactatctctgtaaattggagggaaatggcaacagaagtttttctgtatctttgctctaccattccttatctttgttttctcccttgaaattgtgacactgaacccacttgtgtaaatttcgtacagtatttatactcatacttgttttatattttgccaacaattttgattacttccatattttaagtgaaacttagtagcttaaactagagacagatactgtgtgagcttagcatgaaaatggtaactttgtaactgttttaggcacctcgaatattg

SEQ ID NO: 22377 - DNA, 2976 bp, Zea Mays
cacatgctgctgctacacagtacttgctgcaactggccactattgggctgagatcagccactacttagcactatttccatactgctgtcatgctgttactgttacagtagatagaaaagacagcaaggttgaccttttgccaacttcctgctgtagcaaaacaagagaagaatgcagcagattatcttaacatagtacctaccaaagtcagtagtctttcaccatgacaaacttgactaattggagaaattattattgaagcaggcatcttacatacatttcatgccatacagaagtttgaatgtcttattaacttctaaaagcaggaaataatgtaatgagattaacttattttgttcgctcacatgaagcacaatatgatctgacttaaggctattatacaacaatatatggggaacaaaaacaggtacaatagacattgttgatagctggtcttccaaggagctttacagcaaagaatctgtctttgcaggtagcctcctgaagaagtttgctggtgctgatggcaccttgtggcgaaaccgaggatgcctcatcccgaagaacccaaggcagagtgcaaccacttggaatggtgtcacatacagtataatcgcagtaatcaggcaaaatatcaggaacatagctgttgcccttgggtccctccagctgagcagtgactgtaatctttctccctgagtggcaatgtccccaacaacagtctgtatcctcccagcaacgtgtcgtaacctatcgtacctcatccggatgagatctgggctctttgaggttgggaatgtgtcaaattcctcatcaagctcatctggaagtgcaacatcagcgtaagatattcttgtgttcatgtgtggtgggaagcgtggccggaaccggtaattccacagccctatcaagaacatgtagaggaaaattgttggcaggataaggtctggatagagcacaagcatgataaagagcacatggaccagcactgtggtgaccgggtttttccactgacaaacatcagcaaaccatttccctgcagcaatgaaccctgagaagacttgcataaggcggaagaagttagctttgctccgtcgcatgctccacaggtgagagcgagcatctgacataaactcaacaacttccctgcggactggtggctccatgcgtcccaggcgctgcgcaacaagcagcacagcttggtggcggagcatttcctgctgaactattgacagaggctgtgcgtagtgcatcttgggcaagagaggcctagagtatgtgaagagcacattgataagggatgtgactgtgaaccggatggcaaggtggagctcacccatctttttaactcctgatgggctgaggaagagcaatggatatgagtgcgtgtacacacgcgccgtgtcaagtgtcgaaagccgaatcctcactttcccgatgggtttatccatgtggcctgaggaaccgtccttgttatcatctccacttatgtgacagttgtcaaatagaccaattgtgagcacagttccatgatcaaagacctcccatgtgtactgctcgttgaaccgagggctcaagctgtcaactatcgtgcgcgtccggacccatttggaaccatacttggcaacacagtacgcatcacacgacccacggctgtttctggtcttcgttggattgagaccgttcgcacttaagatgccgacttcaagcatgccgattggtggcttccacagctgcttcatcgtcggacggagatcgctgcagtactgtgtggactcatcaagcacatggtaaccaccttcaaggcagacacgaaggcttaccttcgcatagaatttgtcttccttcagctggttcacgtcgatgatccctggccttcttagatcgaaccatgctgggagtaccggtttgtgatcagcccgccttggaagcctcgcgagcggtatgatagcctcaccaatcacctcgtctttgtcttgtgccacacggtctactactgatatgagcaagtcgtcctcaaacggctctgctgccacgaacatcagctcctcgttccacatgaagtttctggtcggcgagcgaacctgccttgtcctcagcagttgatggcccagcctcacttttaccagcacatcaggagagatgcaaggttggaatggaaaagagatctggaggcataaatgaaggggcacaatcccaacgtccagaaagtggcagctcagctcgttgagttcaatcaagagattaggagggaccattctttggtgaagaaaggtaggcaggggcaggtgatgggtgtgtgtgagtgtgtgtgtgtcaacattgaggcaagtgagggatgtccggatgtcctccatccatgatgtggtatgagcccatcatccatccatccatgcatcgttggatattccagaataagaatcagtccacaaatgtgatatccgtctttggagccctggctatctacggaattccgggtgcttcattaaatacatgattaattgctaaacctgaggcgtaccggccaatcagggagcagatttggagagagaaaaactgacctggcttccgtattttgattgaagctttctttcagtggtgcggtttttcagagagcacatgctgtgaatttgggagtacagaagatgcccagttcgcatgtactaagcataaagtgattcccaaatttactctttttgttggcatattcctggacctgggatcttgttgcatcccttttgccatccgatcgtttcatcacatcattcaaaaggaggatatggggggcgtcaaaacggaagcatcggatccgctgattgtattgtatatatatatcagcaagctcatcaatcaagaaggagagttctgagtgagcaagaaactaaagggtagcgaaacgacagcagttttgacagcaccacccgatttgccaagaaacgtaagcaaagacaagaaagctttcaaaattgagaagtg

SEQ ID NO: 22378 - DNA, 921 bp, Zea Mays
ctttggttgaggaatcaaaggtggtgagccatgtgggggtactgaaaagttagacaggagagatgttggcaacaatataagggagagatgcaaggttggaatggaaaagagatctggaggcataaatgaaggggcacaatcccaacgtccagaaagtggcagctcagctcgttgagttcaatcaagagattaggagggaccattctttggtgaagaaaggtaggcaggggcaggtgatgggtgtgtgtgagtgtgtgtgtgtcaacattgaggcaagtgagggatgtccggatgtcctccatccatgatgtggtatgagcccatcatccatccatccatgcatcgttggatattccagaataagaatcagtccacaaatgtgatatccgtctttggagccctggctatctacggaattccgggtgcttcattaaatacatgattaattgctaaacctgaggcgtaccggccaatcagggagcagatttggagagagaaaaactgacctggcttccgtattttgattgaagctttctttcagtggtgcggtttttcagagagcacatgctgtgaatttgggagtacagaagatgcccagttcgcatgtactaagcataaagtgattcccaaatttactctttttgttggcatattcctggacctgggatcttgttgcatcccttttgccatccgatcgtttcatcacatcattcaaaaggaggatatggggggcgtcaaaacggaagcatcggatccgctgattgtattgtatatatatatcagcaagctcatcaatcaagaaggagagttctgagtgagcaagaaactaaagggtagcgaaacgacagcagttttgacagcaccacccgatttgccaagaaacgtaagcaaagacaagaaagctttcaaaattgagaagtg

SEQ ID NO: 22379 - DNA, 2358 bp, Zea Mays
ttgcagtctctcagcctatggtcatcgtggacacgagctcacactgacactgactgacagagtcaatggcgacgggcgtgcttgataggcgcgccccaactaacacgacgtcggtcctcgatgactgactgggtatatatgccatgggtcaccccttccgccaatccagtcaggttcgtcgtccggtcgccgccacctagttgctgccagtccaggctgggaaatcgtatcgtcagggagagcagcatgaaggggcggctgctgctgctgctgtgggcgtgggcggccgccacatgggtgtccgtcagcgccgtgactcgcctcggcagaggcgtcgccggagagcagccgctgtccaggatcgccgtcgagagggtggtcctcgccgtcaacgacgcggcgtacgtcaaggcgtcccctctggttctcgggcacaagggcgagaacagtgagtgggcggacgtggagttcttccacccgaacccgtccgacgacgactggatcggcgtcttctctcccgcaaatttcagtgatgcgatctgtgaggctgagaatacgggtaccccagtgctgtgcactgcacctatcaagtttgcaaacttcgaaaacgatggctataacaagactggaaagggctacctcaagcttcagttgatcaaccagagggaagatttctcattcgcgcttttctcaggtggtctctcaaagcccaagctgatttctgtctccaacaaggtagcctttgctaatccaaaggcaccagtgtacccgcgtttggcgcaagggaagtcttggaatgaaatgacagtcacctggacaagcggctacgatattacagaagcagttccttttgttgagtggggtgagaaaggaggtcgacgacttcttgctccagctggaacattaacatttgaccgaaatagcatgtgtggctcaccggcacgaactgttggttggcgccatcctggttacatccatactagcttcctgaaggatctgtggccagactcgccgtatacttacaggcttggccataggctgatgaatgggacccgcgtctggagcaagtcatacagcttcaaagcgtcgccttaccctgggcaagattctttgcagcgagttgtcgtatttggggacatgggaaaggcagaggctgatggttcgaacgagttcagcgacttccagcccggttcgttgaatactacttaccagatcatcagggacctcgaagacatcgacatggtggtccacattggggacatctgctacgcggatggctacttgtctcagtgggatcagttcactgcacagatcgaaccgattgcttcaagggtgccatacatgattggcctcggtaaccatgagagggattggcctggcactggttcattctacgggaaccttgactccggtggagagtgcggcgtccctgcccaaactgtgttctacactccagctgagaaccgtgcaaaattctggtacgcgacggactacggcatgttcaggttctgcatcgcaaacacggaagaggactggaggccggggaccgagcagtacaagttcatcgagcaatgcctgtcgtcggtcgacaggcagaagcagccgtggctcatcttcctcgcgcaccgcgttctcggctactcctcctgcacctactacgaatcggagggcacgttcgaggagcccatggggcgggaagcgctgcaggagctctggcagaagtacaaggtggacatcgccttctatggccacgtccacagctacgaaaggacatgcccggtctaccagtctcagtgcgtcgtcgatggatccgaccactacagcggcccgttccaggcgacgacgcacgtcgttgtcggcggcgcaggagccagcattctcgattctgagttcaccacctcgaagatccagtggagccacttcaccgacttcgaccacgggttcgtcaagctcacggccctcaaccattcctccctgctgttcgagtacaagaagagccgcgacggcaacgtgtatgaccatttcacaatctcacgcgactaccgggacatcctcgcttgctccatcgacaactgcccccggagcacactggcttcctgaagtcccacagtagttgcagaccagaaattttagttcgtagcttttctgtactgcaccgaccaataaatgaggccttttcttttttaataatatataattatatgcatgcactattttcttgtacctatagtcataaatgttagaagccaatttcgatagcaatttaatctaggaaaaaattaagcatgggagatcaagagatagaaaacttatcgtcatcatatgcataactctagaagttatgatggaaaactttcg

SEQ ID NO: 22380 - DNA, 2363 bp, Zea Mays
gcagtctctcagcctatggtcatcgtggacacgagctcacactgacactgactgacagagtcaatggcgacgggcgtgcttgataggcgcgccccaactaacacgacgtcggtcctcgatgactgactgggtatatatgccatgggtcaccccttccgccaatccagtcaggttcgtcgtccggtcgccgccacctagttgctgccagtccaggctgggaaatcgtatcgtcagggagagcagcatgaaggggcggctgctgctgctgctgtgggcgtgggcggccgccacatgggtgtccgtcagcgccgtgactcgcctcggcagaggcgtcgccggagagcagccgctgtccaggatcgccgtcgagagggtggtcctcgccgtcaacgacgcggcgtacgtcaaggcgtcccctctggttctcgggcacaagggcgagaacagtgagtgggcggacgtggagttcttccacccgaacccgtccgacgacgactggatcggcgtcttctctcccgcaaatttcagtgatgcgatctgtgaggctgagaatacgggtaccccagtgctgtgcactgcacctatcaagtaccagtttgcaaacttcgaaaacgatggctataacaagactggaaagggctacctcaagcttcagttgatcaaccagagggaagatttctcattcgcgcttttctcaggtggtctctcaaagcccaagctgatttctgtctccaacaaggtagcctttgctaatccaaaggcaccagtgtacccgcgtttggcgcaagggaagtcttggaatgaaatgacagtcacctggacaagcggctacgatattacagaagcagttccttttgttgagtggggtgagaaaggaggtcgacgacttcttgctccagctggaacattaacatttgaccgaaatagcatgtgtggtatacttacaggcttggccataggctgatgaatgggacccgcgtctggagcaagtcatacagcttcaaagcgtcgccttaccctgggcaagattctttgcagcgagttgtcgtatttggggacatgggaaagaggctgatggttcgaacgagttcagcgacttccagcccggttcgttgaatactacttaccagatcatcagggacctcgaagacatcgacatggtggtccacattggggacatctgctacgcggatggctacttgtctcagtgggatcagttcactgcacagatcgaaccgattgcttcaagggtgccatacatgattggcctgtacagtactcccttgtgttcctcccatgttcatgcacaccgccgtttacgataacgagatccttctttcttcctttttttttgcagcggtaaccatgagagggattggcctggcactggttcattctacgggaaccttgactccggtggagagtgcggcgtccctgcccaaactgtgttctacactccagctgagaaccgtgcaaaattctggtacgcgacggactacggcatgttcaggttctgcatcgcaaacacggaagaggactggaggccggggaccgagcagtacaagttcatcgagcaatgcctgtcgtcggtcgacaggcagaagcagccgtggctcatcttcctcgcgcaccgcgttctcggctactcctcctgcacctactacgaatcggagggcacgttcgaggagcccatggggcgggaagcgctgcaggagctctggcagaagtacaaggtggacatcgccttctatggccacgtccacagctacgaaaggacatgcccggtctaccagtctcagtgcgtcgtcgatggatccgaccactacagcggcccgttccaggcgacgacgcacgtcgttgtcggcggcgcaggagccagcattctcgattctgagttcaccacctcgaagatccagtggagccacttcaccgacttcgaccacgggttcgtcaagctcacggccctcaaccattcctccctgctgttcgagtacaagaagagccgcgacggcaacgtgtatgaccatttcacaatctcacgcgactaccgggacatcctcgcttgctccatcgacaactgcccccggagcacactggcttcctgaagtcccacagtagttgcagaccagaaattttagttcgtagcttttctgtactgcaccgaccaataaatgaggccttttcttttttaataatatataattatatgcatgcactattttcttgtacctatagtcataaatgttagaagccaatttcgatagcaatttaatctaggaaaaaattaagcatgggagatcaagagatagaaaacttatcgtcatcatatgcataactctagaagttatgatggaaaactttcg

SEQ ID NO: 22381 - DNA, 2280 bp, Zea Mays
gcagtctctcagcctatggtcatcgtggacacgagctcacactgacactgactgacagagtcaatggcgacgggcgtgcttgataggcgcgccccaactaacacgacgtcggtcctcgatgactgactgggtatatatgccatgggtcaccccttccgccaatccagtcaggttcgtcgtccggtcgccgccacctagttgctgccagtccaggctgggaaatcgtatcgtcagggagagcagcatgaaggggcggctgctgctgctgctgtgggcgtgggcggccgccacatgggtgtccgtcagcgccgtgactcgcctcggcagaggcgtcgccggagagcagccgctgtccaggatcgccgtcgagagggtggtcctcgccgtcaacgacgcggcgtacgtcaaggcgtcccctctggttctcgggcacaagggcgagaacagtgagtgggcggacgtggagttcttccacccgaacccgtccgacgacgactggatcggcgtcttctctcccgcaaatttcagtgatgcgatctgtgaggctgagaatacgggtaccccagtgctgtgcactgcacctatcaagtaccagtttgcaaacttcgaaaacgatggctataacaagactggaaagggctacctcaagcttcagttgatcaaccagagggaagatttctcattcgcgcttttctcaggtggtctctcaaagcccaagctgatttctgtctccaacaaggtagcctttgctaatccaaaggcaccagtgtacccgcgtttggcgcaagggaagtcttggaatgaaatgacagtcacctggacaagcggctacgatattacagaagcagttccttttgttgagtggggtgagaaaggaggtcgacgacttcttgctccagctggaacattaacatttgaccgaaatagcatgtgtggtatacttacaggcttggccataggctgatgaatgggacccgcgtctggagcaagtcatacagcttcaaagcgtcgccttaccctgggcaagattctttgcagcgagttgtcgtatttggggacatgggaaaggcagaggctgatggttcgaacgagttcagcgacttccagcccggttcgttgaatactacttaccagatcatcagggacctcgaagacatcgacatggtggtccacattggggacatctgctacgcggatggctacttgtctcagtgggatcagttcactgcacagatcgaaccgattgcttcaagggtgccatacatgattggcctcggtaaccatgagagggattggcctggcactggttcattctacgggaaccttgactccggtggagagtgcggcgtccctgcccaaactgtgttctacactccagctgagaaccgtgcaaaattctggtacgcgacggactacggcatgttcaggttctgcatcgcaaacacggaagaggactggaggccggggaccgagcagtacaagttcatcgagcaatgcctgtcgtcggtcgacaggcagaagcagccgtggctcatcttcctcgcgcaccgcgttctcggctactcctcctgcacctactacgaatcggagggcacgttcgaggagcccatggggcgggaagcgctgcaggagctctggcagaagtacaaggtggacatcgccttctatggccacgtccacagctacgaaaggacatgcccggtctaccagtctcagtgcgtcgtcgatggatccgaccactacagcggcccgttccaggcgacgacgcacgtcgttgtcggcggcgcaggagccagcattctcgattctgagttcaccacctcgaagatccagtggagccacttcaccgacttcgaccacgggttcgtcaagctcacggccctcaaccattcctccctgctgttcgagtacaagaagagccgcgacggcaacgtgtatgaccatttcacaatctcacgcgactaccgggacatcctcgcttgctccatcgacaactgcccccggagcacactggcttcctgaagtcccacagtagttgcagaccagaaattttagttcgtagcttttctgtactgcaccgaccaataaatgaggccttttcttttttaataatatataattatatgcatgcactattttcttgtacctatagtcataaatgttagaagccaatttcgatagcaatttaatctaggaaaaaattaagcatgggagatcaagagatagaaaacttatcgtcatcatatgcataactctagaagttatgatggaaaactttcg

SEQ ID NO: 22382 - DNA, 2122 bp, Zea Mays
tccgccaatccagtcaggttcgtcgtccggtcgccgccacctagttgctgccagtccaggctgggaaatcgtatcgtcagggagagcagcatgaaggggcggctgctgctgctgctgtgggcgtgggcggccgccacatgggtgtccgtcagcgccgtgactcgcctcggcagaggcgtcgccggagagcagccgctgtccaggatcgccgtcgagagggtggtcctcgccgtcaacgacgcggcgtacgtcaaggcgtcccctctggttctcgggcacaagggcgagaacagtgagtgggcggacgtggagttcttccacccgaacccgtccgacgacgactggatcggcgtcttctctcccgcaaatttcagtgatgcgatctgtgaggctgagaatacgggtaccccagtgctgtgcactgcacctatcaagtaccagtttgcaaacttcgaaaacgatggctataacaagactggaaagggctacctcaagcttcagttgatcaaccagagggaagatttctcattcgcgcttttctcaggtggtctctcaaagcccaagctgatttctgtctccaacaaggtagcctttgctaatccaaaggcaccagtgtacccgcgtttggcgcaagggaagtcttggaatgaaatgacagtcacctggacaagcggctacgatattacagaagcagttccttttgttgagtggggtgagaaaggaggtcgacgacttcttgctccagctggaacattaacatttgaccgaaatagcatgtgtggtatacttacaggcttggccataggctgatgaatgggacccgcgtctggagcaagtcatacagcttcaaagcgtcgccttaccctgggcaagattctttgcagcgagttgtcgtatttggggacatgggaaaggcagaggctgatggttcgaacgagttcagcgacttccagcccggttcgttgaatactacttaccagatcatcagggacctcgaagacatcgacatggtggtccacattggggacatctgctacgcggatggctacttgtctcagtgggatcagttcactgcacagatcgaaccgattgcttcaagggtgccatacatgattgcggtaaccatgagagggattggcctggcactggttcattctacgggaaccttgactccggtggagagtgcggcgtccctgcccaaactgtgttctacactccagctgagaaccgtgcaaaattctggtacgcgacggactacggcatgttcaggttctgcatcgcaaacacggaagaggactggaggccggggaccgagcagtacaagttcatcgagcaatgcctgtcgtcggtcgacaggcagaagcagccgtggctcatcttcctcgcgcaccgcgttctcggctactcctcctgcacctactacgaatcggagggcacgttcgaggagcccatggggcgggaagcgctgcaggagctctggcagaagtacaaggtggacatcgccttctatggccacgtccacagctacgaaaggacatgcccggtctaccagtctcagtgcgtcgtcgatggatccgaccactacagcggcccgttccaggcgacgacgcacgtcgttgtcggcggcgcaggagccagcattctcgattctgagttcaccacctcgaagatccagtggagccacttcaccgacttcgaccacgggttcgtcaagctcacggccctcaaccattcctccctgctgttcgagtacaagaagagccgcgacggcaacgtgtatgaccatttcacaatctcacgcgactaccgggacatcctcgcttgctccatcgacaactgcccccggagcacactggcttcctgaagtcccacagtagttgcagaccagaaattttagttcgtagcttttctgtactgcaccgaccaataaatgaggccttttcttttttaataatatataattatatgcatgcactattttcttgtacctatagtcataaatgttagaagccaatttcgatagcaatttaatctaggaaaaaattaagcatgggagatcaagagatagaaaacttatcgtcatcatatgcataactctagaagttatgatggaaaactttcg

SEQ ID NO: 22383 - DNA, 2106 bp, Zea Mays
tccgccaatccagtcaggttcgtcgtccggtcgccgccacctagttgctgccagtccaggctgggaaatcgtatcgtcagggagagcagcatgaaggggcggctgctgctgctgctgtgggcgtgggcggccgccacatgggtgtccgtcagcgccgtgactcgcctcggcagaggcgtcgccggagagcagccgctgtccaggatcgccgtcgagagggtggtcctcgccgtcaacgacgcggcgtacgtcaaggcgtcccctctggttctcgggcacaagggcgagaacagtgagtgggcggacgtggagttcttccacccgaacccgtccgacgacgactggatcggcgtcttctctcccgcaaatttcagtgatgcgatctgtgaggctgagaatacgggtaccccagtgctgtgcactgcacctatcaagtaccagtttgcaaacttcgaaaacgatggctataacaagactggaaagggctacctcaagcttcagttgatcaaccagagggaagatttctcattcgcgcttttctcaggtggtctctcaaagcccaagctgatttctgtctccaacaaggtagcctttgctaatccaaaggcaccagtgtacccgcgtttggcgcaagggaagtcttggaatgaaatgacagtcacctggacaagcggctacgatattacagaagcagttccttttgttgagtggggtgagaaaggaggtcgacgacttcttgctccagctggaacattaacatttgaccgaaatagcatgtgtggtatacttacaggcttggccataggctgatgaatgggacccgcgtctggagcaagtcatacagcttcaaagcgtcgccttaccctgggcaagattctttgcagcgagttgtcgtatttggggacatgggaaaggcagaggctgatggttcgaacgagttcagcgacttccagcccggttcgttgaatactacttaccagatcatcagggacctcgaagacatcgacatggtggtccacattggggacatctgctacgcggatggctacttgtctcagtgggatcagttcactgcacagatcgaaccgattgcttcaaggcggtaaccatgagagggattggcctggcactggttcattctacgggaaccttgactccggtggagagtgcggcgtccctgcccaaactgtgttctacactccagctgagaaccgtgcaaaattctggtacgcgacggactacggcatgttcaggttctgcatcgcaaacacggaagaggactggaggccggggaccgagcagtacaagttcatcgagcaatgcctgtcgtcggtcgacaggcagaagcagccgtggctcatcttcctcgcgcaccgcgttctcggctactcctcctgcacctactacgaatcggagggcacgttcgaggagcccatggggcgggaagcgctgcaggagctctggcagaagtacaaggtggacatcgccttctatggccacgtccacagctacgaaaggacatgcccggtctaccagtctcagtgcgtcgtcgatggatccgaccactacagcggcccgttccaggcgacgacgcacgtcgttgtcggcggcgcaggagccagcattctcgattctgagttcaccacctcgaagatccagtggagccacttcaccgacttcgaccacgggttcgtcaagctcacggccctcaaccattcctccctgctgttcgagtacaagaagagccgcgacggcaacgtgtatgaccatttcacaatctcacgcgactaccgggacatcctcgcttgctccatcgacaactgcccccggagcacactggcttcctgaagtcccacagtagttgcagaccagaaattttagttcgtagcttttctgtactgcaccgaccaataaatgaggccttttcttttttaataatatataattatatgcatgcactattttcttgtacctatagtcataaatgttagaagccaatttcgatagcaatttaatctaggaaaaaattaagcatgggagatcaagagatagaaaacttatcgtcatcatatgcataactctagaagttatgatggaaaactttcg

SEQ ID NO: 22384 - DNA, 2004 bp, Zea Mays
gtataaacttgcaaccttcgctagatgggcaaaacatagtacctggtcatagccttctgtttcaggagtcaatacacattgcatattggataagcaagagccatcattgacctaaaagttggagttttagaatgcattggactcttaaaggataagagctacttgagtcgacaaatataaattcctctgtggtgtgcaaaagcattatggtacgactggctcattagccaagtgtcatgacatgttagctagggtctcgttgtttattactgaagcaaaggagatacacttaggggtggtaatggatcatgataaaaaatgattcttcacaataaattagggcccttaaataattttagttcaaaaatgaatagaaatagagtctgatcctaatccgattcgatccttaaattttatagtgtaaaatctagaacccattaccacccctagatacactatcagttgaaacataaaacattatatttcattcagaatatttaaccaagcatcaaggcattgataacattgtgaaacgctcattgagcatttctatatattaaagcagggagcaattctgctttcaggtgcctccacgtcagcactctgtgttttagccgcatgatccaaatccaacggtaaagcagggagcaattatgctttcaggtgcctccgcgtcagcactttctgttttaaccgcatgatccaaatccaacggtaaagcagggagcaattctgctttcaggtgcctccacgtcagcactttctgttttagccgcatgatccaaatccaacggtcataatcacatctcacgcatcccagcggtctctaacacacgctctttctcctccaagcgaaggaccattctagatgatgcacgaaggagccatcaagcgaccgtttccgtataacccccagctacccctatggccctatccggtgtctccatttgccgtgaaggttctagacagtccactccccgccctcaaacgccgttacctaggtgcttcgtcgtcccctccacccccgtcaagagctctcccaagcgtcggcgcacaccgccacctcgccgtgctctacagggttgccctctacagggctgccgtgcctccgccccggttgctggctgtcaataagcacgacctcctcgcgcatatcgccagctttgattaccggcctgggatgatggctgagctcgacgcgcagatggggttcgtcgtgggcggaaccattctcatgctactcactgtcgtcttctttgagattcaggtcagtctcttctccttccctgaatcgggagtgttaatcgcagcctgtacaaatccattcaaattgcgtgaaactggttgtttaactggttgccaagcaacttcaggcagatatccatcccattttgatttcaaagttttaatttatgctctacatgtacatatcaacgtgttttggtacttttactaatacatttgtcagctactggtcgcattttccttttgatgtatttacttctatgcttgctttaattaatttcagatgtttgctaaaccaccaaagaaattatgcaacaacaaattcatatttgtgcatcagcatttgtttattatcatattagtgacaaacaagtaaagtcattttttgtagggctgctaagcatatacaagatcgagggaaaaactcataggaccaattactcattaatagcgccatggaaaaaacagtactcaagattattaacttttttatacacaaatttagtatttaaagtatataacaacctcaatgccaatatatatatatagggcaggtataacgggagccctgggcttccaatagttaaaggaagcccaggtcgatcatccctgcaacctggttcaacccagcgcaccgactggaccaggctgtcggttgcaccacccgcgcccacgtctctgcgcgcaaaaaggaatgcatgcatgagtcaaacacatccccttgcatgcgcataaatttaggaaagatacgtgtgacaa

SEQ ID NO: 22385 - DNA, 3680 bp, Zea Mays
gaatttctcgcggtgaatcggggatcaagtccctcattgccgtaccctctagaaagtcacacggcccatctcaatccggaattccggatacataatatccgtatccgtataaatatccgatatccgcttccaagcggtcattccattccgtcacatattcccgagaaaaaccgtcattcgcgcgcacacgcggtcgcagctgcggtgcccggctcaacgccgcggagatggagggcgacgccaccggagctgacggaggaggcggaggaggaagtggtgagcgttctagcttcgtgatcggcctcatcgagaaccgtgccaaggaggttggtgttgcagcctttgatttaagatcagcctcattgcacctatctcagtatatcgagacaagttgctcatatcacaatacaaatacactacttcatttctatgatcccatggttgtcattgtgcccccaaacaaaacagcagcagatggtatggttggagtttcagaactgatcgataaacattacccagcaaacaaaaaggtcactatggcacgtggttgctttgatgacacaaagggtgctgtcattgtaagaagtctttcagctagggacccatctgctcttggtttagatacttactgcaagcagtattatctttgtcttgcggctgccactgcaacaattaaatggatagaatcagaaaagggtgtgttcattaccaatcactcattatcagttacattcaacgggtcatttgaccatatgagtatcgactcaactagtgttcaaacattggaaattattgaccctctccatactgaactttggggcactagcaacaaaaagaaaagcctctttcagatgctaaagactacaaagactacaggagggtctagattgttgaaagctaacttattacaaccattaaaagatattcagaccatcaatgctcgtctagattgcttggatgagctaatgagcaatgaggagctgttttttggtttgactcaaggtctacggaaatttccaaaagaatcaggttttgaagggggcaaagagttttcttcttcacaacatctatcagactgtatgtgaaaaccctaagtatgctaatatgagaaagagaattggagatgtcattgacgaggatgtggttcattcaagggctccatttgtagcctgcactcaacaatgttttgctgttaaggcaggaattgatggtctgcttgatgttgctcgtcgatctttctgtgataccagtgaagccatacataacctcgccaaaaagtacagggatgattataatatgccaaatttgaagataacctataatattaggcaaggattttactttattattccccaaaaggacatcaccgataggcttcctaataaatttatccaggttgttagacatgggaagaatctccattgctcaagcttggaacttgcttcactgaatgttaggaacaagtcgtctgctgctgagtgcttctcgcgcacggaactttgtttggaagggcttattgacaaaatcagaggagacattgctatccttacattgctcgccgaagtattatgtcttttggacatgattgtaaattcttttgcgcatacaatatctacaaagcctgttgatcgctacacaagaccagagttcacagatgatggtccaatggcaatcaatgctggacgacaccctattcttgagaccttgcatactaattttgttcctaacaatatatttctctctgaagcatctaatatggttcttgtcatggggccaaatatgagcgggaaaagcacatatctccaacagatatgtttaattgtcattcttgcacaaattggctgttatgttccagctcagtttgcatccttaagagttcttgatcgtatatttacacggattggtaacggggacaatgttgagaacaactcgagtacgtttatgacagaaatgaaagaaactgctttcatcatgcaaaatgtttcttcaaggagtttggttgttgtggatgaacttggaagagcaacatcttcctcagatgggttggcaatcgcatggagttgctgtgaataccttctttctgtgaaagcatacactgtttttgccacgcacatggaacgcttgtcagaactttcaacaatgtatccaaatgtgaagatcctccattttgaggttgacttgagaaatgaccgcttggatttcaagttctgcctaaaggatggcatccgacgggtaccacactatgggcttctgctggccagagtagctggtatccctacttcggtgatcgacacttcaacaagtatcacttcacagatcacagagcaggaaatgacaaggatgaatgccaattgcgaggagtactggtcgcttcagatgacgtaccaggttgtgcagcggcttatctgcctgaagtactcgaaccatggcgacgactacatccgtgaagcactgcagaatctcaaggagagctattctgcgggccggctaacataagaggtctcatcagtatgagctctggcccttaataaatgttaaataagagtttttcgattgcatggtgttcgttcgcgacatgttttgttgttttgcaggtgtatgccgctggaggatccataagccaatgtatatattcctccgtcaatgtgatactatcttaggtcctcaaacgcacatctatcgttatcgcacatgccatgtaacatcttatcccctattcatatagatgatcacgaagcaagacagcatgtgaatgtttagaacaagtgattattatgacctcagccacatagcttttacgaaaagatttactggaatatatggaacaccaaagtaggagattagagtggtcgatacatacaaactgtaggtttgaacagcaaatgttggcattgttttctgccaatacattaatcgatacagtagcatgagaggaggaggagcacagaaggcggcctagaccacacaagagagcgggaggtagtgtggagccgagcaggacaagaattcatgagggacaaaaaaaaaatgtatggcaaaatcattcattgtcataaaaaacttgtgttttatataatttcagtttcatgtcaatgtatcaataaaataagcaaatataccgttaagtttttgttgaccgagacaattccaaccaatcaactatttatataatctagatatttatctcaatctatcaataatcaatccaattatccaagtgtcaaatgcaaactctactgctattgtgtcgtctggaagaagctgcatgccttcccatcgtgccggaaagactgaaggggcatgctcctgctgactggaaaggcagggcgtgcttgggagcagacagcaggaaccggcttggggcggggacgccgccatgccaggagcccaggaagggagcggacagcaaggacgggcttggggcggggacgccgccatgccaggagcccaggaagggagcggacagcaaggacgggccgccgccatgccaggagcccaggaagggagcggacagcaaggacgggcttggggcggggacgccgccatgccaggagcccaggaagggagcggacagcaaggacgggcttggggcggcgtgcgcgttctccacgtcggcgtcgggaagtagcggacttaccgagccggcatacgagagtagcaagccagagtgtcggcgttag

SEQ ID NO: 22386 - DNA, 1486 bp, Zea Mays
caagtccctcattgccgtaccctctagaaagtcacacggcccatctcaatccggaattccggatacataatatccgtatccgtataaatatccgatatccgcttccaagcggtcattccattccgtcacatattcccgagaaaaaccgtcattcgcgcgcacacgcggtcgcagctgcggtgcccggctcaacgccgcggagatggagggcgacgccaccggagctgacggaggaggcggaggaggaagtggtgagcgttctagcttcgtgatcggcctcatcgagaaccgtgccaaggaggttggtgttgcagcctttgatttaagatcagcctcattgcacctatctcagtatatcgagacaagttgctcatatcacaatacaaatacactacttcatttctatgatcccatggttgtcattgtgcccccaaacaaaacagcagcagatggtatggttggagtttcagaactgatcgataaacattacccagcaaacaaaaaggtcactatggcacgtggttgctttgatgacacaaagggtgctgtcattgtaagaagtctttcagctagggacccatctgctcttggtttagatacttactgcaagcagtattatctttgtcttgcggctgccactgcaacaattaaatggatagaatcagaaaagggtgtgttcattaccaatcactcattatcagccaaaatttgatgcacgctatttgttcctattggatgacctcttctctgtatatgcattgtctccagaaagttatcgctccaacgccccgtttggatcccttcattttaaaggaattggaattcactcaataaagtaacttatttagtttggaatttgacattccactactttccaaagttcagatataagcctatctcaaattcatagggtggaggataggaaatgatttatgcatgattagaatttgtttctaatctgtaacttacatgacactctttgttctactcatttacagtaaaaatgtagcacataaatatctatgacatcttgctaataatagtatacaaatatattttgtataaaaatgaattagcttaattaatatatagctaaattaccattattagaatggaattcaattccagtgatccaaacggggagtaagtggaatccctgttgctattggcaatagattgttaattatgtgtatcttttatgatgtttcaattcctaacaatcattctagagattgctgatgcaatacaatttgtatgcattgggatcttgatgtttgcttcagggagcattttttagaaaaaaacagacatattattttgttacttcaatgccctttattattttgttccaagatttagaagaatacaacatgattaatgaatagaaaccatttaaaactgacatgcaactctgaaaaattataagttttttacaattgtggtgtgcccattagatcataggccctactaaactaggaaactggga

SEQ ID NO: 22387 - DNA, 4438 bp, Zea Mays
caagtccctcattgccgtaccctctagaaagtcacacggcccatctcaatccggaattccggatacataatatccgtatccgtataaatatccgatatccgcttccaagcggtcattccattccgtcacatattcccgagaaaaaccgtcattcgcgcgcacacgcggtcgcagctgcggtgcccggctcaacgccgcggagatggagggcgacgccaccggagctgacggaggaggcggaggaggaagtggtgagcgttctagcttcgtgatcggcctcatcgagaaccgtgccaaggaggttggtgttgcagcctttgatttaagatcagcctcattgcacctatctcagtatatcgagacaagttgctcatatcacaatacaaatacactacttcatttctatgatcccatggttgtcattgtgcccccaaacaaaacagcagcagatggtatggttggagtttcagaactgatcgataaacattacccagcaaacaaaaaggtcactatggcacgtggttgctttgatgacacaaagggtgctgtcattgtaagaagtctttcagctagggacccatctgctcttggtttagatacttactgcaagcagtattatctttgtcttgcggctgccactgcaacaattaaatggttaggccttgtttccaattgttccaatggttactggagcataaaagtcatcaagtgggtcaaggaggagtctcacctctggtgtagggctggagccagtggattagatagcatcctttccgctccagcgcactaatcggcgaccttctgttttgggtttccacggtcacgagtatagttgttcaactatcgttgtatttctagctatcctttagtgtgtgtgggttcgtgtggcattgtatgaggtttttatcctcaccttttcttcttaatataatgatacgcagctctcctgcgttttcgaaaaaaaaactccatgaaaaagcaactcatttttaggccatgcaattctacttttagagatgttttctgtgttgccacatttatttggatctgatttgaacatgataacacaaaaagcctttcctgttgtggaaatataaaaaaacttgcccggggagggtaagaccaccttcgcgttatcttcttaatagaaggccacgacaatggttccgacttagaaaatcctgaaacatgtccttccatcactaacaggccgggtcaagctgcccactttgcaaaggcccatctaggcccgagggtggcgcacagctaaaccgtaacccgagagcgggcaaggaacatcgagaggattttttggtgtagggtcaggagtcgaacccgtgacctggtgaaagggaccacaccaccttcaccaccgaggatagaatcagaaaagggtgtgttcattaccaatcactcattatcagttacattcaacgggtcatttgaccatatgagtatcgactcaactagtgttcaaacattggaaattattgaccctctccatactgaactttggggcactagcaacaaaaagaaaagcctctttcagatgctaaagactacaaagactacaggagggtctagattgttgaaagctaacttattacaaccattaaaagatattcagaccatcaatgctcgtctagattgcttggatgagctaatgagcaatgaggagctgttttttggtttgactcaaggtctacggaaatttccaaaagaatcagataaggttctctgtcatttctgcttcaagcccaaaaaggtcacagataaggtattgaagcctgccaatggtagaaagagccagatgttgatttctgatattattgtccttaaaactgctctggacgccataccattcttatcgaaggttttgaagggggcaaagagttttcttcttcacaacatctatcagactgtatgtgaaaaccctaagtatgctaatatgagaaagagaattggagatgtcattgacgaggatgtggttcattcaagggctccatttgtagcctgcactcaacaatgttttgctgttaaggcaggaattgatggtctgcttgatgttgctcgtcgatctttctgtgataccagtgaagccatacataacctcgccaaaaagtacagggatgattataatatgccaaatttgaagataacctataatattaggcaaggattttactttattattccccaaaaggacatcaccgataggcttcctaataaatttatccaggttgttagacatgggaagaatctccattgctcaagcttggaacttgcttcactgaatgttaggaacaagtcgtctgctgctgagtgcttctcgcgcacggaactttgtttggaagggcttattgacaaaatcagaggagacattgctatccttacattgctcgccgaagtattatgtcttttggacatgattgtaaattcttttgcgcatacaatatctacaaagcctgttgatcgctacacaagaccagagttcacagatgatggtccaatggcaatcaatgctggacgacaccctattcttgagaccttgcatactaattttgttcctaacaatatatttctctctgaagcatctaatatggttcttgtcatggggccaaatatgagcgggaaaagcacatatctccaacagatatgtttaattgtcattcttgcacaaattggctgttatgttccagctcagtttgcatccttaagagttcttgatcgtatatttacacggattggtaacggggacaatgttgagaacaactcgagtacgtttatgacagaaatgaaagaaactgctttcatcatgcaaaatgtttcttcaaggagtttggttgttgtggatgaacttggaagagcaacatcttcctcagatgggttggcaatcgcatggagttgctgtgaataccttctttctgtgaaagcatacactgtttttgccacgcacatggaacgcttgtcagaactttcaacaatgtatccaaatgtgaagatcctccattttgaggttgacttgagaaatgaccgcttggatttcaagttctgcctaaaggatggcatccgacgggtaccacactatgggcttctgctggccagagtagctggtatccctacttcggtgatcgacacttcaacaagtatcacttcacagatcacagagcaggaaatgacaaggatgaatgccaattgcgaggagtactggtcgcttcagatgacgtaccaggttgtgcagcggcttatctgcctgaagtactcgaaccatggcgacgactacatccgtgaagcactgcagaatctcaaggagagctattctgcgggccggctaacataagaggtctcatcagtgtatgccgctggaggatccataagccaatgtatatattcctccgtcaatgtgatactatcttaggtcctcaaacgcacatctatcgttatcgcacatgccatgtaacatcttatcccctattcatatagatgatcacgaagcaagacagcatgtgaatgtttagaacaagtgattattatgacctcagccacatagcttttacgaaaagatttactggaatatatggaacaccaaagtaggagattagagtggtcgatacatacaaactgtaggtttgaacagcaaatgttggcattgttttctgccaatacattaatcgatacagtagcatgagaggaggaggagcacagaaggcggcctagaccacacaagagagcgggaggtagtgtggagccgagcaggacaagaattcatgagggacaaaaaaaaaatgtatggcaaaatcattcattgtcataaaaaacttgtgttttatataatttcagtttcatgtcaatgtatcaataaaataagcaaatataccgttaagtttttgttgaccgagacaattccaaccaatcaactatttatataatctagatatttatctcaatctatcaataatcaatccaattatccaagtgtcaaatgcaaactctactgctattgtgtcgtctggaagaagctgcatgccttcccatcgtgccggaaagactgaaggggcatgctcctgctgactggaaaggcagggcgtgcttgggagcagacagcaggaaccggcttggggcggggacgccgccatgccaggagcccaggaagggagcggacagcaaggacgggcttggggcggggacgccgccatgccaggagcccaggaagggagcggacagcaaggacgggccgccgccatgccaggagcccaggaagggagcggacagcaaggacgggcttggggcggggacgccgccatgccaggagcccaggaagggagcggacagcaaggacgggcttggggcggcgtgcgcgttctccacgtcggcgtcgggaagtagcggacttaccgagccggcatacgagagtagcaagccagagtgtcggcgttag

SEQ ID NO: 22388 - DNA, 1779 bp, Zea Mays
cggatacataatatccgtatccgtataaatatccgatatccgcttccaagcggtcattccattccgtcacatattcccgagaaaaaccgtcattcgcgcgcacacgcggtcgcagctgcggtgcccggctcaacgccgcggagatggagggcgacgccaccggagctgacggaggaggcggaggaggaagtggtgagcgttctagcttcgtgatcggcctcatcgagaaccgtgccaaggaggttggtgttgcagcctttgatttaagatcagcctcattgcacctatctcagtatatcgagacaagttgctcatatcacaatacaaatacactacttcatttctatgatcccatggttgtcattgtgcccccaaacaaaacagcagcagatggtatggttggagtttcagaactgatcgataaacattacccagcaaacaaaaaggtcactatggcacgtggttgctttgatgacacaaagggtgctgtcattgtaagaagtctttcagctagggacccatctgctcttggtttagatacttactgcaagcagtattatctttgtcttgcggctgccactgcaacaattaaatggatagaatcagaaaagggtgtgttcattaccaatcactcattatcagttacattcaacgggtcatttgaccatatgagtatcgactcaactagtgttcaaacattggaaattattgaccctctccatactgaactttggggcactagcaacaaaaagaaaagcctctttcagatgctaaagactacaaagactacaggagggtctagattgttgaaagctaacttattacaaccattaaaagatattcagaccatcaatgctcgtctagattgcttggatgagctaatgagcaatgaggagctgttttttggtttgactcaaggtctacggaaatttccaaaagaatcagataaggttctctgtcatttctgcttcaagcccaaaaaggtcacagataaggtattgaagcctgccaatggtagaaagagccagatgttgatttctgatattattgtccttaaaactgctctggacgccataccattcttatcgaaggttttgaagggggcaaagagttttcttcttcacaacatctatcagactgtatgtgaaaaccctaagtatgctaatatgagaaagagaattggagatgtcattgacgaggatgtggttcattcaagggctccatttgtagcctgcactcaacaatgttttgctgttaaggcaggaattgatggtctgcttgatgttgctcgtcgatctttctgtgataccagtgaagccatacataacctcgccaaaaagtacagggatgattataatatgccaaatttgaagataacctataatattaggcaaggattttactttattattccccaaaaggacatcaccgataggcttcctaataaatttatccaggttgttagacatgggaagaatctccattgctcaagcttggaacttgcttcactgaatgttaggaacaagtcgtctgctgctgagtgcttctcgcgcacggaactttgtttggaagggcttattgacaaaatcagaggagacattgctatccttacattgctcgccgaagtattatgtcttttggacatgattgtaaattcttttgcgcatacaatatctacaaagcctgttgatcgctacacaagaccagagttcacaggcataaaaaggagaatctcaacaaaacatcctcagttaaactctggacaatatttgaaatgag

SEQ ID NO: 22389 - DNA, 847 bp, Zea Mays
attccattccgtcacatattcccgagaaaaaccgtcattcgcgcgcacacgcggtcgcagctgcggtgcccggctcaacgccgcggagatggagggcgacgccaccggagctgacggaggaggcggaggaggaagtggtgagcgttctagcttcgtgatcggcctcatcgagaaccgtgccaaggagcagcagatggtatggttggagtttcagaactgatcgataaacattacccagcaaacaaaaaggtcactatggcacgtggttgctttgatgacacaaagggtgctgtcattgtaagaagtctttcagctagggacccatctgctcttggtttagatacttactgcaagcagtattatctttgtcttgcggctgccactgcaacaattaaatggttaggccttgtttccaattgttccaatggttactggagcataaaagtcatcaagtgggtcaaggaggagtctcacctctggtgtagggctggagccagtggattagatagcatcctttccgctccagcgcactaatcggcgaccttctgttttgggtttccacggtcacgagtatagttgttcaactatcgttgtatttctagctatcctttagtgtgtgtgggttcgtgtggcattgtatgaggtttttatcctcaccttttcttcttaatataatgatacgcagctctcctgcgttttcgaaaaaaaaactccatgaaaaagcaactcatttttaggccatgcaattctacttttagagatgttttctgtgttgccacatttatttggatctgatttgaacatgataacacaaaaagcctttcctgttgtggaaatataaaaaaac

SEQ ID NO: 22390 - DNA, 976 bp, Zea Mays
attccattccgtcacatattcccgagaaaaaccgtcattcgcgcgcacacgcggtcgcagctgcggtgcccggctcaacgccgcggagatggagggcgacgccaccggagctgacggaggaggcggaggaggaagtggtgagcgttctagcttcgtgatcggcctcatcgagaaccgtgccaaggagcctttgatttaagatcagcctcattgcacctatctcagtatatcgagacaagttgctcatatcacaatacaaatacactacttcatttctatgatcccatggttgtcattgtgcccccaaacaaaacagcagcagatggtatggttggagtttcagaactgatcgataaacattacccagcaaacaaaaaggtcactatggcacgtggttgctttgatgacacaaagggtgctgtcattgtaagaagtctttcagctagggacccatctgctcttggtttagatacttactgcaagcagtattatctttgtcttgcggctgccactgcaacaattaaatggttaggccttgtttccaattgttccaatggttactggagcataaaagtcatcaagtgggtcaaggaggagtctcacctctggtgtagggctggagccagtggattagatagcatcctttccgctccagcgcactaatcggcgaccttctgttttgggtttccacggtcacgagtatagttgttcaactatcgttgtatttctagctatcctttagtgtgtgtgggttcgtgtggcattgtatgaggtttttatcctcaccttttcttcttaatataatgatacgcagctctcctgcgttttcgaaaaaaaaactccatgaaaaagcaactcatttttaggccatgcaattctacttttagagatgttttctgtgttgccacatttatttggatctgatttgaacatgataacacaaaaagcctttcctgttgtggaaatataaaaaaac

SEQ ID NO: 22391 - DNA, 844 bp, Zea Mays
attccattccgtcacatattcccgagaaaaaccgtcattcgcgcgcacacgcggtcgcagctgcggtgcccggctcaacgccgcggagatggagggcgacgccaccggagctgacggaggaggcggaggaggaagtggtgagcgttctagcttcgtgatcggcctcatcgagaaccgtgccaaggagcagatggtatggttggagtttcagaactgatcgataaacattacccagcaaacaaaaaggtcactatggcacgtggttgctttgatgacacaaagggtgctgtcattgtaagaagtctttcagctagggacccatctgctcttggtttagatacttactgcaagcagtattatctttgtcttgcggctgccactgcaacaattaaatggttaggccttgtttccaattgttccaatggttactggagcataaaagtcatcaagtgggtcaaggaggagtctcacctctggtgtagggctggagccagtggattagatagcatcctttccgctccagcgcactaatcggcgaccttctgttttgggtttccacggtcacgagtatagttgttcaactatcgttgtatttctagctatcctttagtgtgtgtgggttcgtgtggcattgtatgaggtttttatcctcaccttttcttcttaatataatgatacgcagctctcctgcgttttcgaaaaaaaaactccatgaaaaagcaactcatttttaggccatgcaattctacttttagagatgttttctgtgttgccacatttatttggatctgatttgaacatgataacacaaaaagcctttcctgttgtggaaatataaaaaaac

SEQ ID NO: 22392 - DNA, 2070 bp, Zea Mays
attccattccgtcacatattcccgagaaaaaccgtcattcgcgcgcacacgcggtcgcagctgcggtgcccggctcaacgccgcggagatggagggcgacgccaccggagctgacggaggaggcggaggaggaagtggtgagcgttctagcttcgtgatcggcctcatcgagaaccgtgccaaggaggttggtgttgcagcctttgatttaagatcagcctcattgcacctatctcagtatatcgagacaagttgctcatatcacaatacaaatacactacttcatttctatgatcccatggttgtcattgtgcccccaaacaaaacagcagcagatggtatggttggagtttcagaactgatcgataaacattacccagcaaacaaaaaggtcactatggcacgtggttgctttgatgacacaaagggtgctgtcattgtaagaagtctttcagctagggacccatctgctcttggtttagatacttactgcaagcagtattatctttgtcttgcggctgccactgcaacaattaaatggatagaatcagaaaagggtgtgttcattaccaatcactcattatcagttacattcaacgggtcatttgaccatatgagtatcgactcaactagtgttcaaacattggaaattattgaccctctccatactgaactttggggcactagcaacaaaaagaaaagcctctttcagatgctaaagactacaaagactacaggagggtctagattgttgaaagctaacttattacaaccattaaaagatattcagaccatcaatgctcgtctagattgcttggatgagctaatgagcaatgaggagctgttttttggtttgactcaaggtctacggaaatttccaaaagaatcaggttttgaagggggcaaagagttttcttcttcacaacatctatcagactgtatgtgaaaaccctaagtatgctaatatgagaaagagaattggagatgtcattgacgaggatgtggttcattcaagggctccatttgtagcctgcactcaacaatgttttgctgttaaggcaggaattgatggtctgcttgatgttgctcgtcgatctttctgtgataccagtgaagccatacataacctcgccaaaaagtacagggatgattataatatgccaaatttgaagataacctataatattaggcaaggattttactttattattccccaaaaggacatcaccgataggcttcctaataaatttatccaggttgttagacatgggaagaatctccattgctcaagcttggaacttgcttcactgaatgttaggaacaagtcgtctgctgctgagtgcttctcgcgcacggaactttgtttggaaggtttctgtagtaattaagcactgatattttttatttcatttagctcttggtcttagtcatccgtagcgctgtgttactttttttggttgactttaaaaatacacggaccaagcagaacttagttttttctgaggagataaaactataagcttctactttttttttcttgaacgcgcaggagaactgcatatcattatattaagaagaaaaaaggagaactgcatatcattataagcttttacttagtgatatataacatgttcattttttctggaacacacaggtgtgtatcagtgcattattaaaagagagttacaacaaacacaacctagtgaaaaaacaactacattagcacccatccaggcagttggtccccatactccccaacctgatgtgcgatctttgtctgcctggtggtgttgtgcagccagcagtttgccaaaggagaagaggaaagggtttacttccctagtcatccttgtggcctggactctttggaagcataggaaagagtcttaatcctagtgtccctttagtctgccaagaagttggtaaggagaccaagctttgttgtcttgctggtaacacggcactcaaggagctgcttggtggggcgcgtaggctgcacacctaagtttgtcatgtagggtcatttgtttgtcattgcgtgtggcacacttgttctctagagtgttggtg

SEQ ID NO: 22393 - DNA, 1355 bp, Zea Mays
attccattccgtcacatattcccgagaaaaaccgtcattcgcgcgcacacgcggtcgcagctgcggtgcccggctcaacgccgcggagatggagggcgacgccaccggagctgacggaggaggcggaggaggaagtggtgagcgttctagcttcgtgatcggcctcatcgagaaccgtgccaaggaggttggtgttgcagcctttgatttaagatcagcctcattgcacctatctcagtatatcgagacaagttgctcatatcacaatacaaatacactacttcatttctatgatcccatggttgtcattgtgcccccaaacaaaacagcagcagatggtatggttggagtttcagaactgatcgataaacattacccagcaaacaaaaaggtcactatggcacgtggttgctttgatgacacaaagggtgctgtcattgtaagaagtctttcagctagggacccatctgctcttggtttagatacttactgcaagcagtattatctttgtcttgcggctgccactgcaacaattaaatggatagaatcagaaaagggtgtgttcattaccaatcactcattatcagttacattcaacgggtcatttgaccatatgagtatcgactcaactagtgttcaaacattggaaattattgaccctctccatactgaactttggggcactagcaacaaaaagaaaagcctctttcagatgctaaagactacaaagactacaggagggtctagattgttgaaagctaacttattacaaccattaaaagatattcagaccatcaatgctcgtctagattgcttgaattggagatgtcattgacgaggatgtggttcattcaagggctccatttgtagcctgcactcaacaatgttttgctgttaaggcaggaattgatggtctgcttgatgttgctcgtcgatctttctgtgataccagtgaagccatacataacctcgccaaaaagtacagggatgattataatatgccaaatttgaagataacctataatattaggcaaggattttactttattattccccaaaaggacatcaccgataggcttcctaataaatttatccaggttgttagacatgggaagaatctccattgctcaagcttggaacttgcttcaggcttattgacaaaatcagaggagacattgctatccttacattgctcgccgaagtattatgtcttttggacatgattgtaaattcttttgcgcatacaatatctacaaagcctgttgatcgctacacaagaccagagttcacaggcataaaaaggagaatctcaacaaaacatcctcagttaaactctggacaatatttgaaatgag

SEQ ID NO: 22394 - DNA, 2282 bp, Zea Mays
attccattccgtcacatattcccgagaaaaaccgtcattcgcgcgcacacgcggtcgcagctgcggtgcccggctcaacgccgcggagatggagggcgacgccaccggagctgacggaggaggcggaggaggaagtggtgagcgttctagcttcgtgatcggcctcatcgagaaccgtgccaaggaggttggtgttgcagcctttgatttaagatcagcctcattgcacctatctcagtatatcgagacaagttgctcatatcacaatacaaatacactacttcatttctatgatcccatggttgtcattgtgcccccaaacaaaacagcagcagatggtatggttggagtttcagaactgatcgataaacattacccagcaaacaaaaaggtcactatggcacgtggttgctttgatgacacaaagggtgctgtcattgtaagaagtctttcagctagggacccatctgctcttggtttagatacttactgcaagcagtattatctttgtcttgcggctgccactgcaacaattaaatggatagaatcagaaaagggtgtgttcattaccaatcactcattatcagttacattcaacgggtcatttgaccatatgagtatcgactcaactagtgttcaaacattggaaattattgaccctctccatactgaactttggggcactagcaacaaaaagaaaagcctctttcagatgctaaagactacaaagactacaggagggtctagattgttgaaagctaacttattacaaccattaaaagatattcagaccatcaatgctcgtctagattgcttggatgagctaatgagcaatgaggagctgttttttggtttgactcaaggtctacggaaatttccaaaagaatcaggttttgaagggggcaaagagttttcttcttcacaacatctatcagactgtatgtgaaaaccctaagtatgctaatatgagaaagagaattggagatgtcattgacgaggatgtggttcattcaagggctccatttgtagcctgcactcaacaatgttttgctgttaaggcaggaattgatggtctgcttgatgttgctcgtcgatctttctgtgataccagtgaagccatacataacctcgccaaaaagtacagggatgattataatatgccaaatttgaagataacctataatattaggcaaggattttactttattattccccaaaaggacatcaccgataggcttcctaataaatttatccaggttgttagacatgggaagaatctccattgctcaagcttggaacttgcttcactgaatgttaggaacaagtcgtctgctgctgagtgcttctcgcgcacggaactttgtttggaagggcttattgacaaaatcagaggagacattgctatccttacattgctcgccgaagtattatgtcttttggacatgattgtaaattcttttgcgcatacaatatctacaaagcctgttgatcgctacacaagaccagagttcacagatgatggtccaatggcaatcaatgctggacgacaccctattcttgagaccttgcatactaattttgttcctaacaatatatttctctctgaagcatctaatatggttcttgtcatggggccaaatatgagcgggaaaagcacatatctccaacagatatgtttaattgtcattcttgcacaaattggctgttatgttccagctcagtttgcatccttaagagttcttgatcgtatatttacacggattggtaacggggacaatgttgagaacaactcgagtacggatagcctggatctattctacatgatatcaagattcctcggacggtagggaaagactgcccccgggtatcgtattaagaagctcaatcggagcctcgatcgagaagggtcacgaaaactgcctctcccctgtgtagcatgagggtccgccccctataggctagatatttactcatgctttgagccctcccagctcctacacaaggattcacccccataggtcagtccatctcgtgtgcacacaaccagtgaaacgagtgaccttttcttaacctcaacctaaaatttgctcccactggaatttgaactcaggtcctgaggagtgctactcagaccacctaaccaactcagctagagaccctttcgcacttgatatcaagatatcaatgttgtttattgtgccttgttgtacaaactgttcatggagttacaaaggtattctggaaatacatgaatggagaatggtagtatccttatatctaac

SEQ ID NO: 22395 - DNA, 2213 bp, Zea Mays
attccattccgtcacatattcccgagaaaaaccgtcattcgcgcgcacacgcggtcgcagctgcggtgcccggctcaacgccgcggagatggagggcgacgccaccggagctgacggaggaggcggaggaggaagtggtgagcgttctagcttcgtgatcggcctcatcgagaaccgtgccaaggaggttggtgttgcagcctttgatttaagatcagcctcattgcacctatctcagtatatcgagacaagttgctcatatcacaatacaaatacactacttcatttctatgatcccatggttgtcattgtgcccccaaacaaaacagcagcagatggtatggttggagtttcagaactgatcgataaacattacccagcaaacaaaaaggtcactatggcacgtggttgctttgatgacacaaagggtgctgtcattgtaagaagtctttcagctagggacccatctgctcttggtttagatacttactgcaagcagtattatctttgtcttgcggctgccactgcaacaattaaatggatagaatcagaaaagggtgtgttcattaccaatcactcattatcagttacattcaacgggtcatttgaccatatgagtatcgactcaactagtgttcaaacattggaaattattgaccctctccatactgaactttggggcactagcaacaaaaagaaaagcctctttcagatgctaaagactacaaagactacaggagggatgagctaatgagcaatgaggagctgttttttggtttgactcaaggtctacggaaatttccaaaagaatcaggttttgaagggggcaaagagttttcttcttcacaacatctatcagactgtatgtgaaaaccctaagtatgctaatatgagaaagagaattggagatgtcattgacgaggatgtggttcattcaagggctccatttgtagcctgcactcaacaatgttttgctgttaaggcaggaattgatggtctgcttgatgttgctcgtcgatctttctgtgataccagtgaagccatacataacctcgccaaaaagtacagggatgattataatatgccaaatttgaagataacctataatattaggcaaggattttactttattattccccaaaaggacatcaccgataggcttcctaataaatttatccaggttgttagacatgggaagaatctccattgctcaagcttggaacttgcttcactgaatgttaggaacaagtcgtctgctgctgagtgcttctcgcgcacggaactttgtttggaagggcttattgacaaaatcagaggagacattgctatccttacattgctcgccgaagtattatgtcttttggacatgattgtaaattcttttgcgcatacaatatctacaaagcctgttgatcgctacacaagaccagagttcacagatgatggtccaatggcaatcaatgctggacgacaccctattcttgagaccttgcatactaattttgttcctaacaatatatttctctctgaagcatctaatatggttcttgtcatggggccaaatatgtgagtggagcgggaaaagcacatatctccaacagatatgtttaattgtcattcttgcacaaattggctgttatgttccagctcagtttgcatccttaagagttcttgatcgtatatttacacggattggtaacggggacaatgttgagaacaactcgagtacggatagcctggatctattctacatgatatcaagattcctcggacggtagggaaagactgcccccgggtatcgtattaagaagctcaatcggagcctcgatcgagaagggtcacgaaaactgcctctcccctgtgtagcatgagggtccgccccctataggctagatatttactcatgctttgagccctcccagctcctacacaaggattcacccccataggtcagtccatctcgtgtgcacacaaccagtgaaacgagtgaccttttcttaacctcaacctaaaatttgctcccactggaatttgaactcaggtcctgaggagtgctactcagaccacctaaccaactcagctagagaccctttcgcacttgatatcaagatatcaatgttgtttattgtgccttgttgtacaaactgttcatggagttacaaaggtattctggaaatacatgaatggagaatggtagtatccttatatctaac

SEQ ID NO: 22396 - DNA, 3692 bp, Zea Mays
attccattccgtcacatattcccgagaaaaaccgtcattcgcgcgcacacgcggtcgcagctgcggtgcccggctcaacgccgcggagatggagggcgacgccaccggagctgacggaggaggcggaggaggaagtggtgagcgttctagcttcgtgatcggcctcatcgagaaccgtgccaaggaggttggtgttgcagcctttgatttaagatcagcctcattgcacctatctcagtatatcgagacaagttgctcatatcacaatacaaatacactacttcatttctatgatcccatggttgtcattgtgcccccaaacaaaacagcagcagatggtatggttggagtttcagaactgatcgataaacattacccagcaaacaaaaaggtcactatggcacgtggttgctttgatgacacaaagggtgctgtcattgtaagaagtctttcagctagggacccatctgctcttggtttagatacttactgcaagcagtattatctttgtcttgcggctgccactgcaacaattaaatggatagaatcagaaaagggtgtgttcattaccaatcactcattatcagttacattcaacgggtcatttgaccatatgagtatcgactcaactagtgttcaaacattggaaattattgaccctctccatactgaactttggggcactagcaacaaaaagaaaagcctctttcagatgctaaagactacaaagactacaggagggtctagattgttgaaagctaacttattacaaccattaaaagatattcagaccatcaatgctcgtctagattgcttggatgagctaatgagcaatgaggagctgttttttggtttgactcaaggtctacggaaatttccaaaagaatcagataaggttctctgtcatttctgcttcaagcccaaaaaggtcacagataaggtattgaagcctgccaatggtagaaagagccagatgttgatttctgatattattgtccttaaaactgctctggacgccataccattcttatcgaaggttttgaagggggcaaagagttttcttcttcacaacatctatcagactgtatgtgaaaaccctaagtatgctaatatgagaaagagaattggagatgtcattgacgaggatgtggttcattcaagggctccatttgtagcctgcactcaacaatgttttgctgttaaggcaggaattgatggtctgcttgatgttgctcgtcgatctttctgtgataccagtgaagccatacataacctcgccaaaaagtacagggatgattataatatgccaaatttgaagataacctataatattaggcaaggattttactttattattccccaaaaggacatcaccgataggcttcctaataaatttatccaggttgttagacatgggaagaatctccattgctcaagcttggaacttgcttcactgaatgttaggaacaagtcgtctgctgctgagtgcttctcgcgcacggaactttgtttggaagggcttattgacaaaatcagaggagacattgctatccttacattgctcgccgaagtattatgtcttttggacatgattgtaaattcttttgcgcatacaatatctacaaagcctgttgatcgctacacaagaccagagttcacagatgatggtccaatggcaatcaatgctggacgacaccctattcttgagaccttgcatactaattttgttcctaacaatatatttctctctgaagcatctaatatggttcttgtcatggggccaaatatgagcgggaaaagcacatatctccaacagatatgtttaattgtcattcttgcacaaattggctgttatgttccagctcagtttgcatccttaagagttcttgatcgtatatttacacggattggtaacggggacaatgttgagaacaactcgagtacggtatgtttatgacagaaatgaaagaaactgctttcatcatgcaaaatgtttcttcaaggagtttggttgttgtggatgaacttggaagagcaacatcttcctcagatgggttggcaatcgcatggagttgctgtgaataccttctttctgtgaaagcatacactgtttttgccacgcacatggaacgcttgtcagaactttcaacaatgtatccaaatgtgaagatcctccattttgaggttgacttgagaaatgaccgcttggatttcaagttctgcctaaaggatggcatccgacgggtaccacactatgggcttctgctggccagagtagctggtatccctacttcggtgatcgacacttcaacaagtatcacttcacagatcacagagcaggaaatgacaaggatgaatgccaattgcgaggagtactggtcgcttcagatgacgtaccaggttgtgcagcggcttatctgcctgaagtactcgaaccatggcgacgactacatccgtgaagcactgcagaatctcaaggagagctattctgcgggccggctaacataagaggtctcatcagtatgagctctggcccttaataaatgttaaataagagtttttcgattgcatggtgttcgttcgcgacatgttttgttgttttgcaggtgtatgccgctggaggatccataagccaatgtatatattcctccgtcaatgtgatactatcttaggtcctcaaacgcacatctatcgttatcgcacatgccatgtaacatcttatcccctattcatatagatgatcacgaagcaagacagcatgtgaatgtttagaacaagtgattattatgacctcagccacatagcttttacgaaaagatttactggaatatatggaacaccaaagtaggagattagagtggtcgatacatacaaactgtaggtttgaacagcaaatgttggcattgttttctgccaatacattaatcgatacagtagcatgagaggaggaggagcacagaaggcggcctagaccacacaagagagcgggaggtagtgtggagccgagcaggacaagaattcatgagggacaaaaaaaaaatgtatggcaaaatcattcattgtcataaaaaacttgtgttttatataatttcagtttcatgtcaatgtatcaataaaataagcaaatataccgttaagtttttgttgaccgagacaattccaaccaatcaactatttatataatctagatatttatctcaatctatcaataatcaatccaattatccaagtgtcaaatgcaaactctactgctattgtgtcgtctggaagaagctgcatgccttcccatcgtgccggaaagactgaaggggcatgctcctgctgactggaaaggcagggcgtgcttgggagcagacagcaggaaccggcttggggcggggacgccgccatgccaggagcccaggaagggagcggacagcaaggacgggcttggggcggggacgccgccatgccaggagcccaggaagggagcggacagcaaggacgggccgccgccatgccaggagcccaggaagggagcggacagcaaggacgggcttggggcggggacgccgccatgccaggagcccaggaagggagcggacagcaaggacgggcttggggcggcgtgcgcgttctccacgtcggcgtcgggaagtagcggacttaccgagccggcatacgagagtagcaagccagagtgtcggcgttag

SEQ ID NO: 22397 - DNA, 3537 bp, Zea Mays
attccattccgtcacatattcccgagaaaaaccgtcattcgcgcgcacacgcggtcgcagctgcggtgcccggctcaacgccgcggagatggagggcgacgccaccggagctgacggaggaggcggaggaggaagtggtgagcgttctagcttcgtgatcggcctcatcgagaaccgtgccaaggaggttggtgttgcagcctttgatttaagatcagcctcattgcacctatctcagtatatcgagacaagttgctcatatcacaatacaaatacactacttcatttctatgatcccatggttgtcattgtgcccccaaacaaaacagcagcagatggtatggttggagtttcagaactgatcgataaacattacccagcaaacaaaaaggtcactatggcacgtggttgctttgatgacacaaagggtgctgtcattgtaagaagtctttcagctagggacccatctgctcttggtttagatacttactgcaagcagtattatctttgtcttgcggctgccactgcaacaattaaatggatagaatcagaaaagggtgtgttcattaccaatcactcattatcagttacattcaacgggtcatttgaccatatgagtatcgactcaactagtgttcaaacattggaaattattgaccctctccatactgaactttggggcactagcaacaaaaagaaaagcctctttcagatgctaaagactacaaagactacaggagggtctagattgttgaaagctaacttattacaaccattaaaagatattcagaccatcaatgctcgtctagattgcttggatgagctaatgagcaatgaggagctgttttttggtttgactcaaggtctacggaaatttccaaaagaatcagataaggttctctgtcatttctgcttcaagcccaaaaaggtcacagataaggtattgaagcctgccaatggtagaaagagccagatgttgatttctgatattattgtccttaaaactgctctggacgccataccattcttatcgaaggttttgaagggggcaaagagttttcttcttcacaacatctatcagactgtatgtgaaaaccctaagtatgctaatatgagaaagagaattggagatgtcattgacgaggatgtggttcattcaagggctccatttgtagcctgcactcaacaatgttttgctgttaaggcaggaattgatggtctgcttgatgttgctcgtcgatctttctgtgataccagtgaagccatacataacctcgccaaaaagtacagggatgattataatatgccaaatttgaagataacctataatattaggcaaggattttactttattattccccaaaaggacatcaccgataggcttcctaataaatttatccaggttgttagacatgggaagaatctccattgctcaagcttggaacttgcttcaggcttattgacaaaatcagaggagacattgctatccttacattgctcgccgaagtattatgtcttttggacatgattgtaaattcttttgcgcatacaatatctacaaagcctgttgatcgctacacaagaccagagttcacagatgatggtccaatggcaatcaatgctggacgacaccctattcttgagaccttgcatactaattttgttcctaacaatatatttctctctgaagcatctaatatggttcttgtcatggggccaaatatgagcgggaaaagcacatatctccaacagatatgtttaattgtcattcttgcacaaattggctgttatgttccagctcagtttgcatccttaagagttcttgatcgtatatttacacggattggtaacggggacaatgttgagaacaactcgagtacgtttatgacagaaatgaaagaaactgctttcatcatgcaaaatgtttcttcaaggagtttggttgttgtggatgaacttggaagagcaacatcttcctcagatgggttggcaatcgcatggagttgctgtgaataccttctttctgtgaaagcatacactgtttttgccacgcacatggaacgcttgtcagaactttcaacaatgtatccaaatgtgaagatcctccattttgaggttgacttgagaaatgaccgcttggatttcaagttctgcctaaaggatggcatccgacgggtaccacactatgggcttctgctggccagagtagctggtatccctacttcggtgatcgacacttcaacaagtatcacttcacagatcacagagcaggaaatgacaaggatgaatgccaattgcgaggagtactggtcgcttcagatgacgtaccaggttgtgcagcggcttatctgcctgaagtactcgaaccatggcgacgactacatccgtgaagcactgcagaatctcaaggagagctattctgcgggccggctaacataagaggtctcatcagtgtatgccgctggaggatccataagccaatgtatatattcctccgtcaatgtgatactatcttaggtcctcaaacgcacatctatcgttatcgcacatgccatgtaacatcttatcccctattcatatagatgatcacgaagcaagacagcatgtgaatgtttagaacaagtgattattatgacctcagccacatagcttttacgaaaagatttactggaatatatggaacaccaaagtaggagattagagtggtcgatacatacaaactgtaggtttgaacagcaaatgttggcattgttttctgccaatacattaatcgatacagtagcatgagaggaggaggagcacagaaggcggcctagaccacacaagagagcgggaggtagtgtggagccgagcaggacaagaattcatgagggacaaaaaaaaaatgtatggcaaaatcattcattgtcataaaaaacttgtgttttatataatttcagtttcatgtcaatgtatcaataaaataagcaaatataccgttaagtttttgttgaccgagacaattccaaccaatcaactatttatataatctagatatttatctcaatctatcaataatcaatccaattatccaagtgtcaaatgcaaactctactgctattgtgtcgtctggaagaagctgcatgccttcccatcgtgccggaaagactgaaggggcatgctcctgctgactggaaaggcagggcgtgcttgggagcagacagcaggaaccggcttggggcggggacgccgccatgccaggagcccaggaagggagcggacagcaaggacgggcttggggcggggacgccgccatgccaggagcccaggaagggagcggacagcaaggacgggccgccgccatgccaggagcccaggaagggagcggacagcaaggacgggcttggggcggggacgccgccatgccaggagcccaggaagggagcggacagcaaggacgggcttggggcggcgtgcgcgttctccacgtcggcgtcgggaagtagcggacttaccgagccggcatacgagagtagcaagccagagtgtcggcgttag

SEQ ID NO: 22398 - DNA, 3688 bp, Zea Mays
attccattccgtcacatattcccgagaaaaaccgtcattcgcgcgcacacgcggtcgcagctgcggtgcccggctcaacgccgcggagatggagggcgacgccaccggagctgacggaggaggcggaggaggaagtggtgagcgttctagcttcgtgatcggcctcatcgagaaccgtgccaaggaggttggtgttgcagcctttgatttaagatcagcctcattgcacctatctcagtatatcgagacaagttgctcatatcacaatacaaatacactacttcatttctatgatcccatggttgtcattgtgcccccaaacaaaacagcagcagatggtatggttggagtttcagaactgatcgataaacattacccagcaaacaaaaaggtcactatggcacgtggttgctttgatgacacaaagggtgctgtcattgtaagaagtctttcagctagggacccatctgctcttggtttagatacttactgcaagcagtattatctttgtcttgcggctgccactgcaacaattaaatggatagaatcagaaaagggtgtgttcattaccaatcactcattatcagttacattcaacgggtcatttgaccatatgagtatcgactcaactagtgttcaaacattggaaattattgaccctctccatactgaactttggggcactagcaacaaaaagaaaagcctctttcagatgctaaagactacaaagactacaggagggtctagattgttgaaagctaacttattacaaccattaaaagatattcagaccatcaatgctcgtctagattgcttggatgagctaatgagcaatgaggagctgttttttggtttgactcaaggtctacggaaatttccaaaagaatcagataaggttctctgtcatttctgcttcaagcccaaaaaggtcacagataaggtattgaagcctgccaatggtagaaagagccagatgttgatttctgatattattgtccttaaaactgctctggacgccataccattcttatcgaaggttttgaagggggcaaagagttttcttcttcacaacatctatcagactgtatgtgaaaaccctaagtatgctaatatgagaaagagaattggagatgtcattgacgaggatgtggttcattcaagggctccatttgtagcctgcactcaacaatgttttgctgttaaggcaggaattgatggtctgcttgatgttgctcgtcgatctttctgtgataccagtgaagccatacataacctcgccaaaaagtacagggatgattataatatgccaaatttgaagataacctataatattaggcaaggattttactttattattccccaaaaggacatcaccgataggcttcctaataaatttatccaggttgttagacatgggaagaatctccattgctcaagcttggaacttgcttcactgaatgttaggaacaagtcgtctgctgctgagtgcttctcgcgcacggaactttgtttggaagggcttattgacaaaatcagaggagacattgctatccttacattgctcgccgaagtattatgtcttttggacatgattgtaaattcttttgcgcatacaatatctacaaagcctgttgatcgctacacaagaccagagttcacagatgatggtccaatggcaatcaatgctggacgacaccctattcttgagaccttgcatactaattttgttcctaacaatatatttctctctgaagcatctaatatggttcttgtcatggggccaaatatgagcgggaaaagcacatatctccaacagatatgtttaattgtcattcttgcacaaattggctgttatgttccagctcagtttgcatccttaagagttcttgatcgtatatttacacggattggtaacggggacaatgttgagaacaactcgagtacgtttatgacagaaatgaaagaaactgctttcatcatgcaaaatgtttcttcaaggagtttggttgttgtggatgaacttggaagagcaacatcttcctcagatgggttggcaatcgcatggagttgctgtgaataccttctttctgtgaaagcgatacactgtttttgccacgcacatggaacgcttgtcagaactttcaacaatgtatccaaatgtgaagatcctccattttgaggttgacttgagaaatgaccgcttggatttcaagttctgcctaaaggatggcatccgacgggtaccacactatgggcttctgctggccagagtagctggtatccctacttcggtgatcgacacttcaacaagtatcacttcacagatcacagagcaggaaatgacaaggatgaatgccaattgcgaggagtactggtcgcttcagatgacgtaccaggttgtgcagcggcttatctgcctgaagtactcgaaccatggcgacgactacatccgtgaagcactgcagaatctcaaggagagctattctgcgggccggctaacataagaggtctcatcagtatgagctctggcccttaataaatgttaaataagagtttttcgattgcatggtgttcgttcgcgacatgttttgttgttttgcaggtgtatgccgctggaggatccataagccaatgtatatattcctccgtcaatgtgatactatcttaggtcctcaaacgcacatctatcgttatcgcacatgccatgtaacatcttatcccctattcatatagatgatcacgaagcaagacagcatgtgaatgtttagaacaagtgattattatgacctcagccacatagcttttacgaaaagatttactggaatatatggaacaccaaagtaggagattagagtggtcgatacatacaaactgtaggtttgaacagcaaatgttggcattgttttctgccaatacattaatcgatacagtagcatgagaggaggaggagcacagaaggcggcctagaccacacaagagagcgggaggtagtgtggagccgagcaggacaagaattcatgagggacaaaaaaaaaatgtatggcaaaatcattcattgtcataaaaaacttgtgttttatataatttcagtttcatgtcaatgtatcaataaaataagcaaatataccgttaagtttttgttgaccgagacaattccaaccaatcaactatttatataatctagatatttatctcaatctatcaataatcaatccaattatccaagtgtcaaatgcaaactctactgctattgtgtcgtctggaagaagctgcatgccttcccatcgtgccggaaagactgaaggggcatgctcctgctgactggaaaggcagggcgtgcttgggagcagacagcaggaaccggcttggggcggggacgccgccatgccaggagcccaggaagggagcggacagcaaggacgggcttggggcggggacgccgccatgccaggagcccaggaagggagcggacagcaaggacgggccgccgccatgccaggagcccaggaagggagcggacagcaaggacgggcttggggcggggacgccgccatgccaggagcccaggaagggagcggacagcaaggacgggcttggggcggcgtgcgcgttctccacgtcggcgtcgggaagtagcggacttaccgagccggcatacgagagtagcaagccagagtgtcggcgttag

SEQ ID NO: 22399 - DNA, 3306 bp, Zea Mays
attccattccgtcacatattcccgagaaaaaccgtcattcgcgcgcacacgcggtcgcagctgcggtgcccggctcaacgccgcggagatggagggcgacgccaccggagctgacggaggaggcggaggaggaagtggtgagcgttctagcttcgtgatcggcctcatcgagaaccgtgccaaggaggttggtgttgcagcctttgatttaagatcagcctcattgcacctatctcagtatatcgagacaagttgctcatatcacaatacaaatacactacttcatttctatgatcccatggttgtcattgtgcccccaaacaaaacagcagcagatggtatggttggagtttcagaactgatcgataaacattacccagcaaacaaaaaggtcactatggcacgtggttgctttgatgacacaaagggtgctgtcattgtaagaagtctttcagctagggacccatctgctcttggtttagatacttactgcaagcagtattatctttgtcttgcggctgccactgcaacaattaaatggatagaatcagaaaagggtgtgttcattaccaatcactcattatcagttacattcaacgggtcatttgaccatatgagtatcgactcaactagtgttcaaacattggaaattattgaccctctccatactgaactttggggcactagcaacaaaaagaaaagcctctttcagatgctaaagactacaaagactacaggagggatgagctaatgagcaatgaggagctgttttttggtttgactcaaggtctacggaaatttccaaaagaatcaggttttgaagggggcaaagagttttcttcttcacaacatctatcagactgtatgtgaaaaccctaagtatgctaatatgagaaagagaattggagatgtcattgacgaggatgtggttcattcaagggctccatttgtagcctgcactcaacaatgttttgctgttaaggcaggaattgatggtctgcttgatgttgctcgtcgatctttctgtgataccagtgaagccatacataacctcgccaaaaagtacagggatgattataatatgccaaatttgaagataacctataatattaggcaaggattttactttattattccccaaaaggacatcaccgataggcttcctaataaatttatccaggttgttagacatgggaagaatctccattgctcaagcttggaacttgcttcaggcttattgacaaaatcagaggagacattgctatccttacattgctcgccgaagtattatgtcttttggacatgattgtaaattcttttgcgcatacaatatctacaaagcctgttgatcgctacacaagaccagagttcacagatgatggtccaatggcaatcaatgctggacgacaccctattcttgagaccttgcatactaattttgttcctaacaatatatttctctctgaagcatctaatatggttcttgtcatggggccaaatatgagcgggaaaagcacatatctccaacagatatgtttaattgtcattcttgcacaaattggctgttatgttccagctcagtttgcatccttaagagttcttgatcgtatatttacacggattggtaacggggacaatgttgagaacaactcgagtacgtttatgacagaaatgaaagaaactgctttcatcatgcaaaatgtttcttcaaggagtttggttgttgtggatgaacttggaagagcaacatcttcctcagatgggttggcaatcgcatggagttgctgtgaataccttctttctgtgaaagcatacactgtttttgccacgcacatggaacgcttgtcagaactttcaacaatgtatccaaatgtgaagatcctccattttgaggttgacttgagaaatgaccgcttggatttcaagttctgcctaaaggatggcatccgacgggtaccacactatgggcttctgctggccagagtagctggtatccctacttcggtgatcgacacttcaacaagtatcacttcacagatcacagagcaggaaatgacaaggatgaatgccaattgcgaggagtactggtcgcttcagatgacgtaccaggttgtgcagcggcttatctgcctgaagtactcgaaccatggcgacgactacatccgtgaagcactgcagaatctcaaggagagctattctgcgggccggctaacataagaggtgtatgccgctggaggatccataagccaatgtatatattcctccgtcaatgtgatactatcttaggtcctcaaacgcacatctatcgttatcgcacatgccatgtaacatcttatcccctattcatatagatgatcacgaagcaagacagcatgtgaatgtttagaacaagtgattattatgacctcagccacatagcttttacgaaaagatttactggaatatatggaacaccaaagtaggagattagagtggtcgatacatacaaactgtaggtttgaacagcaaatgttggcattgttttctgccaatacattaatcgatacagtagcatgagaggaggaggagcacagaaggcggcctagaccacacaagagagcgggaggtagtgtggagccgagcaggacaagaattcatgagggacaaaaaaaaaatgtatggcaaaatcattcattgtcataaaaaacttgtgttttatataatttcagtttcatgtcaatgtatcaataaaataagcaaatataccgttaagtttttgttgaccgagacaattccaaccaatcaactatttatataatctagatatttatctcaatctatcaataatcaatccaattatccaagtgtcaaatgcaaactctactgctattgtgtcgtctggaagaagctgcatgccttcccatcgtgccggaaagactgaaggggcatgctcctgctgactggaaaggcagggcgtgcttgggagcagacagcaggaaccggcttggggcggggacgccgccatgccaggagcccaggaagggagcggacagcaaggacgggcttggggcggggacgccgccatgccaggagcccaggaagggagcggacagcaaggacgggccgccgccatgccaggagcccaggaagggagcggacagcaaggacgggcttggggcggggacgccgccatgccaggagcccaggaagggagcggacagcaaggacgggcttggggcggcgtgcgcgttctccacgtcggcgtcgggaagtagcggacttaccgagccggcatacgagagtagcaagccagagtgtcggcgttag

SEQ ID NO: 22400 - DNA, 2446 bp, Zea Mays
gtcatgccgttcgggttgtgcaacgccccggaatgtccagaattggagatgtcattgacgaggatgtggttcattcaagggctccatttgtagcctgcactcaacaatgttttgctgttaaggcaggaattgatggtctgcttgatgttgctcgtcgatctttctgtgataccagtgaagccatacataacctcgccaaaaagtacagggatgattataatatgccaaatttgaagataacctataatattaggcaaggattttactttattattccccaaaaggacatcaccgataggcttcctaataaatttatccaggttgttagacatgggaagaatctccattgctcaagcttggaacttgcttcaggcttattgacaaaatcagaggagacattgctatccttacattgctcgccgaagtattatgtcttttggacatgattgtaaattcttttgcgcatacaatatctacaaagcctgttgatcgctacacaagaccagagttcacagatgatggtccaatggcaatcaatgctggacgacaccctattcttgagaccttgcatactaattttgttcctaacaatatatttctctctgaagcatctaatatggttcttgtcatggggccaaatatgagcgggaaaagcacatatctccaacagatatgtttaattgtcattcttgcacaaattggctgttatgttccagctcagtttgcatccttaagagttcttgatcgtatatttacacggattggtaacggggacaatgttgagaacaactcgagtacgtttatgacagaaatgaaagaaactgctttcatcatgcaaaatgtttcttcaaggagtttggttgttgtggatgaacttggaagagcaacatcttcctcagatgggttggcaatcgcatggagttgctgtgaataccttctttctgtgaaagcatacactgtttttgccacgcacatggaacgcttgtcagaactttcaacaatgtatccaaatgtgaagatcctccattttgaggttgacttgagaaatgaccgcttggatttcaagttctgcctaaaggatggcatccgacgggtaccacactatgggcttctgctggccagagtagctggtatccctacttcggtgatcgacacttcaacaagtatcacttcacagatcacagagcaggaaatgacaaggatgaatgccaattgcgaggagtactggtcgcttcagatgacgtaccaggttgtgcagcggcttatctgcctgaagtactcgaaccatggcgacgactacatccgtgaagcactgcagaatctcaaggagagctattctgcgggccggctaacataagaggtgtatgccgctggaggatccataagccaatgtatatattcctccgtcaatgtgatactatcttaggtcctcaaacgcacatctatcgttatcgcacatgccatgtaacatcttatcccctattcatatagatgatcacgaagcaagacagcatgtgaatgtttagaacaagtgattattatgacctcagccacatagcttttacgaaaagatttactggaatatatggaacaccaaagtaggagattagagtggtcgatacatacaaactgtaggtttgaacagcaaatgttggcattgttttctgccaatacattaatcgatacagtagcatgagaggaggaggagcacagaaggcggcctagaccacacaagagagcgggaggtagtgtggagccgagcaggacaagaattcatgagggacaaaaaaaaaatgtatggcaaaatcattcattgtcataaaaaacttgtgttttatataatttcagtttcatgtcaatgtatcaataaaataagcaaatataccgttaagtttttgttgaccgagacaattccaaccaatcaactatttatataatctagatatttatctcaatctatcaataatcaatccaattatccaagtgtcaaatgcaaactctactgctattgtgtcgtctggaagaagctgcatgccttcccatcgtgccggaaagactgaaggggcatgctcctgctgactggaaaggcagggcgtgcttgggagcagacagcaggaaccggcttggggcggggacgccgccatgccaggagcccaggaagggagcggacagcaaggacgggcttggggcggggacgccgccatgccaggagcccaggaagggagcggacagcaaggacgggccgccgccatgccaggagcccaggaagggagcggacagcaaggacgggcttggggcggggacgccgccatgccaggagcccaggaagggagcggacagcaaggacgggcttggggcggcgtgcgcgttctccacgtcggcgtcgggaagtagcggacttaccgagccggcatacgagagtagcaagccagagtgtcggcgttag

SEQ ID NO: 22401 - DNA, 949 bp, Zea Mays
atggcggcaggcagccaggaacagggagatgggcttattgacaaaatcagaggagacattgctatccttacattgctcgccgaagtattatgtcttttggacatgattgtaaattcttttgcgcatacaatatctacaaagcctgttgatcgctacacaagaccagagttcacagatgatggtccaatggcaatcaatgctggacgacaccctattcttgagaccttgcatactaattttgttcctaacaatatatttctctctgaagcatctaatatggttcttgtcatggggccaaatatgtgagtggagcgggaaaagcacatatctccaacagatatgtttaattgtcattcttgcacaaattggctgttatgttccagctcagtttgcatccttaagagttcttgatcgtatatttacacggattggtaacggggacaatgttgagaacaactcgagtacggatagcctggatctattctacatgatatcaagattcctcggacggtagggaaagactgcccccgggtatcgtattaagaagctcaatcggagcctcgatcgagaagggtcacgaaaactgcctctcccctgtgtagcatgagggtccgccccctataggctagatatttactcatgctttgagccctcccagctcctacacaaggattcacccccataggtcagtccatctcgtgtgcacacaaccagtgaaacgagtgaccttttcttaacctcaacctaaaatttgctcccactggaatttgaactcaggtcctgaggagtgctactcagaccacctaaccaactcagctagagaccctttcgcacttgatatcaagatatcaatgttgtttattgtgccttgttgtacaaactgttcatggagttacaaaggtattctggaaatacatgaatggagaatggtagtatccttatatctaac

SEQ ID NO: 22402 - DNA, 2106 bp, Zea Mays
atggcggcaggcagccaggaacagggagatgggcttattgacaaaatcagaggagacattgctatccttacattgctcgccgaagtattatgtcttttggacatgattgtaaattcttttgcgcatacaatatctacaaagcctgttgatcgctacacaagaccagagttcacagatgatggtccaatggcaatcaatgctggacgacaccctattcttgagaccttgcatactaattttgttcctaacaatatatttctctctgaagcatctaatatggttcttgtcatggggccaaatatgagcgggaaaagcacatatctccaacagatatgtttaattgtcattcttgcacaaattggctgttatgttccagctcagtttgcatccttaagagttcttgatcgtatatttacacggattggtaacggggacaatgttgagaacaactcgagtacgtttatgacagaaatgaaagaaactgctttcatcatgcaaaatgtttcttcaaggagtttggttgttgtggatgaacttggaagagcaacatcttcctcagatgggttggcaatcgcatggagttgctgtgaataccttctttctgtgaaagcatacactgtttttgccacgcacatggaacgcttgtcagaactttcaacaatgtatccaaatgtgaagatcctccattttgaggttgacttgagaaatgaccgcttggatttcaagttctgcctaaaggatggcatccgacgggtaccacactatgggcttctgctggccagagtagctggtatccctacttcggtgatcgacacttcaacaagtatcacttcacagatcacagagcaggaaatgacaaggatgaatgccaattgcgaggagtactggtcgcttcagatgacgtaccaggttgtgcagcggcttatctgcctgaagtactcgaaccatggcgacgactacatccgtgaagcactgcagaatctcaaggagagctattctgcgggccggctaacataagaggtgtatgccgctggaggatccataagccaatgtatatattcctccgtcaatgtgatactatcttaggtcctcaaacgcacatctatcgttatcgcacatgccatgtaacatcttatcccctattcatatagatgatcacgaagcaagacagcatgtgaatgtttagaacaagtgattattatgacctcagccacatagcttttacgaaaagatttactggaatatatggaacaccaaagtaggagattagagtggtcgatacatacaaactgtaggtttgaacagcaaatgttggcattgttttctgccaatacattaatcgatacagtagcatgagaggaggaggagcacagaaggcggcctagaccacacaagagagcgggaggtagtgtggagccgagcaggacaagaattcatgagggacaaaaaaaaaatgtatggcaaaatcattcattgtcataaaaaacttgtgttttatataatttcagtttcatgtcaatgtatcaataaaataagcaaatataccgttaagtttttgttgaccgagacaattccaaccaatcaactatttatataatctagatatttatctcaatctatcaataatcaatccaattatccaagtgtcaaatgcaaactctactgctattgtgtcgtctggaagaagctgcatgccttcccatcgtgccggaaagactgaaggggcatgctcctgctgactggaaaggcagggcgtgcttgggagcagacagcaggaaccggcttggggcggggacgccgccatgccaggagcccaggaagggagcggacagcaaggacgggcttggggcggggacgccgccatgccaggagcccaggaagggagcggacagcaaggacgggccgccgccatgccaggagcccaggaagggagcggacagcaaggacgggcttggggcggggacgccgccatgccaggagcccaggaagggagcggacagcaaggacgggcttggggcggcgtgcgcgttctccacgtcggcgtcgggaagtagcggacttaccgagccggcatacgagagtagcaagccagagtgtcggcgttag

SEQ ID NO: 22403 - DNA, 1824 bp, Zea Mays
ctaagcggtggtccagcgccttatctcgccttaccgccttaagaaccatggctgcgacagagggtgtctatattaataggtagaatagtatatgggctatgcctaagcccattacagctgtgacacacactaactgtctaacaatgtttgtacggaatttagactgagtttatgacagaaatgaaagaaactgctttcatcatgcaaaatgtttcttcaaggagtttggttgttgtggatgaacttggaagagcaacatcttcctcagatgggttggcaatcgcatggagttgctgtgaataccttctttctgtgaaagcatacactgtttttgccacgcacatggaacgcttgtcagaactttcaacaatgtatccaaatgtgaagatcctccattttgaggttgacttgagaaatgaccgcttggatttcaagttctgcctaaaggatggcatccgacgggtaccacactatgggcttctgctggccagagtagctggtatccctacttcggtgatcgacacttcaacaagtatcacttcacagatcacagagcaggaaatgacaaggatgaatgccaattgcgaggagtactggtcgcttcagatgacgtaccaggttgtgcagcggcttatctgcctgaagtactcgaaccatggcgacgactacatccgtgaagcactgcagaatctcaaggagagctattctgcgggccggctaacataagaggtctcatcagtgtatgccgctggaggatccataagccaatgtatatattcctccgtcaatgtgatactatcttaggtcctcaaacgcacatctatcgttatcgcacatgccatgtaacatcttatcccctattcatatagatgatcacgaagcaagacagcatgtgaatgtttagaacaagtgattattatgacctcagccacatagcttttacgaaaagatttactggaatatatggaacaccaaagtaggagattagagtggtcgatacatacaaactgtaggtttgaacagcaaatgttggcattgttttctgccaatacattaatcgatacagtagcatgagaggaggaggagcacagaaggcggcctagaccacacaagagagcgggaggtagtgtggagccgagcaggacaagaattcatgagggacaaaaaaaaaatgtatggcaaaatcattcattgtcataaaaaacttgtgttttatataatttcagtttcatgtcaatgtatcaataaaataagcaaatataccgttaagtttttgttgaccgagacaattccaaccaatcaactatttatataatctagatatttatctcaatctatcaataatcaatccaattatccaagtgtcaaatgcaaactctactgctattgtgtcgtctggaagaagctgcatgccttcccatcgtgccggaaagactgaaggggcatgctcctgctgactggaaaggcagggcgtgcttgggagcagacagcaggaaccggcttggggcggggacgccgccatgccaggagcccaggaagggagcggacagcaaggacgggcttggggcggggacgccgccatgccaggagcccaggaagggagcggacagcaaggacgggccgccgccatgccaggagcccaggaagggagcggacagcaaggacgggcttggggcggggacgccgccatgccaggagcccaggaagggagcggacagcaaggacgggcttggggcggcgtgcgcgttctccacgtcggcgtcgggaagtagcggacttaccgagccggcatacgagagtagcaagccagagtgtcggcgttag

SEQ ID NO: 22404 - DNA, 1765 bp, Zea Mays
catgctattcagtcggcctcgctactttcctaagtggaaaaagggttctctcaggccatttccttgagccgttccgctgccattcgaccaccaccgccacggcggcgccgatgccgactacaaccactcgcagagactaccgcctccagccccgctgcttctcatctccacgcagccgtccgatggccaagcggctcgccggtgccgacaaagaggtgctcgtcgaggtggtgaggttcacgcataagagcggactgaggggctgtgacggcggctggaaggatttcctggcccagaacgacaggaagtttggcgcgtcggtgagcgacccgaggaagcgctccagggacgtgctgttcgccttcctgcagaccttccccaaggatttccagaagaaacacttgatgccactagtccgacgagagccaccggaagacaacgcaggcattcctcagtccccaaagtgagctgctgggcagctgctcatcaccaacacaattctaacccccagcagtttcaggcgattggcatacgaatcgcaaagacgctgcatgccttctatcagttctgccgaccacacacaatatttggaaccataataggcattacttcggtgtctatcctgccagtgaaagagcctggacgattttacgttgatagctatatggggatttctcgaggctttggccgccgcattatgtatgaacgtttatgtagtagggctgaacaaggtcaataagccaaccctcccattagcgttcggagagttttcaatgccaactgcagtattgttagtagtggcattcttggtcatgagcattagcatcggaataagatcaaagtctgctccattgatgtgtgctttgcttgtttgcttccttcttggaagcgcatactccattgacgttccattactccggtggaagcgacatgcttttctagctgcattctgcataatctttgtgagggctgtagtggtccagttagctttctttgcacacatgcagtgcctgatggtgttgtttgcagcaacatgttctgaagaggcccttggcacctacaaggtgcataggctctgcattaatattctcatgacagcatacgcagccgcaattttggtaggcgcgtcatctacgaacctgtatcagaagattgtcattgtgtctggtcatggcttgcttgcctccacactctggcaaagagcacaacaatttgacattgagaataaggattgtatcacacaattttatatgttcatttggaagttattctacgccgagtattttcttataccatttgtgtagtaaagaatcatgcgaagaacaacacccctgctatagacatgtgaaggtttattgctaatgttactctaccccctgctatagacatgtgaaggtttattgctaatgttactctaccgaatggtctgaatgtctatgcgtcatttgaatgtaatatgactatttgttgtatcagggtaacaactggagcaaatgtaccatgtatattaagcattaatttaactgcatcatttgtaccatgtatattatgactatgtatgagatattgtctcttattagtactggatgtgatgtgtcttattatgactatggatgagacttttgtgatgtaattgatgagactatggttttaaatattgttatgtgattgtgtgtgagatattttatgtgaaaatatgatgtgctatatagttgttgatatatttgttatgttgtggaatgtggtgtaaaagaaaaataaacaa

SEQ ID NO: 22405 - DNA, 1203 bp, Zea Mays
attcagtcggcctcgctactttcctaagtggaaaaagggttctctcaggccatttccttgagccgttccgctgccattcgaccaccaccgccacggcggcgccgatgccgactacaaccactcgcagagactaccgcctccagccccgctgcttctcatctccacgcagccgtccgatggccaagcggctcgccggtgccgacaaagaggtgctcgtcgaggtggtgaggttcacgcataagagcggactgaggggctgtgacggcggctggaaggatttcctggcccagaacgacaggaagtttggcgcgtcggtgagcgacccgaggaagcgctccagggacgtgctgttcgccttcctgcagaccttccccaaggatttccagaagaaacacttgatgccactagtccgacgagagccaccggaagacaacgcaggcgattggcatacgaatcgcaaagacgctgcatgccttctatcagttctgccgaccacacacaatatttggaaccataataggcattacttcggtgtctatcctgccagtgaaagagcctggacgattttacgttgatagctatatggggatttctcgaggtgtctggtcatggcttgcttgcctccacactctggcaaagagcacaacaatttgacattgagaataaggattgtatcacacaattttatatgttcatttggaagttattctacgccgagtattttcttataccatttgtgtagtaaagaatcatgcgaagaacaacacccctgctatagacatgtgaaggtttattgctaatgttactctaccccctgctatagacatgtgaaggtttattgctaatgttactctaccgaatggtctgaatgtctatgcgtcatttgaatgtaatatgactatttgttgtatcagggtaacaactggagcaaatgtaccatgtatattaagcattaatttaactgcatcatttgtaccatgtatattatgactatgtatgagatattgtctcttattagtactggatgtgatgtgtcttattatgactatggatgagacttttgtgatgtaattgatgagactatggttttaaatattgttatgtgattgtgtgtgagatattttatgtgaaaatatgatgtgctatatagttgttgatatatttgttatgttgtggaatgtggtgtaaaagaaaaataaacaa

SEQ ID NO: 22406 - DNA, 1697 bp, Zea Mays
attcagtcggcctcgctactttcctaagtggaaaaagggttctctcaggccatttccttgagccgttccgctgccattcgaccaccaccgccacggcggcgccgatgccgactacaaccactcgcagagactaccgcctccagccccgctgcttctcatctccacgcagccgtccgatggccaagcggctcgccggtgccgacaaagaggtgctcgtcgaggtggtgaggttcacgcataagagcggactgaggggctgtgacggcggctggaaggatttcctggcccagaacgacaggaagtttggcgcgtcggtgagcgacccgaggaagcgctccagggacgtgctgttcgccttcctgcagaccttccccaaggatttccagaaggttggtcactcttttgcttcttcagacttcagttcagcatgcccggtttcactgccagctatagtggtcgaaacacttgatgccactagtccgacgagagccaccggaagacaacgcaggcattcctcagtccccaaaataataggcattacttcggtgtctatcctgccagtgaaagagcctggacgattttacgttgatagctatatggggatttctcgaggctttggccgccgcattatgtatgaacgtttatgtagtagggctgaacaaggtcaataagccaaccctcccattagcgttcggagagttttcaatgccaactgcagtattgttagtagtggcattcttggtcatgagcattagcatcggaataagatcaaagtctgctccattgatgtgtgctttgcttgtttgcttccttcttggaagcgcatactccattgacgttccattactccggtggaagcgacatgcttttctagctgcattctgcataatctttgtgagggctgtagtggtccagttagctttctttgcacacatgcagtgcctgatggtgttgtttgcagcaacatgttctgaagaggcccttggcacctacaaggtgcataggctctgcattaatattctcatgacagcatacgcagccgcaattttggtaggcgcgtcatctacgaacctgtatcagaagattgtcattgtgtctggtcatggcttgcttgcctccacactctggcaaagagcacaacaatttgacattgagaataaggattgtatcacacaattttatatgttcatttggaagttattctacgccgagtattttcttataccatttgtgtagtaaagaatcatgcgaagaacaacacccctgctatagacatgtgaaggtttattgctaatgttactctaccccctgctatagacatgtgaaggtttattgctaatgttactctaccgaatggtctgaatgtctatgcgtcatttgaatgtaatatgactatttgttgtatcagggtaacaactggagcaaatgtaccatgtatattaagcattaatttaactgcatcatttgtaccatgtatattatgactatgtatgagatattgtctcttattagtactggatgtgatgtgtcttattatgactatggatgagacttttgtgatgtaattgatgagactatggttttaaatattgttatgtgattgtgtgtgagatattttatgtgaaaatatgatgtgctatatagttgttgatatatttgttatgttgtggaatgtggtgtaaaagaaaaataaacaa

SEQ ID NO: 22407 - DNA, 1820 bp, Zea Mays
attcagtcggcctcgctactttcctaagtggaaaaagggttctctcaggccatttccttgagccgttccgctgccattcgaccaccaccgccacggcggcgccgatgccgactacaaccactcgcagagactaccgcctccagccccgctgcttctcatctccacgcagccgtccgatggccaagcggctcgccggtgccgacaaagaggtgctcgtcgaggtggtgaggttcacgcataagagcggactgaggggctgtgacggcggctggaaggatttcctggcccagaacgacaggaagtttggcgcgtcggtgagcgacccgaggaagcgctccagggacgtgctgttcgccttcctgcagaccttccccaaggatttccagaagaaacacttgatgccactagtccgacgagagccaccggaagacaacgcaggcgattggcatacgaatcgcaaagacgctgcatgccttctatcagttctgccgaccacacacaatatttggaaccgcattacttcggtgtctatcctgccagtgaaagagcctggacgattttacgttgatagctatatggggatttctcgaggtataaatgtataattctcttattgaaagttatataccctgggcacgtatttcatattcttttcttcttctttttattcctgaaaattaccaacatatatacactatctcattttgacacttctgttcaggctttggccgccgcattatgtatgaacgtttatgtagtagggctgaacaagataaccttttgaaggtcaataagccaaccctcccattagcgttcggagagttttcaatgccaactgcagtattgttagtagtggcattcttggtcatgagcattagcatcggaataagatcaaagtctgctccattgatgtgtgctttgcttgtttgcttccttcttggaagcgcatactccattgacgttccattactccggtggaagcgacatgcttttctagctgcattctgcataatctttgtgagggctgtagtggtccagttagctttctttgcacacatgcagtgcctgatggtgttgtttgcagcaacatgttctgaagaggcccttggcacctacaaggtgcataggctctgcattaatattctcatgacagcatacgcagccgcaattttggtaggcgcgtcatctacgaacctgtatcagaagattgtcattgtgtctggtcatggcttgcttgcctccacactctggcaaagagcacaacaatttgacattgagaataaggattgtatcacacaattttatatgttcatttggaagttattctacgccgagtattttcttataccatttgtgtagtaaagaatcatgcgaagaacaacacccctgctatagacatgtgaaggtttattgctaatgttactctaccccctgctatagacatgtgaaggtttattgctaatgttactctaccgaatggtctgaatgtctatgcgtcatttgaatgtaatatgactatttgttgtatcagggtaacaactggagcaaatgtaccatgtatattaagcattaatttaactgcatcatttgtaccatgtatattatgactatgtatgagatattgtctcttattagtactggatgtgatgtgtcttattatgactatggatgagacttttgtgatgtaattgatgagactatggttttaaatattgttatgtgattgtgtgtgagatattttatgtgaaaatatgatgtgctatatagttgttgatatatttgttatgttgtggaatgtggtgtaaaagaaaaataaacaa

SEQ ID NO: 22408 - DNA, 1961 bp, Zea Mays
attcagtcggcctcgctactttcctaagtggaaaaagggttctctcaggccatttccttgagccgttccgctgccattcgaccaccaccgccacggcggcgccgatgccgactacaaccactcgcagagactaccgcctccagccccgctgcttctcatctccacgcagccgtccgatggccaagcggctcgccggtgccgacaaagaggtgctcgtcgaggtggtgaggttcacgcataagagcggactgaggggctgtgacggcggctggaaggatttcctggcccagaacgacaggaagtttggcgcgtcggtgagcgacccgaggaagcgctccagggacgtgctgttcgccttcctgcagaccttccccaaggatttccagaaggttggtcactcttttgcttcttcagacttcagttcagcatgcccggtttcactgccagctatagtggtcgaaacacttgatgccactagtccgacgagagccaccggaagacaacgcaggcattcctcagtccccaaagtgagctgctgggcagctgctcatcaccaacacaattctaacccccagcagtttcaggcgattggcatacgaatcgcaaagacgctgcatgccttctatcagttctgccgaccacacacaatatttggaaccataataggcattacttcggtgtctatcctgccagtgaaagagcctggacgattttacgttgatagctatatggggatttctcgaggctttggccgccgcattatgtatgaacgtttatgtagtagggctgaacaagtttcagataaccttttgaaggtcaataagccaaccctcccattagcgttcggagagttttcaatgccaactgcagtattgttagtagtggcattcttggtcatgagcattagcatcggaataagatcaaagtctgctccattgatgtgtgctttgcttgtttgcttccttcttggaagcgcatactccattgacgttccattactccggtggaagcgacatgcttttctagctgcattctgcataatctttgtgagggctgtagtggtccagttagctttctttgcacacatgcagcaacatgttctgaagaggcccttggcacctacaaggtcggtggtctttgcaacatgtttcatgtgttgcttcgctgcagtaatagcgctattcaaggatattcctgatgtcgatggagatagagatttcggcattcagtccatgactgtacgattaggcccaacagagagtgcataggctctgcattaatattctcatgacagcatacgcagccgcaattttggtaggcgcgtcatctacgaacctgtatcagaagattgtcattgtgtctggtcatggcttgcttgcctccacactctggcaaagagcacaacaatttgacattgagaataaggattgtatcacacaattttatatgttcatttggaagttattctacgccgagtattttcttataccatttgtgtagtaaagaatcatgcgaagaacaacacccctgctatagacatgtgaaggtttattgctaatgttactctaccccctgctatagacatgtgaaggtttattgctaatgttactctaccgaatggtctgaatgtctatgcgtcatttgaatgtaatatgactatttgttgtatcagggtaacaactggagcaaatgtaccatgtatattaagcattaatttaactgcatcatttgtaccatgtatattatgactatgtatgagatattgtctcttattagtactggatgtgatgtgtcttattatgactatggatgagacttttgtgatgtaattgatgagactatggttttaaatattgttatgtgattgtgtgtgagatattttatgtgaaaatatgatgtgctatatagttgttgatatatttgttatgttgtggaatgtggtgtaaaagaaaaataaacaa

SEQ ID NO: 22409 - DNA, 1941 bp, Zea Mays
attcagtcggcctcgctactttcctaagtggaaaaagggttctctcaggccatttccttgagccgttccgctgccattcgaccaccaccgccacggcggcgccgatgccgactacaaccactcgcagagactaccgcctccagccccgctgcttctcatctccacgcagccgtccgatggccaagcggctcgccggtgccgacaaagaggtgctcgtcgaggtggtgaggttcacgcataagagcggactgaggggctgtgacggcggctggaaggatttcctggcccagaacgacaggaagtttggcgcgtcggtgagcgacccgaggaagcgctccagggacgtgctgttcgccttcctgcagaccttccccaaggatttccagaagaaacacttgatgccactagtccgacgagagccaccggaagacaacgcaggcattcctcagtccccaaagtgagctgctgggcagctgctcatcaccaacacaattctaacccccagcagtttcaggcgattggcatacgaatcgcaaagacgctgcatgccttctatcagttctgccgaccacacacaatatttggaaccataataggcattacttcggtgtctatcctgccagtgaaagagcctggacgattttacgttgatagctatatggggatttctcgaggctttggccgccgcattatgtatgaacgtttatgtagtagggctgaacaaggtcaataagccaaccctcccattagcgttcggagagttttcaatgccaactgcagtattgttagtagtggcattcttggtcatgagcattagcatcggaataagatcaaagtctgctccattgatgtgtgctttgcttgtttgcttccttcttggaagcgcatactccattgacgttccattactccggtggaagcgacatgcttttctagctgcattctgcataatctttgtgagggctgtagtggtccagttagctttctttgcacacatgcaggtagctaatgctgttaacataaatgcttatttgttccactatgtttagtgcctgatggtgttgtttgcagcaacatgttctgaagaggcccttggcacctacaaggtcggtggtctttgcaacatgtttcatgtgttgcttcgctgcagtaatagcgctattcaaggatattcctgatgtcgatggagatagagatttcggcattcagtccatgactgtacgattaggcccaacagagagtgcataggctctgcattaatattctcatgacagcatacgcagccgcaattttggtaggcgcgtcatctacgaacctgtatcagaagattgtcattgtgtctggtcatggcttgcttgcctccacactctggcaaagagcacaacaatttgacattgagaataaggattgtatcacacaattttatatgttcatttggaagttattctacgccgagtattttcttataccatttgtgtagtaaagaatcatgcgaagaacaacacccctgctatagacatgtgaaggtttattgctaatgttactctaccccctgctatagacatgtgaaggtttattgctaatgttactctaccgaatggtctgaatgtctatgcgtcatttgaatgtaatatgactatttgttgtatcagggtaacaactggagcaaatgtaccatgtatattaagcattaatttaactgcatcatttgtaccatgtatattatgactatgtatgagatattgtctcttattagtactggatgtgatgtgtcttattatgactatggatgagacttttgtgatgtaattgatgagactatggttttaaatattgttatgtgattgtgtgtgagatattttatgtgaaaatatgatgtgctatatagttgttgatatatttgttatgttgtggaatgtggtgtaaaagaaaaataaacaa

SEQ ID NO: 22410 - DNA, 1647 bp, Zea Mays
attcagtcggcctcgctactttcctaagtggaaaaagggttctctcaggccatttccttgagccgttccgctgccattcgaccaccaccgccacggcggcgccgatgccgactacaaccactcgcagagactaccgcctccagccccgctgcttctcatctccacgcagccgtccgatggccaagcggctcgccggtgccgacaaagaggtgctcgtcgaggtggtgaggttcacgcataagagcggactgaggggctgtgacggcggctggaaggatttcctggcccagaacgacaggaagtttggcgcgtcggtgagcgacccgaggaagcgctccagggacgtgctgttcgccttcctgcagaccttccccaaggatttccagaagaaacacttgatgccactagtccgacgagagccaccggaagacaacgcaggcattcctcagtccccaaaataataggcattacttcggtgtctatcctgccagtgaaagagcctggacgattttacgttgatagctatatggggatttctcgaggctttggccgccgcattatgtatgaacgtttatgtagtagggctgaacaagtttcagataaccttttgaaggtcaataagccaaccctcccattagcgttcggagagttttcaatgccaactgcagtattgttagtagtggcattcttggtcatgagcattagcatcggaataagatcaaagtctgctccattgatgtgtgctttgcttgtttgcttccttcttggaagcgcatactccattgacgttccattactccggtggaagcgacatgcttttctagctgcattctgcataatctttgtgagggctgtagtggtccagttagctttctttgcacacatgcagtgcctgatggtgttgtttgcagcaacatgttctgaagaggcccttggcacctacaaggtgcataggctctgcattaatattctcatgacagcatacgcagccgcaattttggtaggcgcgtcatctacgaacctgtatcagaagattgtcattgtgtctggtcatggcttgcttgcctccacactctggcaaagagcacaacaatttgacattgagaataaggattgtatcacacaattttatatgttcatttggaagttattctacgccgagtattttcttataccatttgtgtagtaaagaatcatgcgaagaacaacacccctgctatagacatgtgaaggtttattgctaatgttactctaccccctgctatagacatgtgaaggtttattgctaatgttactctaccgaatggtctgaatgtctatgcgtcatttgaatgtaatatgactatttgttgtatcagggtaacaactggagcaaatgtaccatgtatattaagcattaatttaactgcatcatttgtaccatgtatattatgactatgtatgagatattgtctcttattagtactggatgtgatgtgtcttattatgactatggatgagacttttgtgatgtaattgatgagactatggttttaaatattgttatgtgattgtgtgtgagatattttatgtgaaaatatgatgtgctatatagttgttgatatatttgttatgttgtggaatgtggtgtaaaagaaaaataaacaa

SEQ ID NO: 22411 - DNA, 1898 bp, Zea Mays
attcagtcggcctcgctactttcctaagtggaaaaagggttctctcaggccatttccttgagccgttccgctgccattcgaccaccaccgccacggcggcgccgatgccgactacaaccactcgcagagactaccgcctccagccccgctgcttctcatctccacgcagccgtccgatggccaagcggctcgccggtgccgacaaagaggtgctcgtcgaggtggtgaggttcacgcataagagcggactgaggggctgtgacggcggctggaaggatttcctggcccagaacgacaggaagtttggcgcgtcggtgagcgacccgaggaagcgctccagggacgtgctgttcgccttcctgcagaccttccccaaggatttccagaagaaacacttgatgccactagtccgacgagagccaccggaagacaacgcaggcattcctcagtccccaaagtgagctgctgggcagctgctcatcaccaacacaattctaacccccagcagtttcaggcgattggcatacgaatcgcaaagacgctgcatgccttctatcagttctgccgaccacacacaatatttggaaccataataggcattacttcggtgtctatcctgccagtgaaagagcctggacgattttacgttgatagctatatggggatttctcgaggctttggccgccgcattatgtatgaacgtttatgtagtagggctgaacaagtttcagataaccttttgaaggtcaataagccaaccctcccattagcgttcggagagttttcaatgccaactgcagtattgttagtagtggcattcttggtcatgagcattagcatcggaataagatcaaagtctgctccattgatgtgtgctttgcttgtttgcttccttcttggaagcgcatactccattgacgttccattactccggtggaagcgacatgcttttctagctgcattctgcataatctttgtgagggctgtagtggtccagttagctttctttgcacacatgcagcaacatgttctgaagaggcccttggcacctacaaggtcggtggtctttgcaacatgtttcatgtgttgcttcgctgcagtaatagcgctattcaagactttaggatattcctgatgtcgatggagatagagatttcggcattcagtccatgactgtacgattaggcccaacagagagtgcataggctctgcattaatattctcatgacagcatacgcagccgcaattttggtaggcgcgtcatctacgaacctgtatcagaagattgtcattgtgtctggtcatggcttgcttgcctccacactctggcaaagagcacaacaatttgacattgagaataaggattgtatcacacaattttatatgttcatttggaagttattctacgccgagtattttcttataccatttgtgtagtaaagaatcatgcgaagaacaacacccctgctatagacatgtgaaggtttattgctaatgttactctaccccctgctatagacatgtgaaggtttattgctaatgttactctaccgaatggtctgaatgtctatgcgtcatttgaatgtaatatgactatttgttgtatcagggtaacaactggagcaaatgtaccatgtatattaagcattaatttaactgcatcatttgtaccatgtatattatgactatgtatgagatattgtctcttattagtactggatgtgatgtgtcttattatgactatggatgagacttttgtgatgtaattgatgagactatggttttaaatattgttatgtgattgtgtgtgagatattttatgtgaaaatatgatgtgctatatagttgttgatatatttgttatgttgtggaatgtggtgtaaaagaaaaataaacaa

SEQ ID NO: 22412 - DNA, 2224 bp, Zea Mays
catcggttctcttccgggcccacgcggaggcgagtgagtgagaggcagcgcggcgcacgtcatgaccgggaatgggcattcccaaatccccccgtgcccgtctcgctcgcctccgccattgactcgatgccgccaatcagaatccaagcatccaaccaggcagaggcacacagagtctcagacacaggcacagcagacagcagagcgccccccaacaaaaacccaactcgttttcagctcgcgcaacgggcggcctcgtagcggagtcccagtcctctcgctttctccctgcgattcgcctcagcttccatccgatccgattcgggagtcgggactcgggagatagaggcagacggagagagagaagaaaggtagtgatgccgctggctgagccgccccagtggcgccgcaaagccacggatttcttctccacatctagtgtcaagctgaagcaggcagggcaatcggccggggataatatagctgatgttgctgggaaggttgggtccgcggtgaagagtcggtgggtcgtcttccaggaggctaggcagcagcagcagcagcaacggccaccgcatgagacagtgcaagagcgtatcatcaccgctgctgccaccactggtttgcttttcaggaaaggcatttcagagacaaaggagaaggttgcagtgggaaaggttaaagttgaagaggctgctaaaaaaactgcagataaaagcaagagtatcttgaacaatattgaacgctggcagaaggtttgtgatttggaattttgttacctagtaacacaatttgaccttttttttgtgtacaacgctgattctcatttctgtctctttgtcccagggagtcgcaagcactgatggtatgcttacaattcaatatccaggattcatatctgtcatagagtcatagttgacaacacatatgatttcttttagcatccaggcagttatttttttcctgtatctgctaagtttcctgtagcatagcgttagttctggattgtatgcctttaagttttatgttgactactttgctattctttgcctggcttcttcatcttattcttcactgatattttctgtaagtttatgatctgtttatttgtaaattgtgacctgtgagaaatgaccctctgatacaaagcgtaaatagttgttcaaccattttacattaagagcagcaatgaacaacaaataaatgatccactattacatcacaatcttgcagtgtttggtgttcctattgaagccactgtacaacgagagcaatctggtaaagctgtgcccttggtgctagtgagatgtgcagactacctggttatatcaggtttgaataatgagtacttattcaaatctgaaggtgacaaaaaagttcttcagcagttagtttctctttacaatgaagactctggcgcatctttacctgaaggtgtgaatcctattgatgtaggtgcactggtgaagtgctaccttgccagtatccctgagccgcttactacattttcgctttatgatgagcttcgagctgcgaggcattgcttcttcgagtcagccataaatcatcacttaacaagatggactcccgcagccttgctgtggaatttgcgcctttgatcatgtggcggcaaggtgatgctggcacagatttgcgtaaccacctcaagttaaccctgaaaccgcctccaaaaattgtggatacaacatcaaatactgccacgtgggacctgtttgatgaggatggcgaggatgcttcatcccagatccccttggacgatgcttcacccccagactacaactccattgaggtcatccagtgtctgatcgagcatcataatgccatcttcactgatgcaaatgaaaccgtgtggagatgatcaaggtctcttctagatctctctggtgttagctcgtgctacgtattagttccaggtaggaaggtggattaccgtccgttattgttaggtataagcattttggctggaacatttttggagtaggtttgtatatatgccgctagtgttaattctccccgggactaagatctggtcatgttatagcaatataagtcttgggtggatgtaaaccagatggacacaggacacgattgtgctgcatttgctgaattcggcttatacactgatgttaatctagggaactgttgccctgtacgttcacggttagctggtagcgtttgtcgtcaaaacaaatcagtgtagata

SEQ ID NO: 22413 - DNA, 1719 bp, Zea Mays
ctcgatgccgccaatcagaatccaagcatccaaccaggcagaggcacacagagtctcagacacaggcacagcagacagcagagcgccccccaacaaaaacccaactcgttttcagctcgcgcaacgggcggcctcgtagcggagtcccagtcctctcgctttctccctgcgattcgcctcagcttccatccgatccgattcgggagtcgggactcgggagatagaggcagacggagagagagaagaaaggtagtgatgccgctggctgagccgccccagtggcgccgcaaagccacggatttcttctccacatctagtgtcaagctgaagcaggcagggcaatcggccggggataatatagctgatgttgctgggaaggttgggtccgcggtgaagagtcggtgggtcgtcttccaggaggctaggcagcagcagcagcagcaacggccaccgcatgagacagtgcaagagcgtatcatcaccgctgctgccaccactggtttgcttttcaggaaaggcatttcagagacaaaggagaaggttgcagtgggaaaggttaaagttgaagaggctgctaaaaaaactgcagataaaagcaagagtatcttgaacaatattgaacgctggcagaagggagtcgcaagcactgatgtgtttggtgttcctattgaagccactgtacaacgagagcaatctggtaaagctgtgcccttggtgctagtgagatgtgcagactacctggttatatcaggtttgaataatgagtacttattcaaatctgaaggtgacaaaaaagttcttcagcagttagtttctctttacaatgaagactctggcgcatctttacctgaaggtgtgaatcctattgatgtaggtgcactggtgaagtgctaccttgccagtatccctgagccgcttactacattttcgctttatgatgagcttcgagctgcgagggttagcattcctgatcttagggatatattgaagaagcttccaaatgtgaactacatgacaatagagtttgttacagcattgcttcttcgagtcagccataaatcatcacttaacaagatggactcccgcagccttgctgtggaatttgcgcctttgatcatgtggcggcaaggtgatgctggcacagatttgcgtaaccacctcaagttaaccctgaaaccgcctccaaaaattgtggatacaacatcaaatactgccacgtgggacctgtttgatgaggatggcgaggatgcttcatcccagatccccttggacgatgcttcacccccagactacaactccattgaggtcatccagtgtctgatcgagcatcataatgccatcttcactgatgcaaatgaaaccgtgtggagatgatcaaggtctcttctagatctctctggtgttagctcgtgctacgtattagttccaggtaggaaggtggattaccgtccgttattgttaggtataagcattttggctggaacatttttggagtaggtttgtatatatgccgctagtgttaattctccccgggactaagatctggtcatgttatagcaatataagtcttgggtggatgtaaaccagatggacacaggacacgattgtgctgcatttgctgaattcggcttatacactgatgttaatctagggaactgttgccctgtacgttcacggttagctggtagcgtttgtcgtcaaaacaaatcagtgtagata

SEQ ID NO: 22414 - DNA, 1741 bp, Zea Mays
ctcgatgccgccaatcagaatccaagcatccaaccaggcagaggcacacagagtctcagacacaggcacagcagacagcagagcgccccccaacaaaaacccaactcgttttcagctcgcgcaacgggcggcctcgtagcggagtcccagtcctctcgctttctccctgcgattcgcctcagcttccatccgatccgattcgggagtcgggactcgggagatagaggcagacggagagagagaagaaaggcaaggcaatcgccgcgcgcgtgcttcctgccttctcggtcggctccagctcgccgttcattcccgcaatcccgttccgctcgcggtatcgggccgtggtagtgatgccgctggctgagccgccccagtggcgccgcaaagccacggatttcttctccacatctagtgtcaagctgaagcaggcagggcaatcggccggggataatatagctgatgttgctgggaaggttgggtccgcggtgaagagtcggtgggtcgtcttccaggaggctaggcagcagcagcagcagcaacggccaccgcatgagacagtgcaagagcgtatcatcaccgctgctgccaccactggtttgcttttcaggaaaggcatttcagagacaaaggagaaggttgcagtgggaaaggttaaagttgaagaggctgctaaaaaaactgcagataaaagcaagagtatcttgaacaatattgaacgctggcagaagggagtcgcaagcactgatgtgtttggtgttcctattgaagccactgtacaacgagagcaatctggtaaagctgtgcccttggtgctagtgagatgtgcagactacctggttatatcaggtttgaataatgagtacttattcaaatctgaaggtgacaaaaaagttcttcagcagttagtttctctttacaatgaagactctggcgcatctttacctgaaggtgtgaatcctattgatgtaggtgcactggtgaagtgctaccttgccagtatccctgagccgcttactacattttcgctttatgatgagcttcgagctgcgaggcattgcttcttcgagtcagccataaatcatcacttaacaagatggactcccgcagccttgctgtggaatttgcgcctttgatcatgtggcggcaaggtgatgctggcacagatttgcgtaaccacctcaagttaaccctgaaaccgcctccaaaaattgtggatacaacatcaaatactgccacgtgggacctgtttgatgaggatggcgaggatgcttcatcccagatccccttggacgatgcttcacccccagactacaactccattgaggtcatccagtgtctgatcgagcatcataatgccatcttcactgatgcaaatgaaaccgtgtggagatgatcaaggtctcttctagatctctctggtgttagctcgtgctacgtattagttccaggtaggaaggtggattaccgtccgttattgttaggtataagcattttggctggaacatttttggagtaggtttgtatatatgccgctagtgttaattctccccgggactaagatctggtcatgttatagcaatataagtcttgggtggatgtaaaccagatggacacaggacacgattgtgctgcatttgctgaattcggcttatacactgatgttaatctagggaactgttgccctgtacgttcacggttagctggtagcgtttgtcgtcaaaacaaatcagtgtagata

SEQ ID NO: 22415 - DNA, 1508 bp, Zea Mays
tttggaccttcgcctgctcgaacttcggtcagcatcgagtagtgatgccgctggctgagccgccccagtggcgccgcaaagccacggatttcttctccacatctagtgtcaagctgaagcaggcagggcaatcggccggggataatatagctgatgttgctgggaaggttgggtccgcggtgaagagtcggtgggtcgtcttccaggaggctaggcagcagcagcagcagcaacggccaccgcatgagacagtgcaagagcgtatcatcaccgctgctgccaccactggtttgcttttcaggaaaggcatttcagagacaaaggagaaggttgcagtgggaaaggttaaagttgaagaggctgctaaaaaaactgcagataaaagcaagagtatcttgaacaatattgaacgctggcagaagggagtcgcaagcactgatgtgtttggtgttcctattgaagccactgtacaacgagagcaatctggtaaagctgtgcccttggtgctagtgagatgtgcagactacctggttatatcaggtttgaataatgagtacttattcaaatctgaaggtgacaaaaaagttcttcagcagttagtttctctttacaatgaagactctggcgcatctttacctgaaggtgtgaatcctattgatgtaggtgcactggtgaagtgctaccttgccagtatccctgagccgcttactacattttcgctttatgatgagcttcgagctgcgagggttagcattcctgatcttagggatatattgaagaagcttccaaatgtgaactacatgacaatagagtttgttacagcattgcttcttcgagtcagccataaatcatcacttaacaagatggactcccgcagccttgctgtggaatttgcgcctttgatcatgtggcggcaaggtgatgctggcacagatttgcgtaaccacctcaagttaaccctgaaaccgcctccaaaaattgtggatacaacatcaaatactgccacgtgggacctgtttgatgaggatggcgaggatgcttcatcccagatccccttggacgatgcttcacccccagactacaactccattgaggtcatccagtgtctgatcgagcatcataatgccatcttcactgatgcaaatgaaaccgtgtggagatgatcaaggtctcttctagatctctctggtgttagctcgtgctacgtattagttccaggtaggaaggtggattaccgtccgttattgttaggtataagcattttggctggaacatttttggagtaggtttgtatatatgccgctagtgttaattctccccgggactaagatctggtcatgttatagcaatataagtcttgggtggatgtaaaccagatggacacaggacacgattgtgctgcatttgctgaattcggcttatacactgatgttaatctagggaactgttgccctgtacgttcacggttagctggtagcgtttgtcgtcaaaacaaatcagtgtagata

SEQ ID NO: 22416 - DNA, 586 bp, Zea Mays
gttgtttgtggctgcccttgtggtagttgtcagtatcaattgtggcataaaccatttaagttatcaaatctggaattgactcatgttaccaaagaaagatgaggatggcgaggatgcttcatcccagatccccttggacgatgcttcacccccagactacaactccattgaggtcatccagtgtctgatcgagcatcataatgccatcttcactgatgcaaatgaaaccgtgtggagatgatcaaggtctcttctagatctctctggtgttagctcgtgctacgtattagttccaggtaggaaggtggattaccgtccgttattgttaggtataagcattttggctggaacatttttggagtaggtttgtatatatgccgctagtgttaattctccccgggactaagatctggtcatgttatagcaatataagtcttgggtggatgtaaaccagatggacacaggacacgattgtgctgcatttgctgaattcggcttatacactgatgttaatctagggaactgttgccctgtacgttcacggttagctggtagcgtttgtcgtcaaaacaaatcagtgtagata

SEQ ID NO: 22417 - DNA, 3003 bp, Zea Mays
gccaaatcagccgctagggctgcattcatccatctcgtgcttatcgcctaccccaactccgactcctgctcgtcgctcgccgctcgccgccacgtccagctctctccgcccctccggactagcctagcccctcccgctcaccgtgtcgtctccagaatctggcctacgaccgttgacggctggtgccccctctggcaatcggtggtcgtggtctgtccttgctcaccccatccagatccgctatgcgcgagcctcccctttcctaatcacgcgccccctgccccagcgatccacagctgccgccccctgtatcgccgatccgtggctgccgcctcctccttcccataatcacaccctccggtcccgtcgatccgtagttgtcgcctccccccatcccctaatcacgcgcgtctcgctcccgccgatccgcggatcggctctgctccaaccctcctccgcccctgagatgcagcgagcatcacgggggatttctcccttgaggtgttgcctgagaggtgctgctgaccgagtagcatcattgaagagttactatcgagcacttggattatgtgatcgatgtgcagagaagtggttccaagggaacaagtgtgccaacacggtgcaacttcacgccattgaggaagtctaggatttgctcaccttggatgaagctacagtggaagtcattgaaccaacagaggaactgatgatggttgtatccctgtctaatgcggcatggttcggatctgacatgatatcaaccacgagattacaggtttaggttgctaatggccaagttattacctgctcacaccaccttccagcagctcaatggaccatcagtatagcccgacgagagtggattggacaaacaagcggatggttatttcttatcaggaaaatactatctaccttactagtgggaatggtggtggaattattgttactatctgaaacatcattatccacatctgactctagcatagcagctgttgcagtggattccagagtgcaagctctactcgacagttatcctagcattttcatcgatccagtgggactcccaccaacccgcccgtgtgatcattcaatttcattgatccccggtgcccagccgttccacataaggccataccgttaccctccaaccctcaaagatgaaattgaaactcaagttaaggaaatgctatccagggggtgatacgaaagagtagcggcccctttgaatctccaattctcttggtcaaaaagaaagaccactcatggagattctgtgtagattaccgttatttgaatgccacgacggtgaagagtaaataccctgtgctgatattcgatcagttctttgtgctcaggcactaggcatgtagaggtattttttgttgttattttctctttatgtggatgtggttacaaggctgttgacaaaatattactactccattgtcctccctctcacccataaggtatttgatatattactttgtccagtcgatgcagcttacaaggctgttgacaaaataatccaggtttgttggcacacttttaatctttcttgtacgggtacactacttctaacaatggaatatgaatgttgttttttgcgcaaaagttgcctggcttttagcatcgtttgatgggtgaggacacacatcgcctccaaatactagaacgctagggatatttgttctctcaaataaagctttacctgttatattatataatacttccgtaagaagagctgttagtggctggagtgaatagaatttggttggtcggtgcctccaagttgtttggtctaccgttcaaatgccttattattctgcgagttgttttaagactaggcctcaatttttttccaggcagaaagtgctactgcctctctcaactatagcggtgtggtactgggatccttgccaataagggtgagcccgtccatgacgccagtgcgtccccgtgcccctcgccagctgatgtcgtcctaggctctgaagccatcttctggacctcacaagtccagggagtgcatgcctctgatcctcatcatcaggaacatgctcaagtatgcactgacgtaccgtgaggtcatttctatcctgatgcaacgccatgtacttgttgatggcaaggtcaggactgacaagacctaccctgctgggttcatgggtatgccgatatctctattaatgcataaagatacctatacacatatcttggtagctgtgtgaggttgctgtttttcgttagtagatctatgtaccttatccttgctatactgtccatatatgttgtgtgcatgaaagtcttgcattgaaaatgtcatgtgctacaatcgttaggactattaatagatgttgctctttctatctatccatttacatcgctggaaattcccatgccctttcatagtacgcctgtgaaatgctcactgcttttctataggtttgtgtgtagttcaagctctacaaggtgaggtttgttcagtttggccagaaaggcatcccctacctgaacacctatttgttgtacaggaaaacatagaatggaattcaaatttggtggccgcaaaagtgtggagacttgaattcatataaagttaggcttaatattagtgcaaacagttgtattttagtttagatttagagtacacttatgtatgccttgtttgataatgcttatttatgatgtattgagttgtacttatttatattatattaattataatgttgttcaatatatgtgtatgtatatttctctttcaaattattaaaacgtgatatctgaaaaataattataaattgaagaatgtactgccatttaagtcatttcgtttaaatcttaataagacggtcaccaaaatgtctaatatcagtctcctaaataagatggtttttaaaacgtccattattagtcacctaaataagatggttttcctattgtaatcgtctattattgtaggatattcgagacagtttgataaatgctttatgacttataatgttt

SEQ ID NO: 22418 - DNA, 3537 bp, Zea Mays
tcatcgcacaggcttctttgggctgggactgggagttgccggcagcagagctgtgaatttgaagttccccgagaacatagaatctttgcctgtagtagtgtagttagaacgtacagggcaagaagtatctactgagtttaacttattcaaaaagaaaacgacaaatgctttaagagccgcagaaatttaaccagtcaatgataggcaagttgcctcccttcgtgtgtatcttgccaatgcctgaaaaataatagaacaagtagctttaggctgtgaaagctgaaaaataacagaacatacagcaggggcagttgtctccgtcaggaaaacgagcttgcctggacagcaggggcagcagccacatccatagcctctgaaccttcctcagcataaatatttctagcattcaatacatgtacccatcacacacaatgccagaaacttctatcgtgaaagaaagacagcaatacatctatcacgttctccatccgtttcaaatcagtgtactttagctttggcccaagtcaaaatatagtgcacagagctgcagcttgagatggctagggagctcctacatcaattgaaggtggtgcaggacaatcgttccttatctcctggtgaactgtggctccgaaacctgctcaagaagcactctcttgccatgtcctctctctctctctctctctctctctctctctctctcgtaccatggcaaggctgaaatcgcggattgggtggatcaaagaaggtgatgccaatacctctctttttcatgcacaaacaaggttcaggaagaagaatttcattgcagcggtacactcagaggatgggcaaatctggactgcccatgaaggcaaggcagcagccttctttgatttttatcaagggctccttggaactgaataagggatgttactgttgatctggatgctctgtggatgccatcttatgaccttgatacccttgatgcgcctgtctcggaggaggaagtttgggatacaattaagtcccttccttcggacgaatccccaagtcctgacgggttcactggcagattttacaaaagtcggtgatcaaggctgatttcatggcggcagtctactgcatttggctagaaatttcagaaacttgggtccgctgaattcagcttttattacacttctgcccaaggttgagggagccactagtgtgagagatttccgcccaatcagtctggttcatagtttagcgaagttggtgactaaattgttggctaacaggttagcagacaggctgcaaaatatggtttctcccaatcaaactgcttttattaagaaacgatttattcttttttttctcgaacacgcagaagagctgcgcatcattatatattagaaggaaggatagctatactaattcggtatactcaaaatacacctttggtacaaaattgacaatctcacaaggatgaaatatcagtaattttctatttactggtggatcccatcttttacggaatcaattccttttttgaataaaaattttgggagctcagcatgtctggaagcacgggagaacgttcttttgctgatattattaccagtattcgatactgggttattcatagcattactataccttccctattcattgcgggttggttatttgtcagtacgggtttagcttatgacgtgtttggaagtcctcgaccaaacgagtatttcacggaaagccgacaaggaattccattaataaccgaccgttttgattctttagaacaactagatgaatttagtagatccttttaggaggcccccaatgaccatagatcgaacctatcctatttttacagtgcgatggctggctgttcacggattagctgtacccacggtttttttcttgggatcaatatcagcaatgcagttcatccaacgataaaccaaattccaactatagaactatgacacaatcaaacccgaatgaacaaaatgttgaattgaatcgtaccagtctatactggggtttattactcatttttgtacttgctgttttattttccaattacttcttcaattgagagaaagaaagagagtagtaagaattctcttatcccatttggaaggataccatctttataactatccatgactgtttttgtctctagcatgaccacttgagaaaatgtggaggaaagtaggggaaatggccgatactactggaagaattcctctttggctgataggtactgtaactggtattcttgtgattggtttaataggtgttttcttttacggttcgtattctggattgggttcatctctatagtaatcggaggatccagattgtaaacatgaaaaagtaggaacttagcgggtccttactcccctttatctgattagagcggaaagggcccgcggaattcttattgttataacgcggttttgttccataatctagaaattggttacctatttctatttgtaaaaataacaaagagaaaacctttgctctgatggttggaatccctccatttattcttttgtttgttaatgatgttagtgagtgaagcaatccatcggtcgatttaaagcccccgcctttcgcccataaaatggattcactcttatgaagcaacaagaaagaggggagaggatccagtattttattccatgaaggaagtatcctgcaaatcgttgatttagtttagagtaataaactaataaaaccttaatcaaaactactcaactagcctaaaaatcaaaaccacccttccatgggagggtatagatttttttttacaaaatttctgtaagttcaaagttgaacttaattcaaaaagtaaagcaattctatttgctcacaagaaatgtgtcccccgccataccttctttccctctgtttgtccactaccgcgcccgaacctaagcaaaggaagtccaaaagacagacccgaataaagaataaatagtaatctttgacaaaacaaataagaagaaaaatgattcttacttcgatacaagaagaatcgacacaagaaaaaggcaaaaaagcctttttcttgtgcccaatagaggattaagaagacccacaattcctcctaaaaggacttgttccttttattgttctcgtctttgccttggatcctcttcttttgcatgagatagaaataaggaattccagaaatcgaggcttttttctcacttgatggtaagaaatcccaggatctagaaattcatttcgtacaattgaaccttttcaaactgtttctttttgagaaccaaaaaaacttgtgccaaaataacagatgcgaagaaaaacaaaaggccttggacgcgcaatggatcctgaagcactatttctgcatccccctgaccaaaccctcctacattaggattgcttgttaatggttgatcaagcttgattgattccccctctgaaacaagaagttctggcccgggaggtataatatcaatcacttggcgtccatccgatgcatccactatggatatttcatatccccccttttctttacgtagtattttttttactatacctgtt

SEQ ID NO: 22419 - DNA, 8239 bp, Zea Mays
tatattttgatttatatttgtttattgtattatacctttctatattctagatatatagaatagaagaatctcgatttgtcaagtctcatgatcgtatcaagatctatttcaattcggctcagtctttttttttagaaaagattgagccgaattgaattgcaatcaattagaggaataaagaagaattactgcatttcttaacttattttttctctttctattttgcttttttttattttatatggtatccatcgctttgaaaccatcaaatttgatctccttccatatttcacaagctgcggctagttcagcactccatttgcaagctgctttgataatttcattaccttcacgagcaagatcgcgcccttcgttacgagcttgtacacaggcttctaaagccacacgattagctgctgcaccaggtgcatttccccaaggatgtcctaaagttcctccaccaaattgtaatacggaatcatctccaaagatttcggtcagagctggcatatgccaaacatgaatacccccagaagccaccggtataacacctggcatggatacccagtcctgagtgaaaaagataccgcgagaacgatctttttcaataaaatcatcgcgcaataaatcaacaaaacctaaagttatttcgcgttccccttctaacttacctactactgtaccggagtggatatgatctccccccgacatacgcaatgctttagctaatacacggaaatgcataccatgatttttctgtctatcaataactgcatgcattgctcggtgaatgtgaagaagtaggccgttgtcgcggcaataatgagacaaagtagtatttgcggtgaatcctcctgttaagtagtcatgcattacaataggaacccctaattcccttgcaaatacagctctcttaatcatttcttcgcatgtacctgcagtcgcattcaagtaatgccccttgatttcaccagtttcggcttgtgctttataaattgcttcggcacaaaagacaaaacggtctctccagcgcataaatggttgtgagtttacgttttcatcatctttggtaaaatcaagtccaccgcgtagacactcataacacgctctaccgtaattttttgcggataatcccaattttggtttaatagtacatcccaataaaggacgaccgtacttgttcaacttatccctttcaacttggataccgtgaggcggaccttggaaagtttttgaataagcagggggaattcgtagatcctccaaacgtagagcgcgtaaggctttgaaaccaaatacgttacccacaatggaagtaaacatgttagtaacagaaccctcttcaaataggtctaatggataagctacataacagatatattgatctgggtccccaggaacgggctcgatgtgatagcatcgtcctttgtaacgatcaagactggtaagtccatcagtccaaacagttgtccatgtaccagtagaagattccgcagctactgcagctcctgcttcttcaggcggaaccccgagctgaggagttactcggaatgctgccaagatatcagtatccttggtttcgtactccggggtgtagtaagtcaatttataatccttaacaccagctttaaatccaacacttgctttagtttctgtttgtggtgacataagtccctccctacaactcatgaattaagaattctcacaacgacagggtctactcgatatggattaggcgtaaatgaaacctttgcaaaaatctaaaaaaaaagatatttaattaatatcaactcattaaataaaaaaaggagtatgcttaagttaatgaatatgtttcattcatatataatgtgtacaccctgtgtacgttctatcctataggaattttactataggaattcgataggaaggaattcgataggaattgagttgttgttatggtaagttaacacggttcgttattaaaccgtggatttgattcaccaaatccatcattattgtatactctttgatagatatagcgcaacccaaaccctaatctttattttacaatttttaaagttcttcccctttgatattttgaatctaaatacctaaatactaagaaaattctctgttgacagcaatctatgcttcacagtagtatatattttgtatatcgaagtcctagataggaaagtagagtaggcacagatccttcacaaaaggcgaaatttatatgaaaaaatggattgaactttccaacggattcattccataagtaaacgattgaatgggattcgcttgggcaacgaaatcaagtgcgagtccccttttcttttttattgaattaactaattcatttccttttgacttttggatttttggatattttttttgatttggcattattcaacaagaaaaaaaatttcgacaaattcctttttttttgaaaattatgtgataattatgagaaccaatcctactacttcgcgtcccgggatttccacaattgaagaaaaaagcgtagggcgtattgatcaaattattggacccgtgctggatatcacttttcccccgggcaagttgccttatatttataatgctttgatagtcaagagtcgagacactgccgataagcaaattaatgtgacttgtgaggtacaacaattattaggaaataatcgagttagagctgtggctatgagtgctacagaggggttgatgagaggaatggaagtgattgacacgggaactcctctcagtgttccagtcggtggagctactctcggacgaatttttaacgttcttggggagcctattgacaatttgggtcctgtggatactagtgcaacatttcctattcatagatctgcgcctgcctttatcgagttagatacgaaattatctatctttgaaacaggtattaaggtggtcgatcttttagctccctatcgacgtggaggaaaaatcggactgtttgggggggcaggagtaggtaaaacagtactcatcatggaattaatcaataacattgctaaagctcatggaggcgtatccgtatttggcggagtaggggaacggactcgtgaaggaaatgatctttatatggaaatgaaggaatccggagtaattaatgaaaaaaatattgaggaatcaaaggtagctctagtctatggccaaatgaatgaaccgccgggagctcgtatgagagttggtttaactgccctaactatggcagaatatttccgagatgttaataagcaagacgtgcttttattcatcgataatatctttcgttttgttcaagcaggatcggaagtatccgccttattaggcagaatgccttccgcagtgggttatcaacctacccttagtacagaaatgggttctttgcaagaaagaattacttctaccaaaaagggatctataacttcgatccaagcagtttatgtacctgcagacgatttgaccgaccctgctcctgccacaacatttgcacatttggacgctactaccgtactttccagaggattagcttccaagggtatttatcccgcagtggatcctttagattcaacctcaactatgttacagcctcggattgttggcaacgaacattatgaaactgcgcaaagagttaaggaaactttacaacgttacaaagaacttcaggacattatcgcaattcttggattggatgaattatcggaggaggatcgtttaactgtagcaagagcacgaaaaatcgagcggttcttatcacaaccgttctttgtggcagaagtttttaccggttctccaggaaagtatgttggtcttgcagaaacaattaggggatttcaactaatcctttccggagaattagacggcctacccgaacaggctttttatttagtggggaacatcgatgaagctagcacgaaagctataaacttagaagaggagagcaaattgaagaaatgaaattaaatctttatgtactgactcctaaacgaattatttgggattgtgaagtgaaagaaatcattttatctactaatagtggccaaattggtgtattaccaaaccacgcccccattaacacagctgtagatatgggtcctttgagaatacgcctcctgaacgaccaatggttaacggcggttctgtggagtggttttgcaagaatagttaataatgagatcatcattttaggaaatgagagagacaaaagagaggtcttacaagaaggggtaaacccctgctatgcaggactccccaaaggaacacacacacttagaaactattacatgatcattacattacataattttctccgaccacactgaggactacgactaagcgcaagcttccaatatgtttggctccagctagcacccagcacgccaactcatctaagaaacttctctgcaccttgccgatggagggagaatcaccctcaaaaaccacccggttacgttgcagccataaacaccaagcacctagaataatggcactattaaagcctttcttcttgtctttatgcattcggttgcaaactcttttccaccggtcagcaaaagcgatatcctttaccccaggggagaggtgaccaagaccgaaaggagataggtggttgtaccaaaattgccgagcaaagacacacgtagtcaagagatgttgaactgtttcttgctcctggtcacaaagagggcatgcttccggatgtgggaggcctctttttgccaaagtatcagatgtccaacatttattcctcatagccgccatagaaaggtcttacatttaggaggggcccgacttttccatagcctcttccatggctcaaaagggatggatccttgtagcaggatttagatgaaaaccgactagaagtctcgtatttccacacatgccgctcatcatcctgggtcaacacaacctctcccaaagaatcacagagaagaaggtattgttgcatccctagtaaagaaagggggaaataattgccctcacccacaatctgttgtcaagaccttgtgccactgttctagaggaaagggtcttcttatcaactttagcagccacctcaggagcaatgtcctgaatacagcagccattcagccatctatcagacaagaacagcatgttgtttccgtttcccacaaaggagacaaccgagctagcaaatagctgttgaacctgaggttggatgggaagatccagtccactccaaagcctattcgggtctattttctgcagccataaccatttcgtttgtagcgaccaactcatatattgcaggtttgggatacccaggcctccaaatgttagcggcctagtaactttgtcccatgacactaaatagctgctcccattcacttctttccttcctttccaaagaaacccctgtcgtagcttatcgatagatttgatcgaaacgatttattcttgacaacttcatgctagtccagtggacaaccagattcttacattgttagaagcaggctcgtatccttctcaagctagacatttcaaaggctttcgactcggtatcgtgggccttccttatcgaggtcttgaaaaaacttggttttggacagatctggtgtgatataataagcaggctgttagctacctcttctaccaagattttactgaatggtctacccggggaatgtattgggcatcaacgaggtctgaggcagagtgatcctctatcacctatgttgtttattcttgtaatggatgtcttgaatcagctcgtgcagcgagcctctgaggaagggcttcttcaacctctctctacaaggaatatgcagcactatatctcgctgtacgcagatgacgcagtgttatttctaagccctactgcctcggacattagtgtggttatgtatattcttcatctttttggttcagcttcaggtctaaggactaatatccagaagagtagtgggttccctatctgttgtgggtaagaggtgaattgcttacatgacttgctgccatgtaatatttcagattttccctgtaagtacctcggtttgcctttgtctcccaagaaactcacaagggaccaggtctaggccgttgttgatagggtggccagccttctgccaggatggaaagctgagctcatgaccaaggctggtagagctattcatgtgcagttcgtcatgacggcaaagatgatttatgcagctttggcacttgaccttcctgtctgggccatcaaagcaattgataaacagaggaagggcttcctctggagggacaggaaagagttctgtggtggtcattgcctcctggcttggcctaaggttacccgtcccaaggagctgggtggtctactggtcttgggattagtgatttaaagaacctcggttgggttttgggggctcgttggccatggctgcagaaaacagatcccagtaggccttggacggacttccccacacgtctgtaaggtggtacaaaatctgattgttgtagtcgttactactaagctcagtgatggagccaatacccttttttggaaggacagatggttggatgggagatgtattagggacatagctcctgcaatgtttgacatggtgcccatgcgtcttgccaacaaacggttggtcaaagatgctctccctaatctccattggatctccgatataaaaggggcaatttcactcagaatcattgctgaattcctagaactttgtgaaatgcttgaggcagttgttcttcagcatggagtaagggatcgacaaatatggaaattcagtgcttcaggagattatacagctaattctgcttataaagctctcttccatggttcagttcagtttgaaccagcagaacgagtgtggaaatcttgggctcctaggaagtgcaagttctttatttggcttgtggagcataataggtgctggacagctgacaggcttagaaaaagagggctagaccggccagagcactgccccttgtgcgaccaagaggctgaaactataaatcacttgttggtcaaatgtgtttttgccaagcagttttggtttgatttccttagttcagtgggacagcaggagctgtgtccagctcacgaggattccttcaagtcatggtggaagactagcagctctcgaacatctgatcttctgaggaagggtttcaattctctagtaatcctaggtgtttggaccatatggaagcataggaatagatctgtctttgatggatgtaatcctagcttggtcacaacccttagggtggctagggaagaggcggtgctctggtccttgactggagccaaggccctgtctttcctccaggtcgaagagctgctggcttaaaacagcattgtgggtcgtgttttctctgtgttagtccgtgatcattagtcagtttctagtgttggggtgtaatgtgtgtgatgtaatggggttctctccccctttcttcttcttttaatgcaaagatgcgcagctctcctgcgtattccagaaaaatattagtttcattaaattctccataaaatttgccatgatagtgcattgatttgatcttgtacatgtcagcattgttctcaaaacttggtaaaattaagagaagtttgacacataggacaaagctaaatgcactacaatctggaaggggtgataactaccatggtaggtctaacagcattacaaagaaatggattttctactttcaaaacgaagttaatacattcacaaattcaatcaaattccttaataatgcaaagcaaagaaatttcacagttgacttgtctccttgtataagttgcttagcatagaatctgtaaaactgctggaatggtcgacagaagcacccaaacagtttgctattcattcacttaggggcaatatatggagcgacaactccatgaagcagggcagtttggaagtacttgtcaacacaaccgatacttacaggcttacagcatcagtgttaccatcagagtcaatgatatatgcgtgtgtgcaacaaaaatgaaggaaaccagctcgaattgtaaggtatgtccagggctccaggcaaaacattccttctgtagccctcgaagtaaatttttacttgggttgttaggtagaagcttggcatagttacctccagatgacatttacaagatcatcttgacgagcctctgggcttatcgcagcatcatacttcacaatgtttccatagaatattttctctagctccttcatccattttgtcagaagcaagttaacctagaatgcatgaacattttatataaatcaat

SEQ ID NO: 22420 - DNA, 173 bp, Zea Mays
gcttaccccagctttagaaactctgagttctacatcgtggttgtacatttcgtagatgtactgtccgaacttaacaccatccttcccttcttccttcaagcggcgtagaacaagccacatatggagaacaagcaatgaaaatgttgtcttaaatgttttctccaactgaaaaa

SEQ ID NO: 22421 - DNA, 425 bp, Zea Mays
atgacaaatgacaaatgtgatgatgtacaaaagagcaataacttgtttgactacatatcctcttattgcgtacagatcacaaggtgcaaacagagaacccaagtggcgtgcgcgagatgggagagcggcggtacctcgggcctcggcccagcgggcggagaggaagcgccagggccgggcgacgtggccgtggcggcggcagcggacttggcaaagtttctcgtgagggtttggagaggaagcgaaggcggcgagggagccttcgccaaggccctggagagggcgccggcctccgccgcagagttgcgggacgcggcagctgcggagatgctgtaggcggcggcgcgccaccgtgacatggtctcctcccgctcgcgcttggcgtctcggcgggcggcggctgcaggaggggacggaaaaagaag

SEQ ID NO: 22422 - DNA, 2512 bp, Zea Mays
gcttcgcttccaggcttccacagtccacaccaccaccccactccgcccagctccctcgagcgcgcagcgcggcggtggcgatgccgagctcccggcggactacaggccgcggcggtgcaggcgcaggcgcaggcggcgcgggggcgggtgatgcaggaggcggcgacggcgaccgagtgccgcggttcatgggcaacaaccgcgaccacaacccgcgggagctgcgctcctgggcgcgccgcacggggttccacccctcggctttcttctcgggggagtccaactcctccttcgcctcctccgccgcgccgcagccaccgccgccgcctcccccggcctcctcgcgtcgcccgccgcgcccgccgccggagcgggaccccgatccggacgcggaggatgacctcgatcccgcgcccggccgcggacgcggcagacgcccgcgtcgacgcatcgacctccgcggcgagctccagatcccgccgggcttcggccgcgaggaggcggtgccggggtcggcggagccggacgcgcggaggggaggcgcgcgcggggacgccacccggaggaacggcggcgtcgagagaggccaggcgccggccaatgccggccggaacggcaacggagcgctcgcggacgcggacgcgaggaagaaggccgaggacgcagaggcgaagcggaaggcggaggaggccgaggcgaggaggaagaaggaggacgaggagagggatgccgagctggctgcgtactaccaggagcagtgggcgaatgaggatgaaggagctgcgggcgctgccgccgccgctgctgagacggccccgctgtatgaggcgtcgggactccggtgtggtgtaaccgagaaccccggatgggcacccctcatattttatggcatacaacattacctgtcaatagctggttcgcttgtctttgttcctttgatactggtacctacaatgggtggctctgatgaggatactgcaacagtcatctccaccatgttattaatctctggtcttactacaatactacatacttttttgggttctcggcttccactgattcaaggaagctcctttgtatatttggctccagcgttggtaattgcgaactcagaggagttcagaaatcttagtgacaattacttgagaaaaatatccctgtttggcaaccatatcttccttgtctatgcggtgcccctcagtgttgcaattgtatgggcatattcattcttcctaactgcgggtggagcatataacttcaaaggttgcagctcaaatatacccagttcaaacatattactggattcatgcagaaggcatttagaaaccatgagacgctgccgtactgatgtttctagtgcatggagaactgctgcctgggtgaggattccctatccgttccaatggggcccaccaacatttcattctaagacgggtatcatcatgataatagtgtcgctggttgcttcagttgattcgctttcatcgtaccatgctgcatcgctgctggtaaatttaagtccaccaacacgcggagttgtcagcagagcgattgggcttgaagggatttcaagttttattgctggagtgtggggtacaggtacaggatcgataacattaacagagaacatacacacccttgaaacgaccaaaatggccagcagaagggcattgcagcttggggcagccgttttagtcgtctgctccttctttggtaaaatcggagctctcctagcctctatacctcttgcattggccgcctctgttctgtgcttcacctgggcgctaatcgttgcacttggcttgtctacgttgcgatacacccaagcagcaagctccagaaacttgataatagttggatttaccctattcatctccctgtcaatccctgcatactttcagcagtacgaacccagctccaatcttatcttgccaagctatcttctcccttatgctgcagcgtcaagtggaccagttcgcacagccagcagtgggttgaattatgcagtgaatgcgctcctatccatcaacgttgtggtggctctccttgtcgcgttgatccttgacaacactgtgccaggcagccgacaagagcgcggtgtgtacgtttggacagatcccaaatctctcgaggtggatcctgctaccttggaaccctaccgattgccggaaaagatttcgtgctggttcaggtgggcaaagtgtgtcggcatgtaaaggttctcaaagtcaggggccgcgatgaaaatattctatttattccattggtaccttgttactgtaggatttactatatgagaatatataatatatatagatacagatgctacatagttaggggcctctcttgctgctgttaggttaggataagcacatgtaaagttttggtcatgttagaggggacacgttctatgagctatgctatgtaagtttgtagaaatgctacgttcaaatgaccagtcaccgagtttaaccgttacacacgtccgtgttgacgcttttatgccttgttt

SEQ ID NO: 22423 - DNA, 2707 bp, Zea Mays
gcttcgcttccaggcttccacagtccacaccaccaccccactccgcccagctccctcgagcgcgcagcgcggcggtggcgatgccgagctcccggcggactacaggccgcggcggtgcaggcgcaggcgcaggcggcgcgggggcgggtgatgcaggaggcggcgacggcgaccgagtgccgcggttcatgggcaacaaccgcgaccacaacccgcgggagctgcgctcctgggcgcgccgcacggggttccacccctcggctttcttctcgggggagtccaactcctccttcgcctcctccgccgcgccgcagccaccgccgccgcctcccccggcctcctcgcgtcgcccgccgcgcccgccgccggagcgggaccccgatccggacgcggaggatgacctcgatcccgcgcccggccgcggacgcggcagacgcccgcgtcgacgcatcgacctccgcggcgagctccagatcccgccgggcttcggccgcgaggaggcggtgccggggtcggcggagccggacgcgcggaggggaggcgcgcgcggggacgccacccggaggaacggcggcgtcgagagaggccaggcgccggccaatgccggccggaacggcaacggagcgctcgcggacgcggacgcgaggaagaaggccgaggacgcagaggcgaagcggaaggcggaggaggccgaggcgaggaggaagaaggaggacgaggagagggatgccgagctggctgcgtactaccaggagcagtgggcgaatgaggatgaaggagctgcgggcgctgccgccgccgctgctgagacggccccgctgtatgaggcgtcgggactccggtgtggtgtaaccgagaaccccggatgggcacccctcatattttatggcatacaacattacctgtcaatagctggttcgcttgtctttgttcctttgatactggtacctacaatgggtggctctgatgaggatactgcaacagtcatctccaccatgttattaatctctggtcttactacaatactacatacttttttgggttctcggcttccactgattcaaggaagctcctttgtatatttggctccagcgttgaaattcaagcacataatgagagaactacagggggctatacttgttggttcagtatttcagataatattaggatacactggccttatgtcactgtttctgaggttaataaatccagtagtggtggcaccgactattgctgcagtgggtttggcattttttagttatggttttcctcaggctggcagctgtgtagaaatcagcatgccgctcattctgttggttcttctgtgcactctgtacttgagaaaaatatccctgtttggcaaccatatcttccttgtctatgcggtgcccctcagtgttgcaattgtatgggcatattcattcttcctaactgcgggtggagcatataacttcaaaggttgcagctcaaatatacccagttcaaacatattactggattcatgcagaaggcatttagaaaccatgagacgctgccgtactgatgtttctagtgcatggagaactgctgcctgggtgaggattccctatccgttccaatggggcccaccaacatttcattctaagacgggtatcatcatgataatagtgtcgctggttgcttcagttgattcgctttcatcgtaccatgctgcatcgctgctggtaaatttaagtccaccaacacgcggagttgtcagcagagcgattgggcttgaagggatttcaagttttattgctggagtgtggggtacaggtacaggatcgataacattaacagagaacatacacacccttgaaacgaccaaaatggccagcagaagggcattgcagcttggggcagccgttttagtcgtctgctccttctttggtaaaatcggagctctcctagcctctatacctcttgcattggccgcctctgttctgtgcttcacctgggcgctaatcgttgcacttggcttgtctacgttgcgatacacccaagcagcaagctccagaaacttgataatagttggatttaccctattcatctccctgtcaatccctgcatactttcagcagtacgaacccagctccaatcttatcttgccaagctatcttctcccttatgctgcagcgtcaagtggaccagttcgcacagccagcagtgggttgaattatgcagtgaatgcgctcctatccatcaacgttgtggtggctctccttgtcgcgttgatccttgacaacactgtgccaggcagccgacaagagcgcggtgtgtacgtttggacagatcccaaatctctcgaggtggatcctgctaccttggaaccctaccgattgccggaaaagatttcgtgctggttcaggtgggcaaagtgtgtcggcatgtaaaggttctcaaagtcaggggccgcgatgaaaatattctatttattccattggtaccttgttactgtaggatttactatatgagaatatataatatatatagatacagatgctacatagttaggggcctctcttgctgctgttaggttaggataagcacatgtaaagttttggtcatgttagaggggacacgttctatgagctatgctatgtaagtttgtagaaatgctacgttcaaatgaccagtcaccgagtttaaccgttacacacgtccgtgttgacgcttttatgccttgttt

SEQ ID NO: 22424 - DNA, 3581 bp, Zea Mays
gaaaatcaataattttagatgtgtattctgcagtttggctatgcgtaacatatccattcttcatctttcagatagtatcacggatgcattgccatatattggcactcactgcgctaatactacttgaattgttgaaatggctgtagcacccctcatattttatggcatacaacattacctgtcaatagctggttcgcttgtctttgttcctttgatactggtacctacaatgggtggctctgatgaggatactgcaacagtcatctccaccatgttattaatctctggtcttactacaatactacatacttttttgggttctcggcttccactgattcaaggaagctcctttgtatatttggctccagcgttggtaattgcgaactcagaggagttcagaaatcttagtgacaataaattcaagcacataatgagagaactacagggggctatacttgttggttcagtatttcagataatattaggatacactggccttatgtcactgtttctgaggttaataaatccagtagtggtggcaccgactattgctgcagtgggtttggcattttttagttatggttttcctcaggctggcagctgtgtagaaatcagcatgccgctcattctgttggttcttctgtgcactctggtatatccttttaacttccttttgatgaataaaacttaatcatatcttgccatttgtttccttgcctgttttttcttattaccttgttatgggccttaagcccattagctagggcattatggttaggttagacacgtccactgttcacgcgcggttactgtagcttttaaacagtgtcggccagatagggtttgttatgttgcttagcttttaagttagggttactctatataaggaggggcagggtgttagttgagatgagcaagaagaatagatctggtttactcctagggcctcctacgggagggctgagtaccgggactatcttgcgagtgcaccacagttcacaacaaattggtaccggagccactacgcgcgcatcgccaccatggccagcgctcacgacgatcttgtgacctactccgccaagatggacctcatcctcgcgcaactcgccaccatcaatgcccgtttggattcccacgacgctcgtctagccaagctcgagcaggcgtgggtcagcccctctgcttctaccgcgggctgtttgggcgcgagcgagggcggcctgggcgcgggcggaggcggccgggtcgaggacgatgggctgcaacccgacacacccagggaggaggtggaggcggcgttctacgttgtggtggccgtgccactgctgcagcccgccttcgtgctcgtggaggtccaggcgtgggccgactgtgcgcggatctgctcgcccaatctgcaacaatcgggaccatggtggcccaacctgtagaggtgctgctgcgggataaccctccacgccacagctaccaatcctccgcgtcgtggccatcaatcttctgcaccacagacaaccatctgctgcgtcgtcgcagctgtggtcgacgtcggccaccttggcccccgccgcggcgtggtcacctgagctacaacaccggagggtgccaccgacctttgccaggcgcagggagccctctgcgccaccgcagccacgtccttcattggtcgagctggccgccgacgcgtcctcttcggtagatccgaccaatttttttctaggtgaataaaagactaagtcgagatgtaaaagacttagtattgagtcattaagtgctagttttgtatgagtcaattcttcttgactacagctcgcggacgaactgtttttaaggagggatggaatgttatgggccttaagcccattagctagggcattatggttaggttagacgtggccactgttcacgcgcggttactgtagcgcgtgaacagtgccggccagatagggtttgttatgttgcttagcttttaagttagggttacgtctctatataaggaggggcgcagggtgttagttgagataagcaagaagaatagatctggtttactcctagggcctcctacgggagggctgagtaccgggactatcttacgagtgcatcacagttcacaacatacctgtttgtattttaatcattttcactggcatgtttttccctttgacttgtattgctccatgtctaactgattaatgtacttatccatttcagtacttgagaaaaatatccctgtttggcaaccatatcttccttgtctatgcggtgcccctcagtgttgcaattgtatgggcatattcattcttcctaactgcgggtggagcatataacttcaaaggttgcagctcaaatatacccagttcaaacatattactggattcatgcagaaggcatttagaaaccatgagacgctgccgtactgatgtttctagtgcatggagaactgctgcctgggtgaggattccctatccgttccaatggggcccaccaacatttcattctaagacgggtatcatcatgataatagtgtcgctggttgcttcagttgattcgctttcatcgtaccatgctgcatcgctgctggtaaatttaagtccaccaacacgcggagttgtcagcagagcgattgggcttgaagggatttcaagttttattgctggagtgtggggtacaggtacaggatcgataacattaacagagaacatacacacccttgaaacgaccaaaatggccagcagaagggcattgcagcttggggcagccgttttagtcgtctgctccttctttggtaaaatcggagctctcctagcctctatacctcttgcattggccgcctctgttctgtgcttcacctgggcgctaatcgttgcacttggcttgtctacgttgcgatacacccaagcagcaagctccagaaacttgataatagttggatttaccctattcatctccctgtcaatccctgcatactttcagcagtacgaacccagctccaatcttatcttgccaagctatcttctcccttatgctgcagcgtcaagtggaccagttcgcacagccagcagtgggttgaattatgcagtgaatgcgctcctatccatcaacgttgtggtggctctccttgtcgcgttgatccttgacaacactgtgccaggcagccgacaagagcgcggtgtgtacgtttggacagatcccaaatctctcgaggtggatcctgctaccttggaaccctaccgattgccggaaaagatttcgtgctggttcaggtgggcaaagtgtgtcggcatgtaaaggttctcaaagtcaggggccgcgatgaaaatattctatttattccattggtaccttgttactgtaggatttactatatgagaatatataatatatatagatacagatgctacatagttaggggcctctcttgctgctgttaggttaggataagcacatgtaaagttttggtcatgttagaggggacacgttctatgagctatgctatgtaagtttgtagaaatgctacgttcaaatgaccagtcaccgagtttaaccgttacacacgtccgtgttgacgcttttatgccttgttt

SEQ ID NO: 22425 - DNA, 1949 bp, Zea Mays
atcacggatgcattgccatatattggcactcactgcgctaatactacttgaattgttgaaatggctgtagcacccctcatattttatggcatacaacattacctgtcaatagctggttcgcttgtctttgttcctttgatactggtacctacaatgggtggctctgatgaggatactgcaacagtcatctccaccatgttattaatctctggtcttactacaatactacatacttttttgggttctcggcttccactgattcaaggaagctcctttgtatatttggctccagcgttggtaattgcgaactcagaggagttcagaaatcttagtgacaataaattcaagcacataatgagagaactacagggggctatacttgttggttcagtatttcagataatattaggatacactggccttatgtcactgtttctgaggttaataaatccagtagtggtggcaccgactattgctgcagtgggtttggcattttttagttatggttttcctcaggctggcagctgtgtagaaatcagcatgccgctcattctgttggttcttctgtgcactctgtacttgagaaaaatatccctgtttggcaaccatatcttccttgtctatgcggtgcccctcagtgttgcaattgtatgggcatattcattcttcctaactgcgggtggagcatataacttcaaaggttgcagctcaaatatacccagttcaaacatattactggattcatgcagaaggcatttagaaaccatgagacgctgccgtactgatgtttctagtgcatggagaactgctgcctgggtgaggattccctatccgttccaatggggcccaccaacatttcattctaagacgggtatcatcatgataatagtgtcgctggttgcttcagttgattcgctttcatcgtaccatgctgcatcgctgctggtaaatttaagtccaccaacacgcggagttgtcagcagagcgattgggcttgaagggatttcaagttttattgctggagtgtggggtacaggtacaggatcgataacattaacagagaacatacacacccttgaaacgaccaaaatggccagcagaagggcattgcagcttggggcagccgttttagtcgtctgctccttctttggtaaaatcggagctctcctagcctctatacctcttgcattggccgcctctgttctgtgcttcacctgggcgctaatcgttgcacttggcttgtctacgttgcgatacacccaagcagcaagctccagaaacttgataatagttggatttaccctattcatctccctgtcaatccctgcatactttcagcagtacgaacccagctccaatcttatcttgccaagctatcttctcccttatgctgcagcgtcaagtggaccagttcgcacagccagcagtgggttgaattatgcagtgaatgcgctcctatccatcaacgttgtggtggctctccttgtcgcgttgatccttgacaacactgtgccaggcagccgacaagagcgcggtgtgtacgtttggacagatcccaaatctctcgaggtggatcctgctaccttggaaccctaccgattgccggaaaagatttcgtgctggttcaggtgggcaaagtgtgtcggcatgtaaaggttctcaaagtcaggggccgcgatgaaaatattctatttattccattggtaccttgttactgtaggatttactatatgagaatatataatatatatagatacagatgctacatagttaggggcctctcttgctgctgttaggttaggataagcacatgtaaagttttggtcatgttagaggggacacgttctatgagctatgctatgtaagtttgtagaaatgctacgttcaaatgaccagtcaccgagtttaaccgttacacacgtccgtgttgacgcttttatgccttgttt

SEQ ID NO: 22426 - DNA, 1900 bp, Zea Mays
cttgaattgttgaaatggctgtagcacccctcatattttatggcatacaacattacctgtcaatagctggttcgcttgtctttgttcctttgatactggtacctacaatgggtggctctgatgatactgcaacagtcatctccaccatgttattaatctctggtcttactacaatactacatacttttttgggttctcggcttccactgattcaaggaagctcctttgtatatttggctccagcgttggtaattgcgaactcagaggagttcagaaatcttagtgacaataaattcaagcacataatgagagaactacagggggctatacttgttggttcagtatttcagataatattaggatacactggccttatgtcactgtttctgaggttaataaatccagtagtggtggcaccgactattgctgcagtgggtttggcattttttagttatggttttcctcaggctggcagctgtgtagaaatcagcatgccgctcattctgttggttcttctgtgcactctgtacttgagaaaaatatccctgtttggcaaccatatcttccttgtctatgcggtgcccctcagtgttgcaattgtatgggcatattcattcttcctaactgcgggtggagcatataacttcaaaggttgcagctcaaatatacccagttcaaacatattactggattcatgcagaaggcatttagaaaccatgagacgctgccgtactgatgtttctagtgcatggagaactgctgcctgggtgaggattccctatccgttccaatggggcccaccaacatttcattctaagacgggtatcatcatgataatagtgtcgctggttgcttcagttgattcgctttcatcgtaccatgctgcatcgctgctggtaaatttaagtccaccaacacgcggagttgtcagcagagcgattgggcttgaagggatttcaagttttattgctggagtgtggggtacaggtacaggatcgataacattaacagagaacatacacacccttgaaacgaccaaaatggccagcagaagggcattgcagcttggggcagccgttttagtcgtctgctccttctttggtaaaatcggagctctcctagcctctatacctcttgcattggccgcctctgttctgtgcttcacctgggcgctaatcgttgcacttggcttgtctacgttgcgatacacccaagcagcaagctccagaaacttgataatagttggatttaccctattcatctccctgtcaatccctgcatactttcagcagtacgaacccagctccaatcttatcttgccaagctatcttctcccttatgctgcagcgtcaagtggaccagttcgcacagccagcagtgggttgaattatgcagtgaatgcgctcctatccatcaacgttgtggtggctctccttgtcgcgttgatccttgacaacactgtgccaggcagccgacaagagcgcggtgtgtacgtttggacagatcccaaatctctcgaggtggatcctgctaccttggaaccctaccgattgccggaaaagatttcgtgctggttcaggtgggcaaagtgtgtcggcatgtaaaggttctcaaagtcaggggccgcgatgaaaatattctatttattccattggtaccttgttactgtaggatttactatatgagaatatataatatatatagatacagatgctacatagttaggggcctctcttgctgctgttaggttaggataagcacatgtaaagttttggtcatgttagaggggacacgttctatgagctatgctatgtaagtttgtagaaatgctacgttcaaatgaccagtcaccgagtttaaccgttacacacgtccgtgttgacgcttttatgccttgttt

SEQ ID NO: 22427 - DNA, 975 bp, Zea Mays
agaacggatccacgggcgctcctctccccgagcgctcctcctctcctcgacgagcgctcctcctcgacggcgctcctctcctcgacgacgctggagctctctggcacggcgctcctctccctgttttctgaaggcgctcctctccctgttcggccctgtctccttcccttccaagccgtcaatcttgagcaggtcgttgtaggttccttccccgcggccatggagaaatctccaagatccattcctatcggatctggacctgctagggccgacacacgcaaagatgtcgcagaagctgcagaagggagtaggcgcacaggcatcgtcgacacgagtaacattgattatggcactagtagattacgcccgcgccatcgattatgtaggacacatggtccagcgcaaagatataatcgagtttgggatggtcttttagacgccattagacatatgcaattatctgccgatgagttgaggaagttgagccgccacaatcatgtgcctgagtatttggatatgttgcacaaaaattgcttggttaatgccatgagtgatgttactgaaattgcaaaaggtctagacattatgagcagggatttggaggaagttcttattggtccgcaacctctacttgaggattacgaagcccttggaatgtacgatgatttcaaaaccaatgttcattgtgattgtactgagcagtgtggttcagatgaggacaactcttcttttgactcggatgagatccctgatcgccgtatgaagggctctaaaacaagctacttcagaaattcagtagcattttcagagttcagttctgtctgcttggttttctgtcactttgccttgtcggccttctcttcgtgccttactgaccagggacgtgctgacagagttctacagggacgtgctcccagggaactgcatcgttcacgacatattggactgaagctaggactaattgaagctaactga

SEQ ID NO: 22428 - DNA, 769 bp, Zea Mays
atggagaaatctccaagatccattcctatcggatctggacctgctagggccgacacacgcaaagatgtcgcagaagctgcagaagggagtaggcgcacaggcatcgtcgacacgagtaacattgattatggcactagtagattacgcccgcgccatcgattatgtaggacacatggtccagcgcaaagatataatcgagtttgggatggtcttttagacgccattagacatatgcaattatctgccgatgagttgaggaagttgagccgccacaatcatgtgcctgagtatttggatatgttgcacaaaaattgcttggttaatgccatgagtgatgttactgaaattgcaaaaggtctagacattatgagcagggatttggaggaagttcttattggtccgcaacctctacttgaggattacgaagcccttggaatgtacgatgatttcaaaaccaatgttcattgtgattgtactgagcagtgtggttcagatgaggacaactcttcttttgactcggatgagatccctgatcgccgtatgaagggctctgtatgaagtgagactatctgagctatttgtctatgatagagttgcctcctcgacaatagccatgtattaatttgatgtagtattctattgccaatgtattttgtgagacttgtaattcatgatgtatttttagttcaacttggtttcggccatgattgttttggccataatgtatcttcaacttgtagttcatgatgtatcttcaactatgtgtgcc

SEQ ID NO: 22429 - DNA, 2277 bp, Zea Mays
ggagccggaacacgtcaccgtcaaacgttcctcctccgactggcctacccttctttctcaatcttcccaccaccctcacacttcgccctcctgccctcccggcgaggtcgcctctgcttccgactccgctcgactgcgcccgaccccagtctcgcctgcgtccaccggcatggcctcacccacggtcgcctccccgacccgggcgagccccgccgacatccccaccgccgcaccctcgtcggccccccggccgcggcgcctcgcgtcggcgccgcccgcagtctacgcgtctgcgtcctcctccccggcctccgcctactccggggaccagctctccgcccccgacgcctcgagcccgctgctcgcgagcaggagcgaggagtacaggcttctgttccggctgccgcccgacgaggttctcgtgcaagattttaactgcgctctccaagaaaatatccttcttcaggggcatatgtatttatttcttcaccatatatgcttctactctaacatatttggatatgagactaagaaaacaatacctttgcaagaggtaacagatgttcgtaaagcaaagacggctgccattttttctaatgccattgaaattgttgctggtagtagaaggcacttctttggatctttcttgtcacgtgatgaagcctatcaaattatagtagatggctgggaacaacatgttagtaatgcaagattactccttgaacgtcaggagacaaagtcagctagtagcagtgaagaaaatggttatgttttattggaaggagcaaaggaacctaaacaagatgaagattcatcaccgctggacaggtctgtcaatagtacggctgtctccagtggtagtgctgatggtggtgattcgaacatcaacatttccagaaggttttcaaatgttgaggagaatggactcgaagacaacatcatcacactaaacccattcaatttggagccagttgatgatactcctagtgtacctgaatcttacacttcggtcacggagtcaaagtttcaggtgcctgtggaggttctttttaatttgttattgtctgatggtgcttttggctttttggatgatttccacaaaaattgtggtgacaaagaatttagttgctccaaatggcgtacagatgaacaagggggacttgtaagggatgtctcatttttgcacccaataaaaatttatcttggtgcaaaatttgggacttgtcaagaggtccagaaacttcgtctttacaaaaacagggcatctgggatgttgaacaagatagcctagatgagaactgttgttacctcaggatatatattaatgtagccttctcaaagaaaacaatatttagagggaaaatagagcagtcaacaaaagatgaatgccgagaagttttcagtctctggattaagctcggccatgatcttttgaagcaggagtatgatcgatcaaaaggcacttccagcacaactgattctggtgctcaatcaggggctataacgaacgaggaaaataccggggaagtagcagtacccatggtgagtacctcacaggatgtatctggtgcgaggagcctcattcctccttttcaagatccccagcagagaacaggaagagattcttccatcgggtccacttcacaagaactgtggggttcactaacgtcacacatgagatcaagccaacttggtccagtactagcagtggcgctggtggctatcattgtcctattgcaggtccagatggctcctcacgggatctcgacgggcagtttcgggtacagcaaagaaagcatggagtgggcgcagaagcgcctcagcctactcagggaggagatgcaggtggctgaggcgcacatggagaggatgaggcacgagtttgcctggctcagatcttacctggagggactggagaggctgaggcgccgcacatgaccgcagcgcgtgtacacgacaggggcacgattccgcgatgcggattcgttggtatacagtacgaactcggagacgttgttcaggtttcttcttcttctgtgttgctacagaccgtacagatgcaaacggagagctggtgccgtggtggtggtgttgcagaggtattgccgtaaggcagaactgccagatcccggtacagcattcaatgtaaatagctgggggacgtgtcattgccatgacgatacagcggcgtgatgttagaaacctcgcactacttttttttttcagaaagtaaaaaactttttgtggtttatgtattgctcgggtggcaaaaggaaa

SEQ ID NO: 22430 - DNA, 2233 bp, Zea Mays
cttcgccctcctgccctcccggcgaggtcgcctctgcttccgactccgctcgactgcgcccgaccccagtctcgcctgcgtccaccggcatggcctcacccacggtcgcctccccgacccgggcgagccccgccgacatccccaccgccgcaccctcgtcggccccccggccgcggcgcctcgcgtcggcgccgcccgcagtctacgcgtctgcgtcctcctccccggcctccgcctactccggggaccagctctccgcccccgacgcctcgagcccgctgctcgcgagcaggagcgaggagtacaggcttctgttccggctgccgcccgacgaggttctcgtgcaagattttaactgcgctctccaagaaaatatccttcttcaggggcatatgtatttatttcttcaccatatatgcttctactctaacatatttggatatgagactaagaaaacaatacctttgcaagaggtaacagatgttcgtaaagcaaagacggctgccattttttctaatgccattgaaattgttgctggtagtagaaggcacttctttggatctttcttgtcacgtgatgaagcctatcaaattatagtagatggctgggaacaacatgttagtaatgcaagattactccttgaacgtcaggagacaaagtcagctagtagcagtgaagaaaatggttatgttttattggaaggagcaaaggaacctaaacaagatgaagattcatcaccgctggacaggtctgtcaatagtacggctgtctccagtggtagtgctgatggtggtgattcgaacatcaacatttccagaaggttttcaaatgttgaggagaatggactcgaagacaacatcatcacactaaacccattcaatttggagccagttgatgatactcctagtgtacctgaatcttacacttcggtcacggagtcaaagtttcaggtgcctgtggaggttctttttaatttgttattgtctgatggtgcttttggctttttggatgatttccacaaaaattgtggtgacaaagaatttagttgctccaaatggcgtacagatgaacaagggggacttgtaagggatgtctcatttttgcacccaataaaaatttatcttggtgcaaaatttgggacttgtcaagaggtccagaaacttcgtctttacaaaaacagggcatctgggatgttgaacaagatagcctagatgagaactgttgttacctcaggatatatattaatgtagccttctcaaagaaaacaatatttagagggaaaatagagcagtcaacaaaagatgaatgccgagaagttttcagtctctggattaagctcggccatgatcttttgaagcaggagtatgatcgatcaaaaggcacttccagcacaactgattctggtgctcaatcaggggctataacgaacgaggaaaataccggggaagtagcagtacccatggtgagtacctcacaggatgtatctggtgcgaggagcctcattcctccttttcaagatccccagcagagaacaggaagagattcttccatcgggtccacttcacaagaactgtggggttcactaacgtcacacatgagatcaagccaacttggtccagtactagcagtggcgctggtggctatcattgtcctattgcaggtaaccatcatagttctgctaactaggtccccccaggtccagatggctcctcacgggatctcgacgggcagtttcgggtacagcaaagaaagcatggagtgggcgcagaagcgcctcagcctactcagggaggagatgcaggtggctgaggcgcacatggagaggatgaggcacgagtttgcctggctcagatcttacctggagggactggagaggctgaggcgccgcacatgaccgcagcgcgtgtacacgacaggggcacgattccgcgatgcggattcgttggtatacagtacgaactcggagacgttgttcaggtttcttcttcttctgtgttgctacagaccgtacagatgcaaacggagagctggtgccgtggtggtggtgttgcagaggtattgccgtaaggcagaactgccagatcccggtacagcattcaatgtaaatagctgggggacgtgtcattgccatgacgatacagcggcgtgatgttagaaacctcgcactacttttttttttcagaaagtaaaaaactttttgtggtttatgtattgctcgggtggcaaaaggaaa

SEQ ID NO: 22431 - DNA, 7784 bp, Zea Mays
ggcgcaaatcactgaagaattcacgagcttcccaagcaaatgatccgtccgctccaccaatcccgtctcccccgaccacggccgcgcctggagcggcgggccgcgcgcggccaccctcgccgtctccacgccaccgcggcgagcgcggcgcccactcgcccaccgggcgcaccctcccccacgtgtcccccctgccgcctgagggccccgcctgtcacccaccgtccccggggtgggcagccgaaagcgacgcgtgaagcgctctgccctgcctgctgccctcagcgctcgcctctcgtcacgcgcccccttcacaacccccgatgcgatgggtgcccctgcccctcgatagtcgcgccgctctcctgcccgttcggccgttccccatttgcctcgtcgcccaccgccccattagcgccgccctcccctatccgacccaacgccgccgccgccgccgcatagacctcgccggcgcctctgcgccgccccgtggcctccagaggtgctattcgcgcgcgatccgccgctgcgtccgtcgctctggcatcgattcggcggcgctgggagtatgtctctggtgcaagtgtgctgaagatgaaggagaggagctctttatgtgaaagtgcagccgatggaaactggggtttgaaatataaaaggaaaagaagcaagttaaccgttagcccatctaatgagaatgaggctacctcaccaacatctgactctccaatgagccatggttccaccaaaaagaagttgaagcatgacactaacatttctccatcagccaagaagataagaggacacgatgggtatttttttgagtgtgtagaatgtgatcttggtggcaatttgctatgttgtgatagctgtcctcgtgtttaccacttggaatgcctcaatcctcctcttaagcgtctaccccctgggaagtggcaatgtccaagatgccgtccgaaaaaaggtagcttgaagatgttaggtaatgcagaggttggcacttctaaacatgaaaaaagtacaaggacatatgcaggtacgacatcaggtagtccaccttcgcatacaaaagtctcctttaagaccaggaactccacacaagacaaaactggatcaaaagaacaaggaaaacagtcatctggtggcacaatgatgggtggtgacccgaataatgaagttgagaaaaagaacacattgatattacatttgaagaagcactcaatgaaggaattatcagagaatgctaaacctttgaagtcaaaatttgttggagagccttcagaagagaaaattgttaaacatggaagtgtcttgaaactcaagaaacattcagaccgtatggacttgtctccaaataaatctaaaagcagggggcaaaatagtcagagagagagtaaaaggcctggcacaaaaaagcttaaatattcaatgtctgatgatgacagtgtttcctcatcagaaccatcgacatctcttgataacaatgaaccaccaccaaaaagaaaaccctcagatggaaaagcaccttcatccagtaccaagaaagggaaaaagaaagtgaagttcattgagaaaaggcactctgaggaacagtgtgtggtaggagacaaaacaacgacttcccaggaggatcagcaggtcgatcgcattctaggctgtcggcttcaaacaaacaaaatcaacccactgtcccatgcttcattcaagcagtttgaatcagctaatctccaggtggaagatatggctcttccgcttgcttccgctggcattcctaataaatctcatgatggaactgagtcttctagaaatggtacagtcgaggatatatgtgctgatgaatcagccaatcatagtggtcacagtttggaaatgcagaaggataggaacagtaaatcccatgaaaacgagtcatgtaaacgagaacaaggcaataatatattgtcaatatgttttgttgatgagaccagtataatgaaagatgatcaagtaggcagagagaatgttgcagcttccaaaaagggtgaagatgcgacatatgatttacctgcagaaaaggatgataccaaactaccagtcactagagctgatgcaatgaccaggaccaatcaagagcatacagatgagagcaaacagcatgggaaaataaagcaaataacagataaagactacaatgatgctggatatgagttcttgatcaagtgggttggaaaatcaaatatccacaacacctgggtttctgaatccgaggtaaaaatattagcaaaaaggaaactagaaaactacaaaacgaagtatggaacgagtttgataaacatttgcaaggaacagtggtgccagccacaacgagttattgctcttcgagcatctgtagatgaagtggaagaggctttaatcaaatggtgtggtctttcttatgatgaatgcacttgggaaagattagatgaacctacactgatgaaatatagccacttggtcactcagttcaagaattttgagtgccaggctttggataaagatgtggtaaaagattatgcaaacacaaggaaccgacatgagcttaatgtgttagctgatcagccaaaagaacttaagggcggcatgctcttccctcatcaactagaagcattgaactggctacgtaaatgctggcacaagtccaaaaatgttatccttgctgatgagatgggtcttggaaagacagtgtcagcttgtgcttttctatcatccttatgttgtgaatttaaaattaatttgccatgtcttgtcttggttcctctttctacaatgcccaattggatggctgaatttgcatcttgggctcctcatttaaatgttgtggaatatcatggttctgcaaggtcaagatctatcattcgccagtatgagtggcatgcgggcgattcaagccagattggcaaaacaaagagatcgtacaagttaaatgttttgcttaccacttacgaaatggtgcttgttgatgctgcatatcttcgttctgtctcatgggaagttcttgtagttgatgagggacatcgccttaagaattctagcagcaaactctttagtttacttaattcgttatcatttcagcacagagttttgttgactggaactcctttacagaacaacattggtgaaatgtacaacttattgaacttcttacagcctacttctttcccttctctgtcatcatttgaggagaaatttaatgaccttacaacagcagaaaaagtagaggagctgaagaaacttgtagctcctcacatgcttcggaggttgaaaaaagatgcaatgcaaaacatccctccaaagacagagcgaatggtacctgttgaactgacatcaatccaggctgaatactaccgtgctatgcttacaaagaactatcaagtactgcgcaacattggaaaaggtggcgctcaccagtctttattgaacatagtaatgcagcttcggaaagtctgcaaccatccttatcttattcatggaactgaacctgaatctggttcacctgaatttttgcatgagatgcgcataaaggcctcagcgaagctaactttgttgcactctatgctaaaaatattacacaaggaaggccaccgtgtccttatattctctcagatgacaaaacttcttgacatccttgaagattatctgactttagaatttggccctaaaacatttgaaagagttgatggctcagtatctgtggcagagcgccaggcggcgattgctcgctttaatcaggataagacacgttttgttttcttgctgtctacacgatcatgtggacttggtattaatttggcaactgcagatactgttatcatatatgattcagatttcaacccacatgctgatatacaggcgatgaacagggcacacagaattggacaatcgaatagactcctggtttacaggcttgtgaatcacagaaagaagtggaagatatcattcgctggggtacagaagaactctttgggagtagtgacagtgtggatggtaaagatagcaatgaagcctcaggttctgttgctgatgttgaatttaagcatagaagaaaaaccggtggcctaggtgatgtttatgaggacaaatgtattggtggttctaccaaacttgtttgggatgaaaatgctattttgaagctgcttgatagatcaaaccttccatcatcagtggccgaaagcactgatggggatctggacaatgatatgcttggtactgtgaagtcaatagactggaatgatgagctgaatgaccaccctggtaccaatgaggatattgcacctattgataatgatgggagtgagttggcatctgaatcaaagcaaggtgctactaatcgtttagaagaaaatgaatgggataaacttttacgtgtcagatgggagcaatatcaaatagaggaggaggcatctcttggtcgaggtaaacgtttaaggaaggctgtttcttacagagagacatttgcaacacttcctaatgaagcattaagtgagggctctgatgagggagatgaaccaaagagagaatatacagcagctggactggtcttgaaggaaaaatatggaaagcttcgagctagacaaaaggaaaggattgcgcagcgacacattatcaagaactatgctgttgataatcttgaggagttcatgactccatatatctctattgctaatgaacctgctgaaaatcctttgataatcgtagaagacccaagttcttcacagctatgtggtgctaaatgtttcagtgaatcaactggagaaatgaggcaatcctccaagaaatcaaggagatattctgaaatccctcaagatctttatgccagaattcctgataacgctgcttcatccaaggacaactcaaaggccaccgatgtcttcaatccagggaccccaaatcacctgctacctgtacttggcctttgtgctccaaatgctgatcaggtgaactcatacaaaaactcaatttgtgcaccaagcataaaggagcataaaagggccagtggtgacgtagtcaacaaacaactgtcaactcccgctgaccattctaatgagcttagaaacgaagttcaatcagcttctgataaggtcatctttcctggtgcatctgaggaagctttgcgaaggataagtaacatgatcccagataattattttcccttcagtcatattcctcctatatcagggaaggcggttgatcctgttgaatatattggagcttcgaatgcatcatttcaagggaaactgggtcttccaaacttcagtctggaagacaacactccacttaagcatattaagcctatacctgatatatttccttacctgtcactgggtgctcataaggattatattcgtagttctgtcccagagttgccagatagttcattattaccaaacttcatggcagatattgctggtacttcaaagcaaaaatcattcatgtctggtccacttcctgggctgggtcttagcccaggacaaccaatccatttgactatgcctgataatcacaagaaagtcttggacaacataatgatgcgtgctcagtatgcctcaaacaaattcttgaagaagagatcaaaactagattattggtcagaggatgaacttgatgctctgtggataggagttcgtaggcatggaaggggaaattgggatgctatgcttagagatccaaagttaaagtttttgaacaaccgaactagtgaagagctggcctcgagatggattttggaggagcaaaagattatagatgaacctatgtctgcagccacaagacgttctaactcaacagcatttcctggaatatctgatgcaatgatgtctcgggcgctcaatgaaagtaatttatctaagatgaggatggagcagcctaaattgcagtcccacgtaactgatattcagttaggttcgagtgatatcctatccagatttcctcatgttgaggctcctaattacattaactcaggggagggtggcccacctcagataccatggcaggatttcaagcatagatcaagttatggtggtgattttcctggcggtgcatttgacaagttggagaaacctgatgttggactgatcccgccatttatgcctaatcctttcatgactgatagcattgattcacttcccataaacagaaaaaacaatagttccattccgcgtagtgaaatcagatcaagttctcgtgagaacattcttttttctggtgtttcggatggacaaatcaacttgcttcatgagatgcagcgtcatgtgaggtcaggcaaacaacccattgagataaagctcaaccacatagaccactcaaatcctcagcttggtaatgctagtgacctcggaggtttaaaatcaaacaagttacctcattggcttcaggaggctgtacgtgctcctgcttcatctaagccacctgaacgtgggctaccagcaactgtctcagcaattgctcagtccatgtgccttcttcttggagaacaagaaccatcaatacctccattcttgatcctgggaacccctctttctcccccaaaagatccaaggattaattcaaagaagaggaaactccgcaaagctcatcaatctacctctcatgtaggtgattgcatcgctacccaagcacccccatccgttaaagcttcagctgctcctcttgctgtcgattgcaatgatggtgcgccttcactcaacttgaactctgcattgctgtcatcttcagctgtaagcaagaagctagatgagttacctcccacatttaaagaatcaaaccaaaccatggatggttcagaagctgttgcaggcaagttggaggctcctgaaattggttgtcaggtaactggttcctctccagtagatgacaaagctagagaatcttcaggatcaccagtgaaggatactcctgatgctggagtcagattgcaaggatcagataactcagctatggcattttctgcactcccacttgaagcacctgtgacaagcagcagagcagagcctgtggcatgtgatggcagtgacatgaaagaggatattccactagacgctgaaagcaacgggaacctggaggagcgatgaactggctcctcttgtgaacatggatgcatcacatcaagtatctgctaaaacgtcaacggagattggatgaaatgttctcagatgagcattagacttgagccagttagctcgacattcctttctcttccgttgagcagaatactgggattttccctctcccaatgtttccagtgttgatgatctcatgttgtgtaatgctttagtgcagagtgcagataggataaaattcaacgacaagtggtgcttcttagcagtagttgggcactagtccgtcgggagcaactcttggaaacctgtatacaagaaatgtatatttttgctaacatggtgttggttgggtgtgtagactgtagaccgctattcatttatttatgcgtatatggttcagtaatttgccgtctgtctagcggtcgctgtaagagtagacatggtgatgataatacctcgccttgagtggtggcctgatagaacatgaaactcactttccccagctgttattgtttgataattgtagcggatgcctttatggttggactaaagagaaagctgagatgttgtgtttacttcgcaaaggagagtttttactgtttttgtgggaaaccctatccctcacaaggggttgtgtaatgtatatatagactgagttagatgagtcaggcttattacacaggggtgacacggtaaatacacgtggtaaac

SEQ ID NO: 22432 - DNA, 4594 bp, Zea Mays
gtccgctccaccaatcccgtctcccccgaccacggccgcgcctggagcggcgggccgcgcgcggccaccctcgccgtctccacgccaccgcggcgagcgcggcgcccactcgcccaccgggcgcaccctcccccacgtgtcccccctgccgcctgagggccccgcctgtcacccaccgtccccggggtgggcagccgaaagcgacgcgtgaagcgctctgccctgcctgctgccctcagcgctcgcctctcgtcacgcgcccccttcacaacccccgatgcgatgggtgcccctgcccctcgatagtcgcgccgctctcctgcccgttcggccgttccccatttgcctcgtcgcccaccgccccattagcgccgccctcccctatccgacccaacgccgccgccgccgccgcatagacctcgccggcgcctctgcgccgccccgtggcctccagaggtgctattcgcgcgcgatccgccgctgcgtccgtcgctctggcatcgattcggcggcgctgggagtatgtctctggtgcaagtgtgctgaagatgaaggagaggagctctttatgtgaaagtgcagccgatggaaactggggtttgaaatataaaaggaaaagaagcaagttaaccgttagcccatctaatgagaatgaggctacctcaccaacatctgactctccaatgagccatggttccaccaaaaagaagttgaagcatgacactaacatttctccatcagccaagaagataagaggacacgatgggtatttttttgagtgtgtagaatgtgatcttggtggcaatttgctatgttgtgatagctgtcctcgtgtttaccacttggaatgcctcaatcctcctcttaagcgtctaccccctgggaagtggcaatgtccaagatgccgtccgaaaaaaggtagcttgaagatgttaggtaatgcagaggttggcacttctaaacatgaaaaaagtacaaggacatatgcaggtacgacatcaggtagtccaccttcgcatacaaaagtctcctttaagaccaggaactccacacaagacaaaactggatcaaaagaacaaggaaaacagtcatctggtggcacaatgatgggtggtgacccgaataatgaagttgagaaaaagaacacattgatattacatttgaagaagcactcaatgaaggaattatcagagaatgctaaacctttgaagtcaaaatttgttggagagccttcagaagagaaaattgttaaacatggaagtgtcttgaaactcaagaaacattcagaccgtatggacttgtctccaaataaatctaaaagcagggggcaaaatagtcagagagagagtaaaaggcctggcacaaaaaagcttaaatattcaatgtctgatgatgacagtgtttcctcatcagaaccatcgacatctcttgataacaatgaaccaccaccaaaaagaaaaccctcagatggaaaagcaccttcatccagtaccaagaaagggaaaaagaaagtgaagttcattgagaaaaggcactctgaggaacagtgtgtggtaggagacaaaacaacgacttcccaggaggatcagcaggtcgatcgcattctaggctgtcggcttcaaacaaacaaaatcaacccactgtcccatgcttcattcaagcagtttgaatcagctaatctccaggtggaagatatggctcttccgcttgcttccgctggcattcctaataaatctcatgatggaactgagtcttctagaaatggtacagtcgaggatatatgtgctgatgaatcagccaatcatagtggtcacagtttggaaatgcagaaggataggaacagtaaatcccatgaaaacgagtcatgtaaacgagaacaaggcaataatatattgtcaatatgttttgttgatgagaccagtataatgaaagatgatcaagtaggcagagagaatgttgcagcttccaaaaagggtgaagatgcgacatatgatttacctgcagaaaaggatgataccaaactaccagtcactagagctgatgcaatgaccaggaccaatcaagagcatacagatgagagcaaacagcatgggaaaataaagcaaataacagataaagactacaatgatgctggatatgagttcttgatcaagtgggttggaaaatcaaatatccacaacacctgggtttctgaatccgaggtaaaaatattagcaaaaaggaaactagaaaactacaaaacgaagtatggaacgagtttgataaacatttgcaaggaacagtggtgccagccacaacgagttattgctcttcgagcatctgtagatgaagtggaagaggctttaatcaaatggtgtggtctttcttatgatgaatgcacttgggaaagattagatgaacctacactgatgaaatatagccacttggtcactcagttcaagaattttgagtgccaggctttggataaagatgtggtaaaagattatgcaaacacaaggaaccgacatgagcttaatgtgttagctgatcagccaaaagaacttaagggcggcatgctcttccctcatcaactagaagcattgaactggctacgtaaatgctggcacaagtccaaaaatgttatccttgctgatgagatgggtcttggaaagacagtgtcagcttgtgcttttctatcatccttatgttgtgaatttaaaattaatttgccatgtcttgtcttggttcctctttctacaatgcccaattggatggctgaatttgcatcttgggctcctcatttaaatgttgtggaatatcatggttctgcaaggtcaagatctatcattcgccagtatgagtggcatgcgggcgattcaagccagattggcaaaacaaagagatcgtacaagttaaatgttttgcttaccacttacgaaatggtgcttgttgatgctgcatatcttcgttctgtctcatgggaagttcttgtagttgatgagggacatcgccttaagaattctagcagcaaactctttagtttacttaattcgttatcatttcagcacagagttttgttgactggaactcctttacagaacaacattggtgaaatgtacaacttattgaacttcttacagcctacttctttcccttctctgtcatcatttgaggagaaatttaatgaccttacaacagcagaaaaagtagaggagctgaagaaacttgtagctcctcacatgcttcggaggttgaaaaaagatgcaatgcaaaacatccctccaaagacagagcgaatggtacctgttgaactgacatcaatccaggctgaatactaccgtgctatgcttacaaagaactatcaagtactgcgcaacattggaaaaggtggcgctcaccagtctttattgaacatagtaatgcagcttcggaaagtctgcaaccatccttatcttattcatggaactgaacctgaatctggttcacctgaatttttgcatgagatgcgcataaaggcctcagcgaagctaactttgttgcactctatgctaaaaatattacacaaggaaggccaccgtgtccttatattctctcagatgacaaaacttcttgacatccttgaagattatctgactttagaatttggccctaaaacatttgaaagagttgatggctcagtatctgtggcagagcgccaggcggcgattgctcgctttaatcaggataagacacgttttgttttcttgctgtctacacgatcatgtggacttggtattaatttggcaactgcagatactgttatcatatatgattcagatttcaacccacatgctgatatacaggcgatgaacagggcacacagaattggacaatcgaatagactcctggtttacaggcttgtggtacgtgctagtgttgaagagcgtatcttgcaattagccaagaagaaactgatgcttgatcaacttttcgttaacaaatcagaatcacagaaagaagtggaagatatcattcgctggggtacagaagaactctttgggagtagtgacagtgtggatggtaaagatagcaatgaagcctcaggttctgttgctgatgttgaatttaagcatagaagaaaaaccggtggcctaggtgatgtttatgaggacaaatgtattggtggttctaccaaacttgtttgggatgaaaatgctattttgaagctgcttgatagatcaaaccttccatcatcagtggccgaaagcactgatggggatctggacaatgatatgcttggtactgtgaagagtcaatagactggaatgatgagctgaatgaccaccctggtaccaatgaggatattgcacctattgataatgatgggagtgagttggcatctgaatcaaagcaaggtgctactaatcgtttagaagaaaatgaatgggataaacttttacgtgtcagatgggagcaatatcaaatagaggaggaggcatctcttggtcgaggtaaacgtttaaggaaggctgtttcttacagagagacatttgcaacacttcctaatgaagcattaagtgagggctctgatgagggagatgaaccaaagagagaatatacagcagctggactggtc

SEQ ID NO: 22433 - DNA, 4596 bp, Zea Mays
gtccgctccaccaatcccgtctcccccgaccacggccgcgcctggagcggcgggccgcgcgcggccaccctcgccgtctccacgccaccgcggcgagcgcggcgcccactcgcccaccgggcgcaccctcccccacgtgtcccccctgccgcctgagggccccgcctgtcacccaccgtccccggggtgggcagccgaaagcgacgcgtgaagcgctctgccctgcctgctgccctcagcgctcgcctctcgtcacgcgcccccttcacaacccccgatgcgatgggtgcccctgcccctcgatagtcgcgccgctctcctgcccgttcggccgttccccatttgcctcgtcgcccaccgccccattagcgccgccctcccctatccgacccaacgccgccgccgccgccgcatagacctcgccggcgcctctgcgccgccccgtggcctccagaggtgctattcgcgcgcgatccgccgctgcgtccgtcgctctggcatcgattcggcggcgctgggagtatgtctctggtgcaagtgtgctgaagatgaaggagaggagctctttatgtgaaagtgcagccgatggaaactggggtttgaaatataaaaggaaaagaagcaagttaaccgttagcccatctaatgagaatgaggctacctcaccaacatctgactctccaatgagccatggttccaccaaaaagaagttgaagcatgacactaacatttctccatcagccaagaagataagaggacacgatgggtatttttttgagtgtgtagaatgtgatcttggtggcaatttgctatgttgtgatagctgtcctcgtgtttaccacttggaatgcctcaatcctcctcttaagcgtctaccccctgggaagtggcaatgtccaagatgccgtccgaaaaaaggtagcttgaagatgttaggtaatgcagaggttggcacttctaaacatgaaaaaagtacaaggacatatgcaggtacgacatcaggtagtccaccttcgcatacaaaagtctcctttaagaccaggaactccacacaagacaaaactggatcaaaagaacaaggaaaacagtcatctggtggcacaatgatgggtggtgacccgaataatgaagttgagaaaaagaacacattgatattacatttgaagaagcactcaatgaaggaattatcagagaatgctaaacctttgaagtcaaaatttgttggagagccttcagaagagaaaattgttaaacatggaagtgtcttgaaactcaagaaacattcagaccgtatggacttgtctccaaataaatctaaaagcagggggcaaaatagtcagagagagagtaaaaggcctggcacaaaaaagcttaaatattcaatgtctgatgatgacagtgtttcctcatcagaaccatcgacatctcttgataacaatgaaccaccaccaaaaagaaaaccctcagatggaaaagcaccttcatccagtaccaagaaagggaaaaagaaagtgaagttcattgagaaaaggcactctgaggaacagtgtgtggtaggagacaaaacaacgacttcccaggaggatcagcaggttggtcgatcgcattctaggctgtcggcttcaaacaaacaaaatcaacccactgtcccatgcttcattcaagcagtttgaatcagctaatctccaggtggaagatatggctcttccgcttgcttccgctggcattcctaataaatctcatgatggaactgagtcttctagaaatggtacagtcgaggatatatgtgctgatgaatcagccaatcatagtggtcacagtttggaaatgcagaaggataggaacagtaaatcccatgaaaacgagtcatgtaaacgagaacaaggcaataatatattgtcaatatgttttgttgatgagaccagtataatgaaagatgatcaagtaggcagagagaatgttgcagcttccaaaaagggtgaagatgcgacatatgatttacctgcagaaaaggatgataccaaactaccagtcactagagctgatgcaatgaccaggaccaatcaagagcatacagatgagagcaaacagcatgggaaaataaagcaaataacagataaagactacaatgatgctggatatgagttcttgatcaagtgggttggaaaatcaaatatccacaacacctgggtttctgaatccgaggtaaaaatattagcaaaaaggaaactagaaaactacaaaacgaagtatggaacgagtttgataaacatttgcaaggaacagtggtgccagccacaacgagttattgctcttcgagcatctgtagatgaagtggaagaggctttaatcaaatggtgtggtctttcttatgatgaatgcacttgggaaagattagatgaacctacactgatgaaatatagccacttggtcactcagttcaagaattttgagtgccaggctttggataaagatgtggtaaaagattatgcaaacacaaggaaccgacatgagcttaatgtgttagctgatcagccaaaagaacttaagggcggcatgctcttccctcatcaactagaagcattgaactggctacgtaaatgctggcacaagtccaaaaatgttatccttgctgatgagatgggtcttggaaagacagtgtcagcttgtgcttttctatcatccttatgttgtgaatttaaaattaatttgccatgtcttgtcttggttcctctttctacaatgcccaattggatggctgaatttgcatcttgggctcctcatttaaatgttgtggaatatcatggttctgcaaggtcaagatctatcattcgccagtatgagtggcatgcgggcgattcaagccagattggcaaaacaaagagatcgtacaagttaaatgttttgcttaccacttacgaaatggtgcttgttgatgctgcatatcttcgttctgtctcatgggaagttcttgtagttgatgagggacatcgccttaagaattctagcagcaaactctttagtttacttaattcgttatcatttcagcacagagttttgttgactggaactcctttacagaacaacattggtgaaatgtacaacttattgaacttcttacagcctacttctttcccttctctgtcatcatttgaggagaaatttaatgaccttacaacagcagaaaaagtagaggagctgaagaaacttgtagctcctcacatgcttcggaggttgaaaaaagatgcaatgcaaaacatccctccaaagacagagcgaatggtacctgttgaactgacatcaatccaggctgaatactaccgtgctatgcttacaaagaactatcaagtactgcgcaacattggaaaaggtggcgctcaccagtctttattgaacatagtaatgcagcttcggaaagtctgcaaccatccttatcttattcatggaactgaacctgaatctggttcacctgaatttttgcatgagatgcgcataaaggcctcagcgaagctaactttgttgcactctatgctaaaaatattacacaaggaaggccaccgtgtccttatattctctcagatgacaaaacttcttgacatccttgaagattatctgactttagaatttggccctaaaacatttgaaagagttgatggctcagtatctgtggcagagcgccaggcggcgattgctcgctttaatcaggataagacacgttttgttttcttgctgtctacacgatcatgtggacttggtattaatttggcaactgcagatactgttatcatatatgattcagatttcaacccacatgctgatatacaggcgatgaacagggcacacagaattggacaatcgaatagactcctggtttacaggcttgtggtacgtgctagtgttgaagagcgtatcttgcaattagccaagaagaaactgatgcttgatcaacttttcgttaacaaatcagaatcacagaaagaagtggaagatatcattcgctggggtacagaagaactctttgggagtagtgacagtgtggatggtaaagatagcaatgaagcctcaggttctgttgctgatgttgaatttaagcatagaagaaaaaccggtggcctaggtgatgtttatgaggacaaatgtattggtggttctaccaaacttgtttgggatgaaaatgctattttgaagctgcttgatagatcaaaccttccatcatcagtggccgaaagcactgatggggatctggacaatgatatgcttggtactgtgaagtcaatagactggaatgatgagctgaatgaccaccctggtaccaatgaggatattgcacctattgataatgatgggagtgagttggcatctgaatcaaagcaaggtgctactaatcgtttagaagaaaatgaatgggataaacttttacgtgtcagatgggagcaatatcaaatagaggaggaggcatctcttggtcgaggtaaacgtttaaggaaggctgtttcttacagagagacatttgcaacacttcctaatgaagcattaagtgagggctctgatgagggagatgaaccaaagagagaatatacagcagctggactggtc

SEQ ID NO: 22434 - DNA, 7281 bp, Zea Mays
aagctagttacaggcggcgagctgcttttgcaagctctgatgcttctgccgcagagttgacaagtatgtctctggtgcaagtgtgctgaagatgaaggagaggagctctttatgtgaaagtgcagccgatggaaactggggtttgaaatataaaaggaaaagaagcaagttaaccgttagcccatctaatgagaatgaggctacctcaccaacatctgactctccaatgagccatggttccaccaaaaagaagttgaagcatgacactaacatttctccatcagccaagaagataagaggacacgatgggtatttttttgagtgtgtagaatgtgatcttggtggcaatttgctatgttgtgatagctgtcctcgtgtttaccacttggaatgcctcaatcctcctcttaagcgtctaccccctgggaagtggcaatgtccaagatgccgtccgaaaaaaggtagcttgaagatgttaggtaatgcagaggttggcacttctaaacatgaaaaaagtacaaggacatatgcaggtacgacatcaggtagtccaccttcgcatacaaaagtctcctttaagaccaggaactccacacaagacaaaactggatcaaaagaacaaggaaaacagtcatctggtggcacaatgatgggtggtgacccgaataatgaagttgagaaaaagaacacattgatattacatttgaagaagcactcaatgaaggaattatcagagaatgctaaacctttgaagtcaaaatttgttggagagccttcagaagagaaaattgttaaacatggaagtgtcttgaaactcaagaaacattcagaccgtatggacttgtctccaaataaatctaaaagcagggggcaaaatagtcagagagagagtaaaaggcctggcacaaaaaagcttaaatattcaatgtctgatgatgacagtgtttcctcatcagaaccatcgacatctcttgataacaatgaaccaccaccaaaaagaaaaccctcagatggaaaagcaccttcatccagtaccaagaaagggaaaaagaaagtgaagttcattgagaaaaggcactctgaggaacagtgtgtggtaggagacaaaacaacgacttcccaggaggatcagcaggtcgatcgcattctaggctgtcggcttcaaacaaacaaaatcaacccactgtcccatgcttcattcaagcagtttgaatcagctaatctccaggtggaagatatggctcttccgcttgcttccgctggcattcctaataaatctcatgatggaactgagtcttctagaaatggtacagtcgaggatatatgtgctgatgaatcagccaatcatagtggtcacagtttggaaatgcagaaggataggaacagtaaatcccatgaaaacgagtcatgtaaacgagaacaaggcaataatatattgtcaatatgttttgttgatgagaccagtataatgaaagatgatcaagtaggcagagagaatgttgcagcttccaaaaagggtgaagatgcgacatatgatttacctgcagaaaaggatgataccaaactaccagtcactagagctgatgcaatgaccaggaccaatcaagagcatacagatgagagcaaacagcatgggaaaataaagcaaataacagataaagactacaatgatgctggatatgagttcttgatcaagtgggttggaaaatcaaatatccacaacacctgggtttctgaatccgaggtaaaaatattagcaaaaaggaaactagaaaactacaaaacgaagtatggaacgagtttgataaacatttgcaaggaacagtggtgccagccacaacgagttattgctcttcgagcatctgtagatgaagtggaagaggctttaatcaaatggtgtggtctttcttatgatgaatgcacttgggaaagattagatgaacctacactgatgaaatatagccacttggtcactcagttcaagaattttgagtgccaggctttggataaagatgtggtaaaagattatgcaaacacaaggaaccgacatgagcttaatgtgttagctgatcagccaaaagaacttaagggcggcatgctcttccctcatcaactagaagcattgaactggctacgtaaatgctggcacaagtccaaaaatgttatccttgctgatgagatgggtcttggaaagacagtgtcagcttgtgcttttctatcatccttatgttgtgaatttaaaattaatttgccatgtcttgtcttggttcctctttctacaatgcccaattggatggctgaatttgcatcttgggctcctcatttaaatgttgtggaatatcatggttctgcaaggtcaagatctatcattcgccagtatgagtggcatgcgggcgattcaagccagattggcaaaacaaagagatcgtacaagttaaatgttttgcttaccacttacgaaatggtgcttgttgatgctgcatatcttcgttctgtctcatgggaagttcttgtagttgatgagggacatcgccttaagaattctagcagcaaactctttagtttacttaattcgttatcatttcagcacagagttttgttgactggaactcctttacagaacaacattggtgaaatgtacaacttattgaacttcttacagcctacttctttcccttctctgtcatcatttgaggagaaatttaatgaccttacaacagcagaaaaagtagaggagctgaagaaacttgtagctcctcacatgcttcggaggttgaaaaaagatgcaatgcaaaacatccctccaaagacagagcgaatggtacctgttgaactgacatcaatccaggctgaatactaccgtgctatgcttacaaagaactatcaagtactgcgcaacattggaaaaggtggcgctcaccagtctttattgaacatagtaatgcagcttcggaaagtctgcaaccatccttatcttattcatggaactgaacctgaatctggttcacctgaatttttgcatgagatgcgcataaaggcctcagcgaagctaactttgttgcactctatgctaaaaatattacacaaggaaggccaccgtgtccttatattctctcagatgacaaaacttcttgacatccttgaagattatctgactttagaatttggccctaaaacatttgaaagagttgatggctcagtatctgtggcagagcgccaggcggcgattgctcgctttaatcaggataagacacgttttgttttcttgctgtctacacgatcatgtggacttggtattaatttggcaactgcagatactgttatcatatatgattcagatttcaacccacatgctgatatacaggcgatgaacagggcacacagaattggacaatcgaatagactcctggtttacaggcttgtgaatcacagaaagaagtggaagatatcattcgctggggtacagaagaactctttgggagtagtgacagtgtggatggtaaagatagcaatgaagcctcaggttctgttgctgatgttgaatttaagcatagaagaaaaaccggtggcctaggtgatgtttatgaggacaaatgtattggtggttctaccaaacttgtttgggatgaaaatgctattttgaagctgcttgatagatcaaaccttccatcatcagtggccgaaagcactgatggggatctggacaatgatatgcttggtactgtgaagtcaatagactggaatgatgagctgaatgaccaccctggtaccaatgaggatattgcacctattgataatgatgggagtgagttggcatctgaatcaaagcaaggtgctactaatcgtttagaagaaaatgaatgggataaacttttacgtgtcagatgggagcaatatcaaatagaggaggaggcatctcttggtcgaggtaaacgtttaaggaaggctgtttcttacagagagacatttgcaacacttcctaatgaagcattaagtgagggctctgatgagggagatgaaccaaagagagaatatacagcagctggactggtcttgaaggaaaaatatggaaagcttcgagctagacaaaaggaaaggattgcgcagcgacacattatcaagaactatgctgttgataatcttgaggagttcatgactccatatatctctattgctaatgaacctgctgaaaatcctttgataatcgtagaagacccaagttcttcacagctatgtggtgctaaatgtttcagtgaatcaactggagaaatgaggcaatcctccaagaaatcaaggagatattctgaaatccctcaagatctttatgccagaattcctgataacgctgcttcatccaaggacaactcaaaggccaccgatgtcttcaatccagggaccccaaatcacctgctacctgtacttggcctttgtgctccaaatgctgatcaggtgaactcatacaaaaactcaatttgtgcaccaagcataaaggagcataaaagggccagtggtgacgtagtcaacaaacaactgtcaactcccgctgaccattctaatgagcttagaaacgaagttcaatcagcttctgataaggtcatctttcctggtgcatctgaggaagctttgcgaaggataagtaacatgatcccagataattattttcccttcagtcatattcctcctatatcagggaaggcggttgatcctgttgaatatattggagcttcgaatgcatcatttcaagggaaactgggtcttccaaacttcagtctggaagacaacactccacttaagcatattaagcctatacctgatatatttccttacctgtcactgggtgctcataaggattatattcgtagttctgtcccagagttgccagatagttcattattaccaaacttcatggcagatattgctggtacttcaaagcaaaaatcattcatgtctggtccacttcctgggctgggtcttagcccaggacaaccaatccatttgactatgcctgataatcacaagaaagtcttggacaacataatgatgcgtgctcagtatgcctcaaacaaattcttgaagaagagatcaaaactagattattggtcagaggatgaacttgatgctctgtggataggagttcgtaggcatggaaggggaaattgggatgctatgcttagagatccaaagttaaagtttttgaacaaccgaactagtgaagagctggcctcgagatggattttggaggagcaaaagattatagatgaacctatgtctgcagccacaagacgttctaactcaacagcatttcctggaatatctgatgcaatgatgtctcgggcgctcaatgaaagtaatttatctaagatgaggatggagcagcctaaattgcagtcccacgtaactgatattcagttaggttcgagtgatatcctatccagatttcctcatgttgaggctcctaattacattaactcaggggagggtggcccacctcagataccatggcaggatttcaagcatagatcaagttatggtggtgattttcctggcggtgcatttgacaagttggagaaacctgatgttggactgatcccgccatttatgcctaatcctttcatgactgatagcattgattcacttcccataaacagaaaaaacaatagttccattccgcgtagtgaaatcagatcaagttctcgtgagaacattcttttttctggtgtttcggatggacaaatcaacttgcttcatgagatgcagcgtcatgtgaggtcaggcaaacaacccattgagataaagctcaaccacatagaccactcaaatcctcagcttggtaatgctagtgacctcggaggtttaaaatcaaacaagttacctcattggcttcaggaggctgtacgtgctcctgcttcatctaagccacctgaacgtgggctaccagcaactgtctcagcaattgctcagtccatgtgccttcttcttggagaacaagaaccatcaatacctccattcttgatcctgggaacccctctttctcccccaaaagatccaaggattaattcaaagaagaggaaactccgcaaagctcatcaatctacctctcatgtaggtgattgcatcgctacccaagcacccccatccgttaaagcttcagctgctcctcttgctgtcgattgcaatgatggtgcgccttcactcaacttgaactctgcattgctgtcatcttcagctgtaagcaagaagctagatgagttacctcccacatttaaagaatcaaaccaaaccatggatggttcagaagctgttgcaggcaagttggaggctcctgaaattggttgtcaggtaactggttcctctccagtagatgacaaagctagagaatcttcaggatcaccagtgaaggatactcctgatgctggagtcagattgcaaggatcagataactcagctatggcattttctgcactcccacttgaagcacctgtgacaagcagcagagcagagcctgtggcatgtgatggcagtgacatgaaagaggatattccactagacgctgaaagcaacgggaacctggaggagcgatgaactggctcctcttgtgaacatggatgcatcacatcaagtatctgctaaaacgtcaacggagattggatgaaatgttctcagatgagcattagacttgagccagttagctcgacattcctttctcttccgttgagcagaatactgggattttccctctcccaatgtttccagtgttgatgatctcatgttgtgtaatgctttagtgcagagtgcagataggataaaattcaacgacaagtggtgcttcttagcagtagttgggcactagtccgtcgggagcaactcttggaaacctgtatacaagaaatgtatatttttgctaacatggtgttggttgggtgtgtagactgtagaccgctattcatttatttatgcgtatatggttcagtaatttgccgtctgtctagcggtcgctgtaagagtagacatggtgatgataatacctcgccttgagtggtggcctgatagaacatgaaactcactttccccagctgttattgtttgataattgtagcggatgcctttatggttggactaaagagaaagctgagatgttgtgtttacttcgcaaaggagagtttttactgtttttgtgggaaaccctatccctcacaaggggttgtgtaatgtatatatagactgagttagatgagtcaggcttattacacaggggtgacacggtaaatacacgtggtaaac

SEQ ID NO: 22435 - DNA, 7344 bp, Zea Mays
catcatatgagcttttggggaccagcaagatatggaaaattcctgtatgtctctggtgcaagtgtgctgaagatgaaggagaggagctctttatgtgaaagtgcagccgatggaaactggggtttgaaatataaaaggaaaagaagcaagttaaccgttagcccatctaatgagaatgaggctacctcaccaacatctgactctccaatgagccatggttccaccaaaaagaagttgaagcatgacactaacatttctccatcagccaagaagataagaggacacgatgggtatttttttgagtgtgtagaatgtgatcttggtggcaatttgctatgttgtgatagctgtcctcgtgtttaccacttggaatgcctcaatcctcctcttaagcgtctaccccctgggaagtggcaatgtccaagatgccgtccgaaaaaaggtagcttgaagatgttaggtaatgcagaggttggcacttctaaacatgaaaaaagtacaaggacatatgcaggtacgacatcaggtagtccaccttcgcatacaaaagtctcctttaagaccaggaactccacacaagacaaaactggatcaaaagaacaaggaaaacagtcatctggtggcacaatgatgggtggtgacccgaataatgaagttgagaaaaagaacacattgatattacatttgaagaagcactcaatgaaggaattatcagagaatgctaaacctttgaagtcaaaatttgttggagagccttcagaagagaaaattgttaaacatggaagtgtcttgaaactcaagaaacattcagaccgtatggacttgtctccaaataaatctaaaagcagggggcaaaatagtcagagagagagtaaaaggcctggcacaaaaaagcttaaatattcaatgtctgatgatgacagtgtttcctcatcagaaccatcgacatctcttgataacaatgaaccaccaccaaaaagaaaaccctcagatggaaaagcaccttcatccagtaccaagaaagggaaaaagaaagtgaagttcattgagaaaaggcactctgaggaacagtgtgtggtaggagacaaaacaacgacttcccaggaggatcagcaggtcgatcgcattctaggctgtcggcttcaaacaaacaaaatcaacccactgtcccatgcttcattcaagcagtttgaatcagctaatctccaggtggaagatatggctcttccgcttgcttccgctggcattcctaataaatctcatgatggaactgagtcttctagaaatggtacagtcgaggatatatgtgctgatgaatcagccaatcatagtggtcacagtttggaaatgcagaaggataggaacagtaaatcccatgaaaacgagtcatgtaaacgagaacaaggcaataatatattgtcaatatgttttgttgatgagaccagtataatgaaagatgatcaagtaggcagagagaatgttgcagcttccaaaaagggtgaagatgcgacatatgatttacctgcagaaaaggatgataccaaactaccagtcactagagctgatgcaatgaccaggaccaatcaagagcatacagatgagagcaaacagcatgggaaaataaagcaaataacagataaagactacaatgatgctggatatgagttcttgatcaagtgggttggaaaatcaaatatccacaacacctgggtttctgaatccgaggtaaaaatattagcaaaaaggaaactagaaaactacaaaacgaagtatggaacgagtttgataaacatttgcaaggaacagtggtgccagccacaacgagttattgctcttcgagcatctgtagatgaagtggaagaggctttaatcaaatggtgtggtctttcttatgatgaatgcacttgggaaagattagatgaacctacactgatgaaatatagccacttggtcactcagttcaagaattttgagtgccaggctttggataaagatgtggtaaaagattatgcaaacacaaggaaccgacatgagcttaatgtgttagctgatcagccaaaagaacttaagggcggcatgctcttccctcatcaactagaagcattgaactggctacgtaaatgctggcacaagtccaaaaatgttatccttgctgatgagatgggtcttggaaagacagtgtcagcttgtgcttttctatcatccttatgttgtgaatttaaaattaatttgccatgtcttgtcttggttcctctttctacaatgcccaattggatggctgaatttgcatcttgggctcctcatttaaatgttgtggaatatcatggttctgcaaggtcaagatctatcattcgccagtatgagtggcatgcgggcgattcaagccagattggcaaaacaaagagatcgtacaagttaaatgttttgcttaccacttacgaaatggtgcttgttgatgctgcatatcttcgttctgtctcatgggaagttcttgtagttgatgagggacatcgccttaagaattctagcagcaaactctttagtttacttaattcgttatcatttcagcacagagttttgttgactggaactcctttacagaacaacattggtgaaatgtacaacttattgaacttcttacagcctacttctttcccttctctgtcatcatttgaggagaaatttaatgaccttacaacagcagaaaaagtagaggagctgaagaaacttgtagctcctcacatgcttcggaggttgaaaaaagatgcaatgcaaaacatccctccaaagacagagcgaatggtacctgttgaactgacatcaatccaggctgaatactaccgtgctatgcttacaaagaactatcaagtactgcgcaacattggaaaaggtggcgctcaccagtctttattgaacatagtaatgcagcttcggaaagtctgcaaccatccttatcttattcatggaactgaacctgaatctggttcacctgaatttttgcatgagatgcgcataaaggcctcagcgaagctaactttgttgcactctatgctaaaaatattacacaaggaaggccaccgtgtccttatattctctcagatgacaaaacttcttgacatccttgaagattatctgactttagaatttggccctaaaacatttgaaagagttgatggctcagtatctgtggcagagcgccaggcggcgattgctcgctttaatcaggataagacacgttttgttttcttgctgtctacacgatcatgtggacttggtattaatttggcaactgcagatactgttatcatatatgattcagatttcaacccacatgctgatatacaggcgatgaacagggcacacagaattggacaatcgaatagactcctggtttacaggcttgtggtacgtgctagtgttgaagagcgtatcttgcaattagccaagaagaaactgatgcttgatcaacttttcgttaacaaatcagaatcacagaaagaagtggaagatatcattcgctggggtacagaagaactctttgggagtagtgacagtgtggatggtaaagatagcaatgaagcctcaggttctgttgctgatgttgaatttaagcatagaagaaaaaccggtggcctaggtgatgtttatgaggacaaatgtattggtggttctaccaaacttgtttgggatgaaaatgctattttgaagctgcttgatagatcaaaccttccatcatcagtggccgaaagcactgatggggatctggacaatgatatgcttggtactgtgaagtcaatagactggaatgatgagctgaatgaccaccctggtaccaatgaggatattgcacctattgataatgatgggagtgagttggcatctgaatcaaagcaaggtgctactaatcgtttagaagaaaatgaatgggataaacttttacgtgtcagatgggagcaatatcaaatagaggaggaggcatctcttggtcgaggtaaacgtttaaggaaggctgtttcttacagagagacatttgcaacacttcctaatgaagcattaagtgagggctctgatgagggagatgaaccaaagagagaatatacagcagctggactggtcttgaaggaaaaatatggaaagcttcgagctagacaaaaggaaaggattgcgcagcgacacattatcaagaactatgctgttgataatcttgaggagttcatgactccatatatctctattgctaatgaacctgctgaaaatcctttgataatcgtagaagacccaagttcttcacagctatgtggtgctaaatgtttcagtgaatcaactggagaaatgaggcaatcctccaagaaatcaaggagatattctgaaatccctcaagatctttatgccagaattcctgataacgctgcttcatccaaggacaactcaaaggccaccgatgtcttcaatccagggaccccaaatcacctgctacctgtacttggcctttgtgctccaaatgctgatcaggtgaactcatacaaaaactcaatttgtgcaccaagcataaaggagcataaaagggccagtggtgacgtagtcaacaaacaactgtcaactcccgctgaccattctaatgagcttagaaacgaagttcaatcagcttctgataaggtcatctttcctggtgcatctgaggaagctttgcgaaggataagtaacatgatcccagataattattttcccttcagtcatattcctcctatatcagggaaggcggttgatcctgttgaatatattggagcttcgaatgcatcatttcaagggaaactgggtcttccaaacttcagtctggaagacaacactccacttaagcatattaagcctatacctgatatatttccttacctgtcactgggtgctcataaggattatattcgtagttctgtcccagagttgccagatagttcattattaccaaacttcatggcagatattgctggtacttcaaagcaaaaatcattcatgtctggtccacttcctgggctgggtcttagcccaggacaaccaatccatttgactatgcctgataatcacaagaaagtcttggacaacataatgatgcgtgctcagtatgcctcaaacaaattcttgaagaagagatcaaaactagattattggtcagaggatgaacttgatgctctgtggataggagttcgtaggcatggaaggggaaattgggatgctatgcttagagatccaaagttaaagtttttgaacaaccgaactagtgaagagctggcctcgagatggattttggaggagcaaaagattatagatgaacctatgtctgcagccacaagacgttctaactcaacagcatttcctggaatatctgatgcaatgatgtctcgggcgctcaatgaaagtaatttatctaagatgaggatggagcagcctaaattgcagtcccacgtaactgatattcagttaggttcgagtgatatcctatccagatttcctcatgttgaggctcctaattacattaactcaggggagggtggcccacctcagataccatggcaggatttcaagcatagatcaagttatggtggtgattttcctggcggtgcatttgacaagttggagaaacctgatgttggactgatcccgccatttatgcctaatcctttcatgactgatagcattgattcacttcccataaacagaaaaaacaatagttccattccgcgtagtgaaatcagatcaagttctcgtgagaacattcttttttctggtgtttcggatggacaaatcaacttgcttcatgagatgcagcgtcatgtgaggtcaggcaaacaacccattgagataaagctcaaccacatagaccactcaaatcctcagcttggtaatgctagtgacctcggaggtttaaaatcaaacaagttacctcattggcttcaggaggctgtacgtgctcctgcttcatctaagccacctgaacgtgggctaccagcaactgtctcagcaattgctcagtccatgtgccttcttcttggagaacaagaaccatcaatacctccattcttgatcctgggaacccctctttctcccccaaaagatccaaggattaattcaaagaagaggaaactccgcaaagctcatcaatctacctctcatgtaggtgattgcatcgctacccaagcacccccatccgttaaagcttcagctgctcctcttgctgtcgattgcaatgatggtgcgccttcactcaacttgaactctgcattgctgtcatcttcagctgtaagcaagaagctagatgagttacctcccacatttaaagaatcaaaccaaaccatggatggttcagaagctgttgcaggcaagttggaggctcctgaaattggttgtcaggtaactggttcctctccagtagatgacaaagctagagaatcttcaggatcaccagtgaaggatactcctgatgctggagtcagattgcaaggatcagataactcagctatggcattttctgcactcccacttgaagcacctgtgacaagcagcagagcagagcctgtggcatgtgatggcagtgacatgaaagaggatattccactagacgctgaaagcaacgggaacctggaggagcgatgaactggctcctcttgtgaacatggatgcatcacatcaagtatctgctaaaacgtcaacggagattggatgaaatgttctcagatgagcattagacttgagccagttagctcgacattcctttctcttccgttgagcagaatactgggattttccctctcccaatgtttccagtgttgatgatctcatgttgtgtaatgctttagtgcagagtgcagataggataaaattcaacgacaagtggtgcttcttagcagtagttgggcactagtccgtcgggagcaactcttggaaacctgtatacaagaaatgtatatttttgctaacatggtgttggttgggtgtgtagactgtagaccgctattcatttatttatgcgtatatggttcagtaatttgccgtctgtctagcggtcgctgtaagagtagacatggtgatgataatacctcgccttgagtggtggcctgatagaacatgaaactcactttccccagctgttattgtttgataattgtagcggatgcctttatggttggactaaagagaaagctgagatgttgtgtttacttcgcaaaggagagtttttactgtttttgtgggaaaccctatccctcacaaggggttgtgtaatgtatatatagactgagttagatgagtcaggcttattacacaggggtgacacggtaaatacacgtggtaaac

SEQ ID NO: 22436 - DNA, 7189 bp, Zea Mays
catcatatgagcttttggggaccagcaagatatggaaaattcctgtatgtctctggtgcaagtgtgctgaagatgaaggagaggagctctttatgtgaaagtgcagccgatggaaactggggtttgaaatataaaaggaaaagaagcaagttaaccgttagcccatctaatgagaatgaggctacctcaccaacatctgactctccaatgagccatggttccaccaaaaagaagttgaagcatgacactaacatttctccatcagccaagaagataagaggacacgatgggtatttttttgagtgtgtagaatgtgatcttggtggcaatttgctatgttgtgatagctgtcctcgtgtttaccacttggaatgcctcaatcctcctcttaagcgtctaccccctgggaagtggcaatgtccaagatgccgtccgaaaaaaggtagcttgaagatgttaggtaatgcagaggttggcacttctaaacatgaaaaaagtacaaggacatatgcaggtacgacatcaggtagtccaccttcgcatacaaaagtctcctttaagaccaggaactccacacaagacaaaactggatcaaaagaacaaggaaaacagtcatctggtggcacaatgatgggtggtgacccgaataatgaagttgagaaaaagaacacattgatattacatttgaagaagcactcaatgaaggaattatcagagaatgctaaacctttgaagtcaaaatttgttggagagccttcagaagagaaaattgttaaacatggaagtgtcttgaaactcaagaaacattcagaccgtatggacttgtctccaaataaatctaaaagcagggggcaaaatagtcagagagagagtaaaaggcctggcacaaaaaagcttaaatattcaatgtctgatgatgacagtgtttcctcatcagaaccatcgacatctcttgataacaatgaaccaccaccaaaaagaaaaccctcagatggaaaagcaccttcatccagtaccaagaaagggaaaaagaaagtgaagttcattgagaaaaggcactctgaggaacagtgtgtggtaggagacaaaacaacgacttcccaggaggatcagcaggtcgatcgcattctaggctgtcggcttcaaacaaacaaaatcaacccactgtcccatgcttcattcaagcagtttgaatcagctaatctccaggtggaagatatggctcttccgcttgcttccgctggcattcctaataaatctcatgatggaactgagtcttctagaaatggtacagtcgaggatatatgtgctgatgaatcagccaatcatagtggtcacagtttggaaatgcagaaggataggaacagtaaatcccatgaaaacgagtcatgtaaacgagaacaaggcaataatatattgtcaatatgttttgttgatgagaccagtataatgaaagatgatcaagtaggcagagagaatgttgcagcttccaaaaagggtgaagatgcgacatatgatttacctgcagaaaaggatgataccaaactaccagtcactagagctgatgcaatgaccaggaccaatcaagagcatacagatgagagcaaacagcatgggaaaataaagcaaataacagataaagactacaatgatgctggatatgagttcttgatcaagtgggttggaaaatcaaatatccacaacacctgggtttctgaatccgaggtaaaaatattagcaaaaaggaaactagaaaactacaaaacgaagtatggaacgagtttgataaacatttgcaaggaacagtggtgccagccacaacgagttattgctcttcgagcatctgtagatgaagtggaagaggctttaatcaaatggtgtggtctttcttatgatgaatgcacttgggaaagattagatgaacctacactgatgaaatatagccacttggtcactcagttcaagaattttgagtgccaggctttggataaagatgtggtaaaagattatgcaaacacaaggaaccgacatgagcttaatgtgttagctgatcagccaaaagaacttaagggcggcatgctcttccctcatcaactagaagcattgaactggctacgtaaatgctggcacaagtccaaaaatgttatccttgctgatgagatgggtcttggaaagacagtgtcagcttgtgcttttctatcatccttatgttgtgaatttaaaattaatttgccatgtcttgtcttggttcctctttctacaatgcccaattggatggctgaatttgcatcttgggctcctcatttaaatgttgtggaatatcatggttctgcaaggtcaagatctatcattcgccagtatgagtggcatgcgggcgattcaagccagattggcaaaacaaagagatcgtacaagttaaatgttttgcttaccacttacgaaatggtgcttgttgatgctgcatatcttcgttctgtctcatgggaagttcttgtagttgatgagggacatcgccttaagaattctagcagcaaactctttagtttacttaattcgttatcatttcagcacagagttttgttgactggaactcctttacagaacaacattggtgaaatgtacaacttattgaacttcttacagcctacttctttcccttctctgtcatcatttgaggagaaatttaatgaccttacaacagcagaaaaagtagaggagctgaagaaacttgtagctcctcacatgcttcggaggttgaaaaaagatgcaatgcaaaacatccctccaaagacagagcgaatggtacctgttgaactgacatcaatccaggctgaatactaccgtgctatgcttacaaagaactatcaagtactgcgcaacattggaaaaggtggcgctcaccagtctttattgaacatagtaatgcagcttcggaaagtctgcaaccatccttatcttattcatggaactgaacctgaatctggttcacctgaatttttgcatgagatgcgcataaaggcctcagcgaagctaactttgttgcactctatgctaaaaatattacacaaggaaggccaccgtgtccttatattctctcagatgacaaaacttcttgacatccttgaagattatctgactttagaatttggccctaaaacatttgaaagagttgatggctcagtatctgtggcagagcgccaggcggcgattgctcgctttaatcaggataagacacgttttgttttcttgctgtctacacgatcatgtggacttggtattaatttggcaactgcagatactgttatcatatatgattcagatttcaacccacatgctgatatacaggcgatgaacagggcacacagaattggacaatcgaatagactcctggtttacaggcttgtggtacgtgctagtgttgaagagcgtatcttgcaattagccaagaagaaactgatgcttgatcaacttttcgttaacaaatcagaatcacagaaagaagtggaagatatcattcgctggggtacagaagaactctttgggagtagtgacagtgtggatggtaaagatagcaatgaagcctcaggttctgttgctgatgttgaatttaagcatagaagaaaaaccggtggcctaggtgatgtttatgaggacaaatgtattggtggttctaccaaacttgtttgggatgaaaatgctattttgaagctgcttgatagatcaaaccttccatcatcagtggccgaaagcactgatggggatctggacaatgatatgcttggtactgtgaagatgggagcaatatcaaatagaggaggaggcatctcttggtcgaggtaaacgtttaaggaaggctgtttcttacagagagacatttgcaacacttcctaatgaagcattaagtgagggctctgatgagggagatgaaccaaagagagaatatacagcagctggactggtcttgaaggaaaaatatggaaagcttcgagctagacaaaaggaaaggattgcgcagcgacacattatcaagaactatgctgttgataatcttgaggagttcatgactccatatatctctattgctaatgaacctgctgaaaatcctttgataatcgtagaagacccaagttcttcacagctatgtggtgctaaatgtttcagtgaatcaactggagaaatgaggcaatcctccaagaaatcaaggagatattctgaaatccctcaagatctttatgccagaattcctgataacgctgcttcatccaaggacaactcaaaggccaccgatgtcttcaatccagggaccccaaatcacctgctacctgtacttggcctttgtgctccaaatgctgatcaggtgaactcatacaaaaactcaatttgtgcaccaagcataaaggagcataaaagggccagtggtgacgtagtcaacaaacaactgtcaactcccgctgaccattctaatgagcttagaaacgaagttcaatcagcttctgataaggtcatctttcctggtgcatctgaggaagctttgcgaaggataagtaacatgatcccagataattattttcccttcagtcatattcctcctatatcagggaaggcggttgatcctgttgaatatattggagcttcgaatgcatcatttcaagggaaactgggtcttccaaacttcagtctggaagacaacactccacttaagcatattaagcctatacctgatatatttccttacctgtcactgggtgctcataaggattatattcgtagttctgtcccagagttgccagatagttcattattaccaaacttcatggcagatattgctggtacttcaaagcaaaaatcattcatgtctggtccacttcctgggctgggtcttagcccaggacaaccaatccatttgactatgcctgataatcacaagaaagtcttggacaacataatgatgcgtgctcagtatgcctcaaacaaattcttgaagaagagatcaaaactagattattggtcagaggatgaacttgatgctctgtggataggagttcgtaggcatggaaggggaaattgggatgctatgcttagagatccaaagttaaagtttttgaacaaccgaactagtgaagagctggcctcgagatggattttggaggagcaaaagattatagatgaacctatgtctgcagccacaagacgttctaactcaacagcatttcctggaatatctgatgcaatgatgtctcgggcgctcaatgaaagtaatttatctaagatgaggatggagcagcctaaattgcagtcccacgtaactgatattcagttaggttcgagtgatatcctatccagatttcctcatgttgaggctcctaattacattaactcaggggagggtggcccacctcagataccatggcaggatttcaagcatagatcaagttatggtggtgattttcctggcggtgcatttgacaagttggagaaacctgatgttggactgatcccgccatttatgcctaatcctttcatgactgatagcattgattcacttcccataaacagaaaaaacaatagttccattccgcgtagtgaaatcagatcaagttctcgtgagaacattcttttttctggtgtttcggatggacaaatcaacttgcttcatgagatgcagcgtcatgtgaggtcaggcaaacaacccattgagataaagctcaaccacatagaccactcaaatcctcagcttggtaatgctagtgacctcggaggtttaaaatcaaacaagttacctcattggcttcaggaggctgtacgtgctcctgcttcatctaagccacctgaacgtgggctaccagcaactgtctcagcaattgctcagtccatgtgccttcttcttggagaacaagaaccatcaatacctccattcttgatcctgggaacccctctttctcccccaaaagatccaaggattaattcaaagaagaggaaactccgcaaagctcatcaatctacctctcatgtaggtgattgcatcgctacccaagcacccccatccgttaaagcttcagctgctcctcttgctgtcgattgcaatgatggtgcgccttcactcaacttgaactctgcattgctgtcatcttcagctgtaagcaagaagctagatgagttacctcccacatttaaagaatcaaaccaaaccatggatggttcagaagctgttgcaggcaagttggaggctcctgaaattggttgtcaggtaactggttcctctccagtagatgacaaagctagagaatcttcaggatcaccagtgaaggatactcctgatgctggagtcagattgcaaggatcagataactcagctatggcattttctgcactcccacttgaagcacctgtgacaagcagcagagcagagcctgtggcatgtgatggcagtgacatgaaagaggatattccactagacgctgaaagcaacgggaacctggaggagcgatgaactggctcctcttgtgaacatggatgcatcacatcaagtatctgctaaaacgtcaacggagattggatgaaatgttctcagatgagcattagacttgagccagttagctcgacattcctttctcttccgttgagcagaatactgggattttccctctcccaatgtttccagtgttgatgatctcatgttgtgtaatgctttagtgcagagtgcagataggataaaattcaacgacaagtggtgcttcttagcagtagttgggcactagtccgtcgggagcaactcttggaaacctgtatacaagaaatgtatatttttgctaacatggtgttggttgggtgtgtagactgtagaccgctattcatttatttatgcgtatatggttcagtaatttgccgtctgtctagcggtcgctgtaagagtagacatggtgatgataatacctcgccttgagtggtggcctgatagaacatgaaactcactttccccagctgttattgtttgataattgtagcggatgcctttatggttggactaaagagaaagctgagatgttgtgtttacttcgcaaaggagagtttttactgtttttgtgggaaaccctatccctcacaaggggttgtgtaatgtatatatagactgagttagatgagtcaggcttattacacaggggtgacacggtaaatacacgtggtaaac

SEQ ID NO: 22437 - DNA, 7001 bp, Zea Mays
gagaaacttcttagcaactgcaacttgaaaagatgtttatgaataactgttgagcaataggtctttctccagttatcaacacgagaactacgaaaaattgagtatttttttgagtgtgtagaatgtgatcttggtggcaatttgctatgttgtgatagctgtcctcgtgtttaccacttggaatgcctcaatcctcctcttaagcgtctaccccctgggaagtggcaatgtccaagatgccgtccgaaaaaaggtacgacatcaggtagtccaccttcgcatacaaaagtctcctttaagaccaggaactccacacaagacaaaactggatcaaaagaacaaggaaaacagtcatctggtggcacaatgatgggtggtgacccgaataatgaagttgagaaaaagaacacattgatattacatttgaagaagcactcaatgaaggaattatcagagaatgctaaacctttgaagtcaaaatttgttggagagccttcagaagagaaaattgttaaacatggaagtgtcttgaaactcaagaaacattcagaccgtatggacttgtctccaaataaatctaaaagcagggggcaaaatagtcagagagagagtaaaaggcctggcacaaaaaagcttaaatattcaatgtctgatgatgacagtgtttcctcatcagaaccatcgacatctcttgataacaatgaaccaccaccaaaaagaaaaccctcagatggaaaagcaccttcatccagtaccaagaaagggaaaaagaaagtgaagttcattgagaaaaggcactctgaggaacagtgtgtggtaggagacaaaacaacgacttcccaggaggatcagcaggtcgatcgcattctaggctgtcggcttcaaacaaacaaaatcaacccactgtcccatgcttcattcaagcagtttgaatcagctaatctccaggtggaagatatggctcttccgcttgcttccgctggcattcctaataaatctcatgatggaactgagtcttctagaaatggtacagtcgaggatatatgtgctgatgaatcagccaatcatagtggtcacagtttggaaatgcagaaggataggaacagtaaatcccatgaaaacgagtcatgtaaacgagaacaaggcaataatatattgtcaatatgttttgttgatgagaccagtataatgaaagatgatcaagtaggcagagagaatgttgcagcttccaaaaagggtgaagatgcgacatatgatttacctgcagaaaaggatgataccaaactaccagtcactagagctgatgcaatgaccaggaccaatcaagagcatacagatgagagcaaacagcatgggaaaataaagcaaataacagataaagactacaatgatgctggatatgagttcttgatcaagtgggttggaaaatcaaatatccacaacacctgggtttctgaatccgaggtaaaaatattagcaaaaaggaaactagaaaactacaaaacgaagtatggaacgagtttgataaacatttgcaaggaacagtggtgccagccacaacgagttattgctcttcgagcatctgtagatgaagtggaagaggctttaatcaaatggtgtggtctttcttatgatgaatgcacttgggaaagattagatgaacctacactgatgaaatatagccacttggtcactcagttcaagaattttgagtgccaggctttggataaagatgtggtaaaagattatgcaaacacaaggaaccgacatgagcttaatgtgttagctgatcagccaaaagaacttaagggcggcatgctcttccctcatcaactagaagcattgaactggctacgtaaatgctggcacaagtccaaaaatgttatccttgctgatgagatgggtcttggaaagacagtgtcagcttgtgcttttctatcatccttatgttgtgaatttaaaattaatttgccatgtcttgtcttggttcctctttctacaatgcccaattggatggctgaatttgcatcttgggctcctcatttaaatgttgtggaatatcatggttctgcaaggtcaagatctatcattcgccagtatgagtggcatgcgggcgattcaagccagattggcaaaacaaagagatcgtacaagttaaatgttttgcttaccacttacgaaatggtgcttgttgatgctgcatatcttcgttctgtctcatgggaagttcttgtagttgatgagggacatcgccttaagaattctagcagcaaactctttagtttacttaattcgttatcatttcagcacagagttttgttgactggaactcctttacagaacaacattggtgaaatgtacaacttattgaacttcttacagcctacttctttcccttctctgtcatcatttgaggagaaatttaatgaccttacaacagcagaaaaagtagaggagctgaagaaacttgtagctcctcacatgcttcggaggttgaaaaaagatgcaatgcaaaacatccctccaaagacagagcgaatggtacctgttgaactgacatcaatccaggctgaatactaccgtgctatgcttacaaagaactatcaagtactgcgcaacattggaaaaggtggcgctcaccagtctttattgaacatagtaatgcagcttcggaaagtctgcaaccatccttatcttattcatggaactgaacctgaatctggttcacctgaatttttgcatgagatgcgcataaaggcctcagcgaagctaactttgttgcactctatgctaaaaatattacacaaggaaggccaccgtgtccttatattctctcagatgacaaaacttcttgacatccttgaagattatctgactttagaatttggccctaaaacatttgaaagagttgatggctcagtatctgtggcagagcgccaggcggcgattgctcgctttaatcaggataagacacgttttgttttcttgctgtctacacgatcatgtggacttggtattaatttggcaactgcagatactgttatcatatatgattcagatttcaacccacatgctgatatacaggcgatgaacagggcacacagaattggacaatcgaatagactcctggtttacaggcttgtgaatcacagaaagaagtggaagatatcattcgctggggtacagaagaactctttgggagtagtgacagtgtggatggtaaagatagcaatgaagcctcaggttctgttgctgatgttgaatttaagcatagaagaaaaaccggtggcctaggtgatgtttatgaggacaaatgtattggtggttctaccaaacttgtttgggatgaaaatgctattttgaagctgcttgatagatcaaaccttccatcatcagtggccgaaagcactgatggggatctggacaatgatatgcttggtactgtgaagtcaatagactggaatgatgagctgaatgaccaccctggtaccaatgaggatattgcacctattgataatgatgggagtgagttggcatctgaatcaaagcaaggtgctactaatcgtttagaagaaaatgaatgggataaacttttacgtgtcagatgggagcaatatcaaatagaggaggaggcatctcttggtcgaggtaaacgtttaaggaaggctgtttcttacagagagacatttgcaacacttcctaatgaagcattaagtgagggctctgatgagggagatgaaccaaagagagaatatacagcagctggactggtcttgaaggaaaaatatggaaagcttcgagctagacaaaaggaaaggattgcgcagcgacacattatcaagaactatgctgttgataatcttgaggagttcatgactccatatatctctattgctaatgaacctgctgaaaatcctttgataatcgtagaagacccaagttcttcacagctatgtggtgctaaatgtttcagtgaatcaactggagaaatgaggcaatcctccaagaaatcaaggagatattctgaaatccctcaagatctttatgccagaattcctgataacgctgcttcatccaaggacaactcaaaggccaccgatgtcttcaatccagggaccccaaatcacctgctacctgtacttggcctttgtgctccaaatgctgatcaggtgaactcatacaaaaactcaatttgtgcaccaagcataaaggagcataaaagggccagtggtgacgtagtcaacaaacaactgtcaactcccgctgaccattctaatgagcttagaaacgaagttcaatcagcttctgataaggtcatctttcctggtgcatctgaggaagctttgcgaaggataagtaacatgatcccagataattattttcccttcagtcatattcctcctatatcagggaaggcggttgatcctgttgaatatattggagcttcgaatgcatcatttcaagggaaactgggtcttccaaacttcagtctggaagacaacactccacttaagcatattaagcctatacctgatatatttccttacctgtcactgggtgctcataaggattatattcgtagttctgtcccagagttgccagatagttcattattaccaaacttcatggcagatattgctggtacttcaaagcaaaaatcattcatgtctggtccacttcctgggctgggtcttagcccaggacaaccaatccatttgactatgcctgataatcacaagaaagtcttggacaacataatgatgcgtgctcagtatgcctcaaacaaattcttgaagaagagatcaaaactagattattggtcagaggatgaacttgatgctctgtggataggagttcgtaggcatggaaggggaaattgggatgctatgcttagagatccaaagttaaagtttttgaacaaccgaactagtgaagagctggcctcgagatggattttggaggagcaaaagattatagatgaacctatgtctgcagccacaagacgttctaactcaacagcatttcctggaatatctgatgcaatgatgtctcgggcgctcaatgaaagtaatttatctaagatgaggatggagcagcctaaattgcagtcccacgtaactgatattcagttaggttcgagtgatatcctatccagatttcctcatgttgaggctcctaattacattaactcaggggagggtggcccacctcagataccatggcaggatttcaagcatagatcaagttatggtggtgattttcctggcggtgcatttgacaagttggagaaacctgatgttggactgatcccgccatttatgcctaatcctttcatgactgatagcattgattcacttcccataaacagaaaaaacaatagttccattccgcgtagtgaaatcagatcaagttctcgtgagaacattcttttttctggtgtttcggatggacaaatcaacttgcttcatgagatgcagcgtcatgtgaggtcaggcaaacaacccattgagataaagctcaaccacatagaccactcaaatcctcagcttggtaatgctagtgacctcggaggtttaaaatcaaacaagttacctcattggcttcaggaggctgtacgtgctcctgcttcatctaagccacctgaacgtgggctaccagcaactgtctcagcaattgctcagtccatgtgccttcttcttggagaacaagaaccatcaatacctccattcttgatcctgggaacccctctttctcccccaaaagatccaaggattaattcaaagaagaggaaactccgcaaagctcatcaatctacctctcatgtaggtgattgcatcgctacccaagcacccccatccgttaaagcttcagctgctcctcttgctgtcgattgcaatgatggtgcgccttcactcaacttgaactctgcattgctgtcatcttcagctgtaagcaagaagctagatgagttacctcccacatttaaagaatcaaaccaaaccatggatggttcagaagctgttgcaggcaagttggaggctcctgaaattggttgtcaggtaactggttcctctccagtagatgacaaagctagagaatcttcaggatcaccagtgaaggatactcctgatgctggagtcagattgcaaggatcagataactcagctatggcattttctgcactcccacttgaagcacctgtgacaagcagcagagcagagcctgtggcatgtgatggcagtgacatgaaagaggatattccactagacgctgaaagcaacgggaacctggaggagcgatgaactggctcctcttgtgaacatggatgcatcacatcaagtatctgctaaaacgtcaacggagattggatgaaatgttctcagatgagcattagacttgagccagttagctcgacattcctttctcttccgttgagcagaatactgggattttccctctcccaatgtttccagtgttgatgatctcatgttgtgtaatgctttagtgcagagtgcagataggataaaattcaacgacaagtggtgcttcttagcagtagttgggcactagtccgtcgggagcaactcttggaaacctgtatacaagaaatgtatatttttgctaacatggtgttggttgggtgtgtagactgtagaccgctattcatttatttatgcgtatatggttcagtaatttgccgtctgtctagcggtcgctgtaagagtagacatggtgatgataatacctcgccttgagtggtggcctgatagaacatgaaactcactttccccagctgttattgtttgataattgtagcggatgcctttatggttggactaaagagaaagctgagatgttgtgtttacttcgcaaaggagagtttttactgtttttgtgggaaaccctatccctcacaaggggttgtgtaatgtatatatagactgagttagatgagtcaggcttattacacaggggtgacacggtaaatacacgtggtaaac

SEQ ID NO: 22438 - DNA, 1190 bp, Zea Mays
tctttctccagttatcaacacgagaactacgaaaaattgagtatttttttgagtgtgtagaatgtgatcttggtggcaatttgctatgttgtgatagctgtcctcgtgtttaccacttggaatgcctcaatcctcctcttaagcgtctaccccctgggaagtggcaatgtccaagatgccgtccgaaaaaaggtagcttgaagatgttaggtaatgcagaggttggcacttctaaacatgaaaaaagtacaaggacatatgcaggtacgacatcaggtagtccaccttcgcatacaaaagtctcctttaagaccaggaactccacacaagacaaaactggatcaaaagaacaaggaaaacagtcatctggtggcacaatgatgggtggtgacccgaataatgaagttgagaaaaagaacacattgatattacatttgaagaagcactcaatgaaggaattatcagagaatgctaaacctttgaagtcaaaatttgttggagagccttcagaagagaaaattgttaaacatggaagtgtcttgaaactcaagaaacattcagaccgtatggacttgtctccaaataaatctaaaagcagggggcaaaatagtcagagagagagtaaaaggcctggcacaaaaaagcttaaatattcaatgtctgatgatgacagtgtttcctcatcagaaccatcgacatctcttgataacaatgaaccaccaccaaaaagaaaaccctcagatggaaaagcaccttcatccagtaccaagaaagggaaaaagaaagtgaagttcattgagaaaaggcactctgaggaacagtgtgtggtaggagacaaaacaacgacttcccaggaggatcagcagtcaatagactggaatgatgagctgaatgaccaccctggtaccaatgaggatattgcacctattgataatgatgggagtgagttggcatctgaatcaaagcaaggtgctactaatcgtttagaagaaaatgaatgggataaacttttacgtgtcagatgggagcaatatcaaatagaggaggaggcatctcttggtcgaggtaaacgtttaaggaaggctgtttcttacagagagacatttgcaacacttcctaatgaagcattaagtgagggctctgatgagggagatgaaccaaagagagaatatacagcagctggactggtc

SEQ ID NO: 22439 - DNA, 1420 bp, Zea Mays
ctcgttttctgtcatgtgtggaatttcggccatatgctagcttgcaaaggtgcaattttcatctttaggcactgatctgcctctgcttttgacagtggaaagcttcgagctagacaaaaggaaaggattgcgcagcgacacattatcaagaactatgctgttgataatcttgaggagttcatgactccatatatctctattgctaatgaacctgctgaaaatcctttgataatcgtagaagacccaagttcttcacagctatgtggtgctaaatgtttcagtgaatcaactggagaaatgaggcaatcctccaagaaatcaaggagatattctgaaatccctcaagatctttatgccagaattcctgataacgctgcttcatccaaggacaactcaaaggccaccgatgtcttcaatccagggaccccaaatcacctgctacctgtacttggcctttgtgctccaaatgctgatcaggtgaactcatacaaaaactcaatttgtgcaccaagcataaaggagcataaaagggccagtggtgacgtagtcaacaaacaactgtcaactcccgctgaccattctaatgagcttagaaacgaagttcaatcagcttctgataaggtcatctttcctggtgcatctgaggaagctttgcgaaggataagtaacatgatcccagataattattttcccttcagtcatgtacgtcatctttcttagtttggcactcggaccatttaattgttcgtatagttactttctttatcattcttcttagggcatttgtttcgtaacaagtaaaaacttttaagatagtttctcactttcttatttgtttattatttacaacgtagctcaactgttgatatttgatttattggtagcattaacagagcaaataaatcattctcaaggggagcatacctaaatttttcttatcaagtaaagagcagtattgtcaagcaggaaaaataacactagttcttactgtgcagattcctcctatatcagggaaggcggttgatcctgttgaatatattggagcttcgaatgcatcatttcaagggaaactgggtcttccaaacttcagtctggaagacaacactccacttaagcatattaagcctatacctgatatatttccttacctgtcactgggtgctcataaggattatattcgtagttctgtcccagagttgccagatagttcattattaccaaacttcatggcagatattgctggtacttcaaagcaaaaatcattcatgtctggtccacttcctgggctgggtcttagcccaggacaaccaatccatttgactatgcctgataatcacaagaaagtcttggacaacataatgatgcgtgctcagtatgcctcaaacaaattcttgaagaagagatcaaaactagattattg

SEQ ID NO: 22440 - DNA, 1686 bp, Zea Mays
gtatccttcagcgcggcaccacgttttttcatgcaaaacaaaagctttcgtgccatttgccgtccggtccgaccgccttctccgcgagcgctaggagcaataaacggcaggcaccattctcggactcggaggcaacgcccagacgcgcaaacggaaggaagggggagcgcaacacgcgcggtcgccgggagagagagagagaaagggcgagctagcgagcgagatccccctctcccgctgccggatccgatctgacctgacctcgtcgccgcctgccgtgggagggagaagaggaagaggaggcggaggcggcggagatggcaccggtgtcagcgctcgccaagtacaagctcgtcttcctgggggaccagtccgtcggcaagacgagcatcatcacccgcttcatgtacgacaagttcgataacacctaccaggtcaagtcctttttaactgcatttggctggactgtggagccggtcctgttcttcccattccaccatgttaccaaaagctatcaagtgtcaggcactaaaagtgagagttggaggaaagaaaactaatcggctatcagattctgcaatggcttgatgcataaacatgattgccgttccgtttgttttcctctaatatctcaccttcactagacagaagatgtacgctaccaacattcatttgtgccatttgaagtgcagatttgaggctacgattggtattgatttcctgtcaaagacaatgtaccttgaagatagaactgtgagactccaactctgggatactgctggtcaggaaagattcaggagtttaattccaagctatattagagactcttcagttgctgtcattgtattcgatgttgcaagcaggcagtccttcttaaatacatctaagtggatagaggaagttcgcactgagaggggcagtgatgttatcattgtgcttgttgggaacaaaactgaccttgttgacaagaggcaagtctcaatagaggaaggggagggcaaggcgaaggaccttggagtcatgtttattgaaaccagtgctaaggctgggtttaacattaaggcgctgttccgtaaaattgctgctgcacttcctggaatggagacgctctcatcagcgaaacaggaagacatggttgatgtgaacttgaggtccggcaatgcaaactcgtcccagtctcaggctcaggctgggggatgcagttgttagttgcagtctctgacacttgcttgctcatgatctttgggactctgagcatcagaaggcgttatcactgatgcttctctcgggaagaagagttgattgcctctcgccagtgaacacaccatagtctttacccggtgaatggaccgtttgcattggaacgatacgttttatgagttttctgttatttcctcagtggcctaagctagcaacagtgtatagttgggttgacacttcaaacttctaccattcgagttgggtattagaactagttattattggttcatgttgaacttatatatatttccatccttttgcagttagtttgagtcgtatttgctgtgtaccaaacatgtattgcaaatttggaatttttgtaagctataataaggccagcacggcaatatccccacatgataaccccgaaatttgtatcgttcaaagttcaaaccatggtatcctaattcaaaaattttgcctttt

SEQ ID NO: 22441 - DNA, 1019 bp, Zea Mays
atttattttcagtttttgagaaaaacaacaaggctacgattggtattgatttcctgtcaaagacaatgtaccttgaagatagaactgtgagactccaactctgggatactgctggtcaggaaagattcaggagtttaattccaagctatattagagactcttcagttgctgtcattgtattcgatgttgcaagcaggcagtccttcttaaatacatctaagtggatagaggaagttcgcactgagaggggcagtgatgttatcattgtgcttgttgggaacaaaactgaccttgttgacaagaggcaagtctcaatagaggaaggggagggcaaggcgaaggaccttggagtcatgtttattgaaaccagtgctaaggctgggtttaacattaaggcgctgttccgtaaaattgctgctgcacttcctggaatggagacgctctcatcagcgaaacaggaagacatggttgatgtgaacttgaggtccggcaatgcaaactcgtcccagtctcaggctcaggctgggggatgcagttgttagttgcagtctctgacacttgcttgctcatgatctttgggactctgagcatcagaaggcgttatcactgatgcttctctcgggaagaagagttgattgcctctcgccagtgaacacaccatagtctttacccggtgaatggaccgtttgcattggaacgatacgttttatgagttttctgttatttcctcagtggcctaagctagcaacagtgtatagttgggttgacacttcaaacttctaccattcgagttgggtattagaactagttattattggttcatgttgaacttatatatatttccatccttttgcagttagtttgagtcgtatttgctgtgtaccaaacatgtattgcaaatttggaatttttgtaagctataataaggccagcacggcaatatccccacatgataaccccgaaatttgtatcgttcaaagttcaaaccatggtatcctaattcaaaaattttgcctttt

SEQ ID NO: 22442 - DNA, 1092 bp, Zea Mays
caggtccttggcattgttctttgggatgcctgagcccaaatctttgtgtatcagatcagagatcatgatgcgaatagcctgccactgaattattgtccttgcaatgctacgattggtattgatttcctgtcaaagacaatgtaccttgaagatagaactgtgagactccaactctgggatactgctggtcaggaaagattcaggagtttaattccaagctatattagagactcttcagttgctgtcattgtattcgatgttgcaagcaggcagtccttcttaaatacatctaagtggatagaggaagttcgcactgagaggggcagtgatgttatcattgtgcttgttgggaacaaaactgaccttgttgacaagaggcaagtctcaatagaggaaggggagggcaaggcgaaggaccttggagtcatgtttattgaaaccagtgctaaggctgggtttaacattaaggcgctgttccgtaaaattgctgctgcacttcctggaatggagacgctctcatcagcgaaacaggaagacatggttgatgtgaacttgaggtccggcaatgcaaactcgtcccagtctcaggctcaggctgggggatgcagttgttagttgcagtctctgacacttgcttgctcatgatctttgggactctgagcatcagaaggcgttatcactgatgcttctctcgggaagaagagttgattgcctctcgccagtgaacacaccatagtctttacccggtgaatggaccgtttgcattggaacgatacgttttatgagttttctgttatttcctcagtggcctaagctagcaacagtgtatagttgggttgacacttcaaacttctaccattcgagttgggtattagaactagttattattggttcatgttgaacttatatatatttccatccttttgcagttagtttgagtcgtatttgctgtgtaccaaacatgtattgcaaatttggaatttttgtaagctataataaggccagcacggcaatatccccacatgataaccccgaaatttgtatcgttcaaagttcaaaccatggtatcctaattcaaaaattttgcctttt

SEQ ID NO: 22443 - DNA, 4900 bp, Zea Mays
gttaaagcaaaaggaaatcctaacaaatcaaacaccccaccatccttcccgagtcgtcctctccattttcccctcccgattcgccccgtcttcccaagccctacgccagcgacaaaaccctaaccggtgggatggcgacgcagccgccctctaccgccactgccgcggttgacctctatgagacggcctcgcagccggacgcccccgccgccggcgacgcctacacttttctcgagttcaacacgcagggggacgacttcgactaccccgacttcccggagctctctcaaccacctccccgatccacgccgctgacgtcctccatccccggcgccggcacgtcgtcctcgtcgtggcctgccccaccgcctccgccgtccgacgcggcctccccggaacccgatctcacgtctcaagacgtccacaccccgccggcctcctcctcctcgccgtcgccgcgttccgcctccaaggcgcgtccgtcggctgcggcggatgggctcgcctccggggttgtcgcacttaacttcgaggatcctgtaggaaccggcgccgtggaggacgggtacgactacagcaagggagacttcgtggaacacgcatgccggtactgcgggatccacaaccctgcgtgcgtggcgaggtgcaacgtaccctcctgccgcaagtggttctgtaactcgcgggggaacacttcaggctcccacattgtcaaccacctggttagggcaaagcataaggaagtatgccttcacaaggatagccctttaggagaaacaattctcgaatgctacaactgtggttgtcggaatgtatttcttcttgggtttatctcagcaaaggcggagaatgttgtcgttcttttatgcagagaaccatgtttaagtgttaatgcactgaaggatatgaattgggatctcagtcagtggtgccctcttatcgacgacaggtgttttttgtcgtggcttgtaaaggtaccttcagagcaggagcagctaagagctcgccaaattagtgctcaacaaatcaacaaagtggaagagctctggaagacaaatcctgatgcatctcttgaagatcttgaaaagcccggtgtagatgatgaacctcagccagttgttttgaagtatgaagatgcttaccagtaccaaaatgtttttgcaccactgataaagcttgaggctgattatgacaagatgatgaaagagtcacagagcaaggataatgtaactgtccggtgggatattgggttgaacaagaagcgtgtagcttactttgtctttccaaaggaagacaatgagttgaggcttgtgcctggagatgaactacgcctgagatatcctggtgatagctcacatcccacatggcaatctgtcggacatgtgattaagctcactgcacaagaggaggtggcacttgagcttcgcgctagtcagggggtgcctactgagctaaatgttggattcagtgtggattttgtttggaagagtaccagttttgataggatgcaaggagcgatgaaaacttttgctgtggacgagacaagtgtcagtggatacatataccatcaccttttgggacatgaagttgagcatcaaataatacgtaataccctaccaagacgctttggtgcacctggacttccagaactaaatgcttcccaggttttagcagttaaaagtgtcctgcagaagccagttagtttgattcaaggtccacctggcactggaaaaactgtcacatctgctgcaattgtgtatcacatggcaaaacaaggtcaaggacaggttcttgtatgtgccccaagtaatgttgctgttgatcagctggcagagaagataagctcaactggtctgaaggttgttagactgtgtgcaaaatctagagaagctgtttcgtctcctgttgagcatctcacacttcattatcaggttaggcaccttgatacttctgagaagagtgaattgcacaagctacaacaactgaaagatgaacaaggtgaattgtccagcagtgatgagaagaaatacaaggcactaaagcgtgccactgaaagagagatactgcagagtgccgatgtcatttgttgcacctgtgttggtgctggagatcctcgtctttcaaacttccgtttccgacaagttcttattgatgagtccacacaggctacagagccggaatgtcttattcctttagtgcttggtgtcaagcaggttgtccttgtcggtgatcattgtcaactgggtccagtcatcatgtgcaaaaaagcagcccgtgcagggttagcacaatctctctttgaacgccttgttatccttggagtgaagccattcaggctacaggtccagtatagaatgcatccttgcctctcggagttcccatccaactgcttctatgaaggcacactgcaaaatggagtgactgttaatgagaggcaatcgtctggaattgattttccttggcctgttccaaatcggcctatgttcttctatgtgcagatgggacaagaagagatcagtgctagtgggacatcctatctcaatagaactgaagctgcaaatgttgaaaaaattgtaacaacatttttaagaagtggtgttgtaccaagccagattggagttatcacaccttatgaaggacagagggcttacatcgtaaattacatggcaaggaatggctctcttcgccaacaactttacaaagaaatcgaggttgctagtgtagactcatttcagggtagagagaaagactacattattctatcttgtgttagaagcaatgagcaccagggaatcgggtttctcaatgatccgcgcaggttaaatgttgcgctaactcgtgcacgttatggcatagttattcttggtaatccaaaagtactaagcaagcagccactttggaatagcttgttgacacattacaaggagcatgagtgcttggtagaaggacctctgaacaacttaaagcagagtatggtgcaatttcagaagccaaaaaagatatataatgaccggagattgttcctgggcggtggtcaaggtgttatgcatggaactaactttggggctggggcctcaagccaagcagcagataagagaagtggcagagggaaagaaggacaatcgtttgctccttatggccctccaaatggggtgcataagcctggtgtgcacccggttggctatgctgtaccacgtatgccttttcctccatttcctggggctccacattctcaaccatacgcaattccaacccggggtttgcatgggccccttggagctgttccaccggtgcatcaacctggaagtagaaactttgggtcagctcgttcaaatactggtgggcctattggtggccaccttgctcatcaacagaactcccagcaagctatggggagcattgggtcaaattttaactacactggaatggagaatccaagtagtcagccttctggtggagcacaaatgtcccaaactggattaatgacccaggtgcctgtccaaggactaagtcaaacattccgtgatggtttttctattggtgggatgtcacaggacttctttgtagacgattttaagagccaagggtcacatgtgccatacaatattgctgaattttctacccaggcttctcaaggtggttatggtgttgagtttactcaagcgccccaatctggatactctgggaattatatgaaccaaaattcacatcctggatactcccatattggtacaacaaatgacattgtatctcaggatcacatggcccatggatctcatgggatgtttacacaagcgggatataatgatccctcacaagatgagtcgtctcagattcattatggaatggctgccgctggccctctacagtcgcagggcatgatgaaccccttgtactctcaatcctatgctcactacaacacccaaccacagtctcttcaacctccgccccagtgataatgaaagcttgtgataggatgaagccaaattttggaagtttggtgggttgcatcttttggcccacatgtgcacttctccgctgtttcagactcgatggtgcatagacatcagatgcaagcaatgaaggcacactatgtattggctatttatcggggcaggcttgactgaggggcacaaggattgcaacgtatcattgatcgttgtagttcactgcccactttggccacaggagaggtcatatcatcgagaggttgacggcactaccctcatccctcacctgtatagaaaggcaatcggggccaatagtggtacgatgtgaatattccaggatttgctgccattcagaaagtcaagttgcagcaactgcatgcctccatggtaccatgaagacacgcccgtagagtggctttgtatagaggtgctataggcgaggtggacaaccctttcggatatcgcacatggcaagatatttacattgacattttgtatgcacctgatatggttttgatatttatgccacaaatcatttaggtggtgatgcaagtagtttgttgtgattggaaatttgggagtgttcgtgaaagcaagtttgatcctgaaatcttatgggggaatggttgagtgggggttattttgttgtgaaacaggtgtctttgaaaagaaacctttccaggagtgatttcatcaagattgattgttagaatagacattagtaactgttataaatggttaacatggtcaccaaagcggtacgtctagttaacatggccacaaagacattaatcaactttgagacgaatgacaggacctaaaggggcatgttctttggcaaagtagaagtggtcgtctcgcagttttatagcaagacggccattgacttatggttccaccactcccaccccttcccatctttggtagattttctatcatatctcatattt

SEQ ID NO: 22444 - DNA, 4733 bp, Zea Mays
agcaaaaggaaatcctaacaaatcaaacaccccaccatccttcccgagtcgtcctctccattttcccctcccgattcgccccgtcttcccaagccctacgccagcgacaaaaccctaaccggtgggatggcgacgcagccgccctctaccgccactgccgcggttgacctctatgagacggcctcgcagccggacgcccccgccgccggcgacgcctacacttttctcgagttcaacacgcagggggacgacttcgactaccccgacttcccggagctctctcaaccacctccccgatccacgccgctgacgtcctccatccccggcgccggcacgtcgtcctcgtcgtggcctgccccaccgcctccgccgtccgacgcggcctccccggaacccgatctcacgtctcaagacgtccacaccccgccggcctcctcctcctcgccgtcgccgcgttccgcctccaaggcgcgtccgtcggctgcggcggatgggctcgcctccggggttgtcgcacttaacttcgaggatcctgtaggaaccggcgccgtggaggacgggtacgactacagcaagggagacttcgtggaacacgcatgccggtactgcgggatccacaaccctgcgtgcgtggcgaggtgcaacgtaccctcctgccgcaagtggttctgtaactcgcgggggaacacttcaggctcccacattgtcaaccacctggttagggcaaagcataaggaagtatgccttcacaaggatagccctttaggagaaacaattctcgaatgctacaactgtggttgtcggaatgtaccttcagagcaggagcagctaagagctcgccaaattagtgctcaacaaatcaacaaagtggaagagctctggaagacaaatcctgatgcatctcttgaagatcttgaaaagcccggtgtagatgatgaacctcagccagttgttttgaagtatgaagatgcttaccagtaccaaaatgtttttgcaccactgataaagcttgaggctgattatgacaagatgatgaaagagtcacagagcaaggataatgtaactgtccggtgggatattgggttgaacaagaagcgtgtagcttactttgtctttccaaaggaagacaatgagttgaggcttgtgcctggagatgaactacgcctgagatatcctggtgatagctcacatcccacatggcaatctgtcggacatgtgattaagctcactgcacaagaggaggtggcacttgagcttcgcgctagtcagggggtgcctactgagctaaatgttggattcagtgtggattttgtttggaagagtaccagttttgataggatgcaaggagcgatgaaaacttttgctgtggacgagacaagtgtcagtggatacatataccatcaccttttgggacatgaagttgagcatcaaataatacgtaataccctaccaagacgctttggtgcacctggacttccagaactaaatgcttcccaggttttagcagttaaaagtgtcctgcagaagccagttagtttgattcaaggtccacctggcactggaaaaactgtcacatctgctgcaattgtgtatcacatggcaaaacaaggtcaaggacaggttcttgtatgtgccccaagtaatgttgctgttgatcagctggcagagaagataagctcaactggtctgaaggttgttagactgtgtgcaaaatctagagaagctgtttcgtctcctgttgagcatctcacacttcattatcaggttaggcaccttgatacttctgagaagagtgaattgcacaagctacaacaactgaaagatgaacaaggtgaattgtccagcagtgatgagaagaaatacaaggcactaaagcgtgccactgaaagagagatactgcagagtgccgatgtcatttgttgcacctgtgttggtgctggagatcctcgtctttcaaacttccgtttccgacaagttcttattgatgagtccacacaggctacagagccggaatgtcttattcctttagtgcttggtgtcaagcaggttgtccttgtcggtgatcattgtcaactgggtccagtcatcatgtgcaaaaaagcagcccgtgcagggttagcacaatctctctttgaacgccttgttatccttggagtgaagccattcaggctacaggtccagtatagaatgcatccttgcctctcggagttcccatccaactgcttctatgaaggcacactgcaaaatggagtgactgttaatgagaggcaatcgtctggaattgattttccttggcctgttccaaatcggcctatgttcttctatgtgcagatgggacaagaagagatcagtgctagtgggacatcctatctcaatagaactgaagctgcaaatgttgaaaaaattgtaacaacatttttaagaagtggtgttgtaccaagccagattggagttatcacaccttatgaaggacagagggcttacatcgtaaattacatggcaaggaatggctctcttcgccaacaactttacaaagaaatcgaggttgctagtgtagactcatttcagggtagagagaaagactacattattctatcttgtgttagaagcaatgagcaccagggaatcgggtttctcaatgatccgcgcaggttaaatgttgcgctaactcgtgcacgttatggcatagttattcttggtaatccaaaagtactaagcaagcagccactttggaatagcttgttgacacattacaaggagcatgagtgcttggtagaaggacctctgaacaacttaaagcagagtatggtgcaatttcagaagccaaaaaagatatataatgaccggagattgttcctgggcggtggtcaaggtgttatgcatggaactaactttggggctggggcctcaagccaagcagcagataagagaagtggcagagggaaagaaggacaatcgtttgctccttatggccctccaaatggggtgcataagcctggtgtgcacccggttggctatgctgtaccacgtatgccttttcctccatttcctggggctccacattctcaaccatacgcaattccaacccggggtttgcatgggccccttggagctgttccaccggtgcatcaacctggaagtagaaactttgggtcagctcgttcaaatactggtgggcctattggtggccaccttgctcatcaacagaactcccagcaagctatggggagcattgggtcaaattttaactacactggaatggagaatccaagtagtcagccttctggtggagcacaaatgtcccaaactggattaatgacccaggtgcctgtccaaggactaagtcaaacattccgtgatggtttttctattggtgggatgtcacaggacttctttgtagacgattttaagagccaagggtcacatgtgccatacaatattgctgaattttctacccaggcttctcaaggtggttatggtgttgagtttactcaagcgccccaatctggatactctgggaattatatgaaccaaaattcacatcctggatactcccatattggtacaacaaatgacattgtatctcaggatcacatggcccatggatctcatgggatgtttacacaagcgggatataatgatccctcacaagatgagtcgtctcagattcattatggaatggctgccgctggccctctacagtcgcagggcatgatgaaccccttgtactctcaatcctatgctcactacaacacccaaccacagtctcttcaacctccgccccagtgataatgaaagcttgtgataggatgaagccaaattttggaagtttggtgggttgcatcttttggcccacatgtgcacttctccgctgtttcagactcgatggtgcatagacatcagatgcaagcaatgaaggcacactatgtattggctatttatcggggcaggcttgactgaggggcacaaggattgcaacgtatcattgatcgttgtagttcactgcccactttggccacaggagaggtcatatcatcgagaggttgacggcactaccctcatccctcacctgtatagaaaggcaatcggggccaatagtggtacgatgtgaatattccaggatttgctgccattcagaaagtcaagttgcagcaactgcatgcctccatggtaccatgaagacacgcccgtagagtggctttgtatagaggtgctataggcgaggtggacaaccctttcggatatcgcacatggcaagatatttacattgacattttgtatgcacctgatatggttttgatatttatgccacaaatcatttaggtggtgatgcaagtagtttgttgtgattggaaatttgggagtgttcgtgaaagcaagtttgatcctgaaatcttatgggggaatggttgagtgggggttattttgttgtgaaacaggtgtctttgaaaagaaacctttccaggagtgatttcatcaagattgattgttagaatagacattagtaactgttataaatggttaacatggtcaccaaagcggtacgtctagttaacatggccacaaagacattaatcaactttgagacgaatgacaggacctaaaggggcatgttctttggcaaagtagaagtggtcgtctcgcagttttatagcaagacggccattgacttatggttccaccactcccaccccttcccatctttggtagattttctatcatatctcatattt

SEQ ID NO: 22445 - DNA, 2628 bp, Zea Mays
aggaaatcctaacaaatcaaacaccccaccatccttcccgagtcgtcctctccattttcccctcccgattcgccccgtcttcccaagccctacgccagcgacaaaaccctaaccggtgggatggcgacgcagccgccctctaccgccactgccgcggttgacctctatgagacggcctcgcagccggacgcccccgccgccggcgacgcctacacttttctcgagttcaacacgcagggggacgacttcgactaccccgacttcccggagctctctcaaccacctccccgatccacgccgctgacgtcctccatccccggcgccggcacgtcgtcctcgtcgtggcctgccccaccgcctccgccgtccgacgcggcctccccggaacccgatctcacgtctcaagacgtccacaccccgccggcctcctcctcctcgccgtcgccgcgttccgcctccaaggcgcgtccgtcggctgcggcggatgggctcgcctccggggttgtcgcacttaacttcgaggatcctgtaggaaccggcgccgtggaggacgggtacgactacagcaagggagacttcgtggaacacgcatgccggtactgcgggatccacaaccctgcgtgcgtggcgaggtgcaacgtaccctcctgccgcaagtggttctgtaactcgcgggggaacacttcaggctcccacattgtcaaccacctggttagggcaaagcataaggaagtatgccttcacaaggatagccctttaggagaaacaattctcgaatgctacaactgtggttgtcggaatgtaccttcagagcaggagcagctaagagctcgccaaattagtgctcaacaaatcaacaaagtggaagagctctggaagacaaatcctgatgcatctcttgaagatcttgaaaagcccggtgtagatgatgaacctcagccagttgttttgaagtatgaagatgcttaccagtaccaaaatgtttttgcaccactgataaagcttgaggctgattatgacaagatgatgaaagagtcacagagcaaggataatgtaactgtccggtgggatattgggttgaacaagaagcgtgtagcttactttgtctttccaaaggaagacaatgagttgaggcttgtgcctggagatgaactacgcctgagatatcctggtgatagctcacatcccacatggcaatctgtcggacatgtgattaagctcactgcacaagaggaggtggcacttgagcttcgcgctagtcagggggtgcctactgagctaaatgttggattcagtgtggattttgtttggaagagtaccagttttgataggatgcaaggagcgatgaaaacttttgctgtggacgagacaagtgtcagtggatacatataccatcaccttttgggacatgaagttgagcatcaaataatacgtaataccctaccaagacgctttggtgcacctggacttccagaactaaatgcttcccaggttttagcagttaaaagtgtcctgcagaagccagttagtttgattcaaggtccacctggcactggaaaaactgtcacatctgctgcaattgtgtatcacatggcaaaacaaggtcaaggacaggttcttgtatgtgccccaagtaatgttgctgttgatcagctggcagagaagataagctcaactggtctgaaggttgttagactgtgtgcaaaatctagagaagctgtttcgtctcctgttgagcatctcacacttcattatcaggttaggcaccttgatacttctgagaagagtgaattgcacaagctacaacaactgaaagatgaacaaggtgaattgtccagcagtgatgagaagaaatacaaggcactaaagcgtgccactgaaagagagatactgcagagtgccgatgtcatttgttgcacctgtgttggtgctggagatcctcgtctttcaaacttccgtttccgacaagttcttattgatgagtccacacaggctacagagccggaatgtcttattcctttagtgcttggtgtcaagcaggttgtccttgtcggtgatcattgtcaactgggtccagtcatcatgtgcaaaaaagcagcccgtgcagggttagcacaatctctctttgaacgccttgttatccttggagtgaagccattcaggctacaggtccagtatagaatgcatccttgcctctcggagttcccatccaactgcttctatgaaggcacactgcaaaatggagtgactgttaatgagaggcaatcgtctggaattgattttccttggcctgttccaaatcggcctatgttcttctatgtgcagatgggacaagaagagatcagtgctagtgggacatcctatctcaatagaactgaagctgcaaatgttgaaaaaattgtaacaacatttttaagaagtggtgttgtaccaagccagattggagttatcacaccttatgaaggacagagggcttacatcgtaaattacatggcaaggaatggctctcttcgccaacaactttacaaagaaatcgaggttgctagtgtagactcatttcagggtagagagaaagactacattattctatcttgtgttagaagcaatgagcaccagcttagagtgtga

SEQ ID NO: 22446 - DNA, 4778 bp, Zea Mays
ggaaatcctaacaaatcaaacaccccaccatccttcccgagtcgtcctctccattttcccctcccgattcgccccgtcttcccaagccctacgccagcgacaaaaccctaaccggtgggatggcgacgcagccgccctctaccgccactgccgcggttgacctctatgagacggcctcgcagccggacgcccccgccgccggcgacgcctacacttttctcgagttcaacacgcagggggacgacttcgactaccccgacttcccggagctctctcaaccacctccccgatccacgccgctgacgtcctccatccccggcgccggcacgtcgtcctcgtcgtggcctgccccaccgcctccgccgtccgacgcggcctccccggaacccgatctcacgtctcaagacgtccacaccccgccggcctcctcctcctcgccgtcgccgcgttccgcctccaaggcgcgtccgtcggctgcggcggatgggctcgcctccggggttgtcgcacttaacttcgaggatcctgtaggaaccggcgccgtggaggacgggtacgactacagcaagggagacttcgtggaacacgcatgccggtactgcgggatccacaaccctgcgtgcgtggcgaggtgcaacgtaccctcctgccgcaagtggttctgtaactcgcgggggaacacttcaggctcccacattgtcaaccacctggttagggcaaagcataaggaagtatgccttcacaaggatagccctttaggagaaacaattctcgaatgctacaactgtggttgtcggaatgtatttcttcttgggtttatctcagcaaaggcggagaatgttgtcgttcttttatgcagagaaccatgtttaagtgttaatgcactgaaggatatgaattgggatctcagtcagtggtgccctcttatcgacgacaggtgttttttgtcgtggcttgtaaaggtaccttcagagcaggagcagctaagagctcgccaaattagtgctcaacaaatcaacaaagtggaagagctctggaagacaaatcctgatgcatctcttgaagatcttgaaaagcccggtgtagatgatgaacctcagccagttgttttgaagtatgaagatgcttaccagtaccaaaatgtttttgcaccactgataaagcttgaggctgattatgacaagatgatgaaagagtcacagagcaaggataatgtaactgtccggtgggatattgggttgaacaagaagcgtgtagcttactttgtctttccaaaggaagacaatgagttgaggcttgtgcctggagatgaactacgcctgagatatcctggtgatagctcacatcccacatggcaatctgtcggacatgtgattaagctcactgcacaagaggaggtggcacttgagcttcgcgctagtcagggggtgcctactgagctaaatgttggattcagtgtggattttgtttggaagagtaccagttttgataggatgcaaggagcgatgaaaacttttgctgtggacgagacaagtgtcagtggatacatataccatcaccttttgggacatgaagttgagcatcaaataatacgtaataccctaccaagacgctttggtgcacctggacttccagaactaaatgcttcccaggttttagcagttaaaagtgtcctgcagaagccagttagtttgattcaaggtccacctggcactggaaaaactgtcacatctgctgcaattgtgtatcacatggcaaaacaaggtcaaggacaggttcttgtatgtgccccaagtaatgttgctgttgatcagctggcagagaagataagctcaactggtctgaaggttgttagactgtgtgcaaaatctagagaagctgtttcgtctcctgttgagcatctcacacttcattatcaggttaggcaccttgatacttctgagaagagtgaattgcacaagctacaacaactgaaagatgaacaaggtgaattgtccagcagtgatgagaagaaatacaaggcactaaagcgtgccactgaaagagagatactgcagagtgccgatgtcatttgttgcacctgtgttggtgctggagatcctcgtctttcaaacttccgtttccgacaagttcttattgatgagtccacacaggctacagagccggaatgtcttattcctttagtgcttggtgtcaagcaggttgtccttgtcggtgatcattgtcaactgggtccagtcatcatgtgcaaaaaagcagcccgtgcagggttagcacaatctctctttgaacgccttgttatccttggagtgaagccattcaggctacaggtccagtatagaatgcatccttgcctctcggagttcccatccaactgcttctatgaaggcacactgcaaaatggagtgactgttaatgagaggcaatcgtctggaattgattttccttggcctgttccaaatcggcctatgttcttctatgtgcagatgggacaagaagagatcagtgctagtgggacatcctatctcaatagaactgaagctgcaaatgttgaaaaaattgtaacaacatttttaagaagtggtgttgtaccaagccagattggagttatcacaccttatgaaggacagagggcttacatcgtaaattacatggcaaggaatggctctcttcgccaacaactttacaaagaaatcgaggttgctagtgtagactcatttcagggtagagagaaagactacattattctatcttgtgttagaagcaatgagcaccagggaatcgggtttctcaatgatccgcgcaggttaaatgttgcgctaactcgtgcacgttatggcatagttattcttggtaatccaaaagtactaagcaagcagccactttggaatagcttgttgacacattacaaggagcatgagtgcttggtagaaggacctctgaacaacttaaagcagagtatggtgcaatttcagaagccaaaaaagatatataatgaccggagattgttcctgggcggtggtcaaggtgttatgcatggaactaactttggggctggggcctcaagccaagcagcagataagagaagtggcagagggaaagcctggtgtgcacccggttggctatgctgtaccacgtatgccttttcctccatttcctggggctccacattctcaaccatacgcaattccaacccggggtttgcatgggccccttggagctgttccaccggtgcatcaacctggaagtagaaactttgggtcagctcgttcaaatactggtgggcctattggtggccaccttgctcatcaacagaactcccagcaagctatggggagcattgggtcaaattttaactacactggaatggagaatccaagtagtcagccttctggtggagcacaaatgtcccaaactggattaatgacccaggacttctttgtagacgattttaagagccaagggtcacatgtgccatacaatattgctgaattttctacccaggcttctcaaggtggttatggtgttgagtttactcaagcgccccaatctggatactctgggaattatatgaaccaaaattcacatcctggatactcccatattggtacaacaaatgacattgtatctcaggatcacatggcccatggatctcatgggatgtttacacaagcgggatataatgatccctcacaagatgagtcgtctcagattcattatggaatggctgccgctggccctctacagtcgcagggcatgatgaaccccttgtactctcaatcctatgctcactacaacacccaaccacagtctcttcaacctccgccccagtgataatgaaagcttgtgataggatgaagccaaattttggaagtttggtgggttgcatcttttggcccacatgtgcacttctccgctgtttcagactcgatggtgcatagacatcagatgcaagcaatgaaggcacactatgtattggctatttatcggggcaggcttgactgaggggcacaaggattgcaacgtatcattgatcgttgtagttcactgcccactttggccacaggagaggtcatatcatcgagaggttgacggcactaccctcatccctcacctgtatagaaaggcaatcggggccaatagtggtacgatgtgaatattccaggatttgctgccattcagaaagtcaagttgcagcaactgcatgcctccatggtaccatgaagacacgcccgtagagtggctttgtatagaggtgctataggcgaggtggacaaccctttcggatatcgcacatggcaagatatttacattgacattttgtatgcacctgatatggttttgatatttatgccacaaatcatttaggtggtgatgcaagtagtttgttgtgattggaaatttgggagtgttcgtgaaagcaagtttgatcctgaaatcttatgggggaatggttgagtgggggttattttgttgtgaaacaggtgtctttgaaaagaaacctttccaggagtgatttcatcaagattgattgttagaatagacattagtaactgttataaatggttaacatggtcaccaaagcggtacgtctagttaacatggccacaaagacattaatcaactttgagacgaatgacaggacctaaaggggcatgttctttggcaaagtagaagtggtcgtctcgcagttttatagcaagacggccattgacttatggttccaccactcccaccccttcccatctttggtagattttctatcatatctcatattt

SEQ ID NO: 22447 - DNA, 4701 bp, Zea Mays
accccaccatccttcccgagtcgtcctctccattttcccctcccgattcgccccgtcttcccaagccctacgccagcgacaaaaccctaaccggtgggatggcgacgcagccgccctctaccgccactgccgcggttgacctctatgagacggcctcgcagccggacgcccccgccgccggcgacgcctacacttttctcgagttcaacacgcagggggacgacttcgactaccccgacttcccggagctctctcaaccacctccccgatccacgccgctgacgtcctccatccccggcgccggcacgtcgtcctcgtcgtggcctgccccaccgcctccgccgtccgacgcggcctccccggaacccgatctcacgtctcaagacgtccacaccccgccggcctcctcctcctcgccgtcgccgcgttccgcctccaaggcgcgtccgtcggctgcggcggatgggctcgcctccggggttgtcgcacttaacttcgaggatcctgtaggaaccggcgccgtggaggacgggtacgactacagcaagggagacttcgtggaacacgcatgccggtactgcgggatccacaaccctgcgtgcgtggcgaggtgcaacgtaccctcctgccgcaagtggttctgtaactcgcgggggaacacttcaggctcccacattgtcaaccacctggttagggcaaagcataaggaagtatgccttcacaaggatagccctttaggagaaacaattctcgaatgctacaactgtggttgtcggaatgtaccttcagagcaggagcagctaagagctcgccaaattagtgctcaacaaatcaacaaagtggaagagctctggaagacaaatcctgatgcatctcttgaagatcttgaaaagcccggtgtagatgatgaacctcagccagttgttttgaagtatgaagatgcttaccagtaccaaaatgtttttgcaccactgataaagcttgaggctgattatgacaagatgatgaaagagtcacagagcaaggataatgtaactgtccggtgggatattgggttgaacaagaagcgtgtagcttactttgtctttccaaagacaatgagttgaggcttgtgcctggagatgaactacgcctgagatatcctggtgatagctcacatcccacatggcaatctgtcggacatgtgattaagctcactgcacaagaggaggtggcacttgagcttcgcgctagtcagggggtgcctactgagctaaatgttggattcagtgtggattttgtttggaagagtaccagttttgataggatgcaaggagcgatgaaaacttttgctgtggacgagacaagtgtcagtggatacatataccatcaccttttgggacatgaagttgagcatcaaataatacgtaataccctaccaagacgctttggtgcacctggacttccagaactaaatgcttcccaggttttagcagttaaaagtgtcctgcagaagccagttagtttgattcaaggtccacctggcactggaaaaactgtcacatctgctgcaattgtgtatcacatggcaaaacaaggtcaaggacaggttcttgtatgtgccccaagtaatgttgctgttgatcagctggcagagaagataagctcaactggtctgaaggttgttagactgtgtgcaaaatctagagaagctgtttcgtctcctgttgagcatctcacacttcattatcaggttaggcaccttgatacttctgagaagagtgaattgcacaagctacaacaactgaaagatgaacaaggtgaattgtccagcagtgatgagaagaaatacaaggcactaaagcgtgccactgaaagagagatactgcagagtgccgatgtcatttgttgcacctgtgttggtgctggagatcctcgtctttcaaacttccgtttccgacaagttcttattgatgagtccacacaggctacagagccggaatgtcttattcctttagtgcttggtgtcaagcaggttgtccttgtcggtgatcattgtcaactgggtccagtcatcatgtgcaaaaaagcagcccgtgcagggttagcacaatctctctttgaacgccttgttatccttggagtgaagccattcaggctacaggtccagtatagaatgcatccttgcctctcggagttcccatccaactgcttctatgaaggcacactgcaaaatggagtgactgttaatgagaggcaatcgtctggaattgattttccttggcctgttccaaatcggcctatgttcttctatgtgcagatgggacaagaagagatcagtgctagtgggacatcctatctcaatagaactgaagctgcaaatgttgaaaaaattgtaacaacatttttaagaagtggtgttgtaccaagccagattggagttatcacaccttatgaaggacagagggcttacatcgtaaattacatggcaaggaatggctctcttcgccaacaactttacaaagaaatcgaggttgctagtgtagactcatttcagggtagagagaaagactacattattctatcttgtgttagaagcaatgagcaccagggaatcgggtttctcaatgatccgcgcaggttaaatgttgcgctaactcgtgcacgttatggcatagttattcttggtaatccaaaagtactaagcaagcagccactttggaatagcttgttgacacattacaaggagcatgagtgcttggtagaaggacctctgaacaacttaaagcagagtatggtgcaatttcagaagccaaaaaagatatataatgaccggagattgttcctgggcggtggtcaaggtgttatgcatggaactaactttggggctggggcctcaagccaagcagcagataagagaagtggcagagggaaagaaggacaatcgtttgctccttatggccctccaaatggggtgcataagcctggtgtgcacccggttggctatgctgtaccacgtatgccttttcctccatttcctggggctccacattctcaaccatacgcaattccaacccggggtttgcatgggccccttggagctgttccaccggtgcatcaacctggaagtagaaactttgggtcagctcgttcaaatactggtgggcctattggtggccaccttgctcatcaacagaactcccagcaagctatggggagcattgggtcaaattttaactacactggaatggagaatccaagtagtcagccttctggtggagcacaaatgtcccaaactggattaatgacccaggtgcctgtccaaggactaagtcaaacattccgtgatggtttttctattggtgggatgtcacaggacttctttgtagacgattttaagagccaagggtcacatgtgccatacaatattgctgaattttctacccaggcttctcaaggtggttatggtgttgagtttactcaagcgccccaatctggatactctgggaattatatgaaccaaaattcacatcctggatactcccatattggtacaacaaatgacattgtatctcaggatcacatggcccatggatctcatgggatgtttacacaagcgggatataatgatccctcacaagatgagtcgtctcagattcattatggaatggctgccgctggccctctacagtcgcagggcatgatgaaccccttgtactctcaatcctatgctcactacaacacccaaccacagtctcttcaacctccgccccagtgataatgaaagcttgtgataggatgaagccaaattttggaagtttggtgggttgcatcttttggcccacatgtgcacttctccgctgtttcagactcgatggtgcatagacatcagatgcaagcaatgaaggcacactatgtattggctatttatcggggcaggcttgactgaggggcacaaggattgcaacgtatcattgatcgttgtagttcactgcccactttggccacaggagaggtcatatcatcgagaggttgacggcactaccctcatccctcacctgtatagaaaggcaatcggggccaatagtggtacgatgtgaatattccaggatttgctgccattcagaaagtcaagttgcagcaactgcatgcctccatggtaccatgaagacacgcccgtagagtggctttgtatagaggtgctataggcgaggtggacaaccctttcggatatcgcacatggcaagatatttacattgacattttgtatgcacctgatatggttttgatatttatgccacaaatcatttaggtggtgatgcaagtagtttgttgtgattggaaatttgggagtgttcgtgaaagcaagtttgatcctgaaatcttatgggggaatggttgagtgggggttattttgttgtgaaacaggtgtctttgaaaagaaacctttccaggagtgatttcatcaagattgattgttagaatagacattagtaactgttataaatggttaacatggtcaccaaagcggtacgtctagttaacatggccacaaagacattaatcaactttgagacgaatgacaggacctaaaggggcatgttctttggcaaagtagaagtggtcgtctcgcagttttatagcaagacggccattgacttatggttccaccactcccaccccttcccatctttggtagattttctatcatatctcatattt

SEQ ID NO: 22448 - DNA, 1036 bp, Zea Mays
gcgaatccatttagatatgtgtacctgttaccccaactctagtcgtcggaaccccaaccgagttccccagtactccgcagtccgcacggccgcatccgtcaagatccgcgaagagcaacgaggcgaggcgaggggagggaaaacaagtgagtgagagagagagagagaggagggaaaatgctgcgccacgccgcccgccgcctcgtttcccgcgccgtcgctccgcccaccgcgcgccgggcgctcgccacggcggaggtgcccgcggaggccgtcgaggactccacgttcgtcgaggcctggaaaaaggtcgcccccaacatcgagcccccagcgacgcccctctccctcatgcagccgcgcccgcccacgccagctaccatccctaccaagctcaccgtcaacttcgtcctcccctacaagtccgagatcgccaacaaggaggttgacatggtaattgtaccagctacaactggtcagatgggtgttttgccaggccatgttgccacaattgcagagctcaagcctggtgttctctcagtacatgaaggaaacgatatcgacccagcattggttcagaagggtctcgctgaattcactgccaagcttggttcggcctctactgacctggagaaggctgaggcccagatcggagtcgatgttcacagtgccctcaatgctgcattgaccggttaattggtggcattttaaattgtcttgtctttttcatctacagttttagagtgagtttaagtttgcaaactcatgggcatgggatggagggaatgatcctaaataaattatactccatctaaaacatggacatatgtttcttgtttcctgaatcctgcatggatttctttttgtactggtaaacattttaactctgagctcaagacctggagctgctttctgcccccgttgagtttgggccatggatcagatgaaattgatgtttgtccgtaggttatgttaattgttaaatgttattatgtctatttttaagagaaatataaagtactgctcgggttactgc

SEQ ID NO: 22449 - DNA, 4034 bp, Zea Mays
gcaaaagactcacatgtgaaaccatttttcaaaagggcgaaaacgccgcgtgccccagcatatccaccacagtaaccaaaacctcgccggcggcgggcggcggcgggcggccatgtcgcactggaaggagaaggagaatgctccacctctcccgctctacccaagcggcgcctctaacccctctcatctcctcccctgcaagcgcccgctgcaatccccatccccatgcccaccgctgcgccggccgctcgtcgatatcactggcaacgcattggaacagcggggcgggtatgggtatacaactcccctcccgaacgcttccaggccttgcgggtttcttctgcacgacgacgaagacgacatgaacgaggcattcttgcgggaggtggacgccatctgcgaggagcgtgcgcggtccacggccaggaaggaggaaaaggagaaggagaaggagaaggagaagaagccagcagaggagcataaggggacgggcggagtggcgctcatggcggcagcgggcacgattgacgccgctggaacagagacagcaacgcttgacgatgctttctgggaggaggtgagcgccatctgtgaggagtgtgatgcccagtctgctgccaagagccaggagaggacgaaggaggaggggagcttggtgctgtcctgcgatgatgcttcactcccccctgctatttccatcaccgcggagggtggggagtttgaagatgcattctgggagatcaatgccgttatggaggagcacaatgccaaagctcatgccaagtatcaggaggggctcaagggaatggaggagaaagatggattgttagcactgtgcggtgatcatgatccttcagtttccccagtaatatccgttgcaatggggggtggagcgcttgttgatgcactccttggtgaggttgatgctgccgtccatgatgggcatgctgatatgtctgctgctaagggccaggtggaacagcaagatatggaactagaaaaggaggaagatgaagcgtgtgctccaaagaagtacaatgaatatttgcactccttgaatgataggcagaaggaggctgcatgtaatgatgttgctgttcctctaatgattgttgctggtccaggaagtggaaagacttccacaatggttggtagggtgctcacacttctcaaagagggtattccaccaccaaacattcttgctatgacattcaccacggctgctgcctcagaaatgagagagaggatagggacagtggtgggaaaggcagttgccaaggatattgcaataagcacatttcactcattttgcttgcagctttgcagaacacatgctgaaaagctaggacgcacatctgaattcataatctacggacatggacagcaacgaagggcgcttattgagacagagcgccttttggaaaatgacaaaaataatggtgttggagatacaactaaacagtatgatggggacataaaaaattctttcaaagacaaagctaaaaagtggcagaaatttattacacaggcaaaagcttcaggaagaactccagaggactatgaaaaaaagggtgatttgacaggagcttctgttcttcgacattacaatgaaatattaagatcttgtaatgctcttgattaccatgatttcattaactcatctataacccttctcacaaattttcctgaagtgtacaaagagtgtcaggatatgtggcgggcaattgtagttgatgagtttcaggataccagtgctatgcagtattgtcttctgaagattctagcttcccacaatcatataactattgtcggtgatgaagatcagtccatcttcagtttcaatggtgccgatgtatctggctttgattcatttcgtaaagattttccggatcataaagagatcaggttgagcaagaattaccgctccacacgtgcaattgttgaagcagcaactgctctaattcagaacaacactaagcggcatcatcctaggcttgtagagaccgacaacccttctggctgtaagatcactgtcaaggagtgccacagtgaagattcacaatgcgcatttgttattgacaaaatcattgaaattacatctggtaccgctgaggggtgcaactttggcaacattgctgtcctatatcgaagacagataactggcaaagctttccaagtctccttccgcaacaggaaaattccctttaacattcatggtgtggctttctacaggaaaaaggtgatcaaagctatcatggcaatacttcggaccacattacctggttgtgatgatggtccttggcgtcaagccttcaaggcccttttacccggtgacaaagaagaaaagaagaagattatatatcatgttcaaaagatttcactggctagaacgtgtagttttttaactgctgctagtgacatcttcagcgctaaggtctctggtaccttcaaaagggcccagattactcaaggacgtaaggttttatcgaccttggatagcctatcaaaacttgttgaaaaggaacaatcagtttcagtcatcatttcgtctgcgggagacatgctacctcagaaatatctccttgagaagcgtgctgttgttgatgttgataatggcaagttattaaatgaagatagtgatatcagatcggtccttcagtttttaatggatgatgtgtctgacttcttgtcaacacatttttctagttcaatggagagaagcaagactgatgagaaaggctgtgcttctacacttaaagctttcattgattatatatctttgagggaaactgaaaattttcgatcccgaaaggaggaaaataagaattctatcacattaacaactattcatcagtcaaaaggtttggagtgggatgttgtgtttattgtgcaggcaaatgattcggaaattcctttgttgcatgagtacaatggtagtgtgaaagaagctggaagcacactggaggaggagaggaggttactctatgttgcaatgacacgagctcggaaaaagctgtacatcttgcatgttacaattgattctaaccgtcagcttctgcaaccatcacgttttctcagggaaattcctgatcaccttcttgaggtgcagggcgaagagcctctgagaaaaatgcctgaacgaccttcaggtgatgttccttttgatgactctgaagtggatacatcaatcggaaagccaattatgggaccaaacgaagcttcatcttatccagaacaggctcaggcatgccttgctaatgatttcttgagaaggtttgatattgatgatagatcggtagtctcacatatatttcatcattggggcaagaagcaggcatttcaaaatccaaagagattacttgaaaagatcagttttgtaattgatgaacgcctacgtggtaaaggatacaagcgcaaggatgtcttgcgaaagctgaaatcgttcctaagcggtgatgaagcattgggctacgcacaatatgttatcaagtgggaacagattcctatagaaaagcggaatcatttgataagagaaaggcaggaacatttccaaaagcagaggattgagaactctatgggttcgtcagaacccacagccaagcagatatcgtaccttcgaagcttggggtgcaccatcactccgacttctcgcttacacgcatcacatcttatcgaaaagtacaaatcgctctaacttggttgaagaaagtacaaatcacaacattttattgttttttatgtacatgccgtccatactacaaatgtagtagtgttgtgtactggatacatcaaggttgtacggcagctccgatcatatctattgtctgttcttcttagccatattcctgtagtacatgctgcattgttgtgacaccaagagtttttgcttctcttgggccttggcagtggtattggctaggcactggctaaccttgtactccattcctacttatatgaactccattgtgtttattattcatgagataaaaaaacattacactgaataaactgtcatctaagcaaatgaaaaaaaa

SEQ ID NO: 22450 - DNA, 2389 bp, Zea Mays
atttttcaaaagggcgaaaacgccgcgtgccccagcatatccaccacagtaaccaaaacctcgccggcggcgggcggcggcgggcggccatgtcgcactggaaggagaaggagaatgctccacctctcccgctctacccaagcggcgcctctaacccctctcatctcctcccctgcaagcgcccgctgcaatccccatccccatgcccaccgctgcgccggccgctcgtcgatatcactggcaacgcattggaacagcggggcgggtatgggtatacaactcccctcccgaacgcttccaggccttgcgggtttcttctgcacgacgacgaagacgacatgaacgaggcattcttgcgggaggtggacgccatctgcgaggagcgtgcgcggtccacggccaggaaggaggaaaaggagaaggagaaggagaaggagaagaagccagcagaggagcataaggggacgggcggagtggcgctcatggcggcagcgggcacgattgacgccgctggaacagagacagcaacgcttgacgatgctttctgggaggaggtgagcgccatctgtgaggagtgtgatgcccagtctgctgccaagagccaggagaggacgaaggaggaggggagcttggtgctgtcctgcgatgatgcttcactcccccctgctatttccatcaccgcggagggtggggagtttgaagatgcattctgggagatcaatgccgttatggaggagcacaatgccaaagctcatgccaagtatcaggaggggctcaagggaatggaggagaaagatggattgttagcactgtgcggtgatcatgatccttcagtttccccagtaatatccgttgcaatggggggtggagcgcttgttgatgcactccttggtgaggttgatgctgccgtccatgatgggcatgctgatatgtctgctgctaagggccaggtggaacagcaagatatggaactagaaaaggaggaagatgaagcgtgtgctccaaagaagtacaatgaatatttgcactccttgaatgataggcagaaggaggctgcatgtaatgatgttgctgttcctctaatgattgttgctggtccaggaagtggaaagacttccacaatggttggtagggtgctcacacttctcaaagagggtattccaccaccaaacattcttgctatgacattcaccacggctgctgcctcagaaatgagagagaggatagggacagtggtgggaaaggcagttgccaaggatattgcaataagcacatttcactcattttgcttgcagctttgcagaacacatgctgaaaagctaggacgcacatctgaattcataatctacggacatggacagcaacgaagggcgcttattgagacagagcgccttttggaaaatgacaaaaataatggtgttggagatacaactaaacagtatgatggggacataaaaaattctttcaaagacaaagctaaaaagtggcagaaatttattacacaggcaaaagcttcaggaagaactccagaggactatgaaaaaaagggtgatttgacaggatgtacaaagagtgtcaggatatgtggcgggcaattgtagttgatgagtttcaggataccagtgctatgcagtattgtcttctgaagattctagcttcccacaatcatataactattgtcggtgatgaagatcagtccatcttcagtttcaatggtgccgatgtatctggctttgattcatttcgtaaagattttccggatcataaagagatcaggttgagcaagaattaccgctccacacgtgcaattgttgaagcagcaactgctctaattcagaacaacactaagcggcatcatcctaggcttgtagagaccgacaacccttctggctgtaagatcactgtcaaggagtgccacagtgaagattcacaatgcgcatttgttattgacaaaatcattgaaattacatctggtaccgctgaggggtgcaactttggcaacattgctgtcctatatcgaagacagataactggcaaagctttccaagtctccttccgcaacaggaaaattccctttaacattcatggtgtggctttctacaggaaaaaggtgatcaaagctatcatggcaatacttcggaccacattacctggttgtgatgatggtccttggcgtcaagccttcaaggcccttttacccggtgacaaagaagaaaagaagaagattatatatcatgttcaaaagatttcactggctagaacgtgtagttttttaactgctgctagtgacatcttcagcgctaaggtctctggtaccttcaaaagggcccagattactcaaggacgtaaggttttatcgaccttggatagcctatcaaaacttgttgaa

SEQ ID NO: 22451 - DNA, 3629 bp, Zea Mays
atttttcaaaagggcgaaaacgccgcgtgccccagcatatccaccacagtaaccaaaacctcgccggcggcgggcggcggcgggcggccatgtcgcactggaaggagaaggagaatgctccacctctcccgctctacccaagcggcgcctctaacccctctcatctcctcccctgcaagcgcccgctgcaatccccatccccatgcccaccgctgcgccggccgctcgtcgatatcactggcaacgcattggaacagcggggcgggtatgggtatacaactcccctcccgaacgcttccaggccttgcgggtttcttctgcacgacgacgaagacgacatgaacgaggcattcttgcgggaggtggacgccatctgcgaggagcgtgcgcggtccacggccaggaaggaggaaaaggagaaggagaaggagaaggagaagaagccagcagaggagcataaggggacgggcggagtggcgctcatggcggcagcgggcacgattgacgccgctggaacagagacagcaacgcttgacgatgctttctgggaggaggtgagcgccatctgtgaggagtgtgatgcccagtctgctgccaagagccaggagaggacgaaggaggaggggagcttggtgctgtcctgcgatgatgcttcactcccccctgctatttccatcaccgcggagggtggggagtttgaagatgcattctgggagatcaatgccgttatggaggagcacaatgccaaagctcatgccaagtatcaggaggggctcaagggaatggaggagaaagatggattgttagcactgtgcggtgatcatgatccttcagtttccccagtaatatccgttgcaatggggggtggagcgcttgttgatgcactccttggtgaggttgatgctgccgtccatgatgggcatgctgatatgtctgctgctaagggccaggtggaacagcaagatatggaactagaaaaggaggaagatgaagcgtgtgctccaaagaagtacaatgaatatttgcactccttgaatgataggcagaaggaggctgcatgtaatgatgttgctgttcctctaatgattgttgctggtccaggaagtggaaagacttccacaatggttggtagggtgctcacacttctcaaagagggtattccaccaccaaacattcttgctatgacattcaccacggctgctgcctcagaaatgagagagaggatagggacagtggtgggaaaggcagttgccaaggatattgcaataagcacatttcactcattttgcttgcagctttgcagaacacatgctgaaaagctaggacgcacatctgaattcataatctacggacatggacagcaacgaagggcgcttattgagacagagcgccttttggaaaatgacaaaaataatggtgttggagatacaactaaacagtatgatggggacataaaaaattctttcaaagacaaagctaaaaagtggcagaaatttattacacaggcaaaagcttcaggaagaactccagaggactatgaaaaaaagggtgatttgacaggagcttctgttcttcgacattacaatgaaatattaagatcttgtaatgctcttgattaccatgatttcattaactcatctataacccttctcacaaattttcctgaagtgtacaaagagtgtcaggatatgtggcgggcaattgtagttgatgagtttcaggataccagtgctatgcagtattgtcttctgaagattctagcttcccacaatcatataactattgtcggtgatgaagatcagtccatcttcagtttcaatggtgccgatgtatctggctttgattcatttcgtaaagattttccggatcataaagagatcaggttgagcaagaattaccgctccacacgtgcaattgttgaagcagcaactgctctaattcagaacaacactaagcggcatcatcctaggcttgtagagaccgacaacccttctggctgtaagatcactgtcaaggagtgccacagtgaagattcacaatgcgcatttgttattgacaaaatcattgaaattacatctggtaccgctgaggggtgcaactttggcaacattgctgtcctatatcgaagacagataactggcaaagctttccaagtctccttccgcaacaggaaaattccctttaacattcatggtgtggctttctacaggaaaaaggtgatcaaagctatcatggcaatacttcggaccacattacctggttgtgatgatggtccttggcgtcaagccttcaaggcccttttacccggtgacaaagaagaaaagaagaagattatatatcatgttcaaaagatttcactggctagaacgtgtagttttttaactgctgctagtgacatcttcagcgctaaggtctctggtaccttcaaaagggcccagattactcaaggacgtaaggttttatcgaccttggatagcctatcaaaacttgttgaaaaggaacaatcagtttcagtcatcatttcgtctgcgggagacatgctacctcagaaatatctccttgagaagcgtgctgttgttgatgttgataatggcaagttattaaatgaagatagtgatatcagatcggtccttcagtttttaatggatgatgtgtctgacttcttgtcaacacatttttctagttcaatggagagaagcaagactgatgagaaaggctgtgcttctacacttaaagctttcattgattatatatctttgagggaaactgaaaattttcgatcccgaaaggaggaaaataagaattctatcacattaacaactattcatcagtcaaaaggtttggagtgggatgttgtgtttattgtgcaggcaaatgattcggaaattcctttgttgcatgagtacaatggtagtgtgaaagaagctggaagcacactggaggaggagaggaggttactctatgttgcaatgacacgagctcggaaaaagctgtacatcttgcatgttacaattgattctaaccgtcagcttctgcaaccatcacgttttctcagggaaattcctgatcaccttcttgaggtgcagggcgaagagcctctgagaaaaatgcctgaacgaccttcaggtgatgttccttttgatgactctgaagtggatacatcaatcggaaagccaattatgggaccaaacgaagcttcatcttatccagaacaggctcaggcatgccttgctaatgatttcttgagaaggtttgatattgatgatagatcggtagtctcacatatatttcatcattggggcaagaagcaggcatttcaaaatccaaagagattacttgaaaagatcagttttgtaattgatgaacgcctacgtggtaaaggatacaagcgcaaggatgtcttgcgaaagctgaaatcgttcctaagcggtgatgaagcattgggctacgcacaatatgttatcaagtgggaacagattcctatagaaaagcggaatcatttgataagagaaaggcaggaacatttccaaaagcagaggattgagaactctatgggttcgtcagaacccacagccaagcagcccatgttgctgtctatcagaaaactgaacagaattcgtccttgtttg

SEQ ID NO: 22452 - DNA, 3746 bp, Zea Mays
atttttcaaaagggcgaaaacgccgcgtgccccagcatatccaccacagtaaccaaaacctcgccggcggcgggcggcggcgggcggccatgtcgcactggaaggagaaggagaatgctccacctctcccgctctacccaagcggcgcctctaacccctctcatctcctcccctgcaagcgcccgctgcaatccccatccccatgcccaccgctgcgccggccgctcgtcgatatcactggcaacgcattggaacagcggggcgggtatgggtatacaactcccctcccgaacgcttccaggccttgcgggtttcttctgcacgacgacgaagacgacatgaacgaggcattcttgcgggaggtggacgccatctgcgaggagcgtgcgcggtccacggccaggaaggaggaaaaggagaaggagaaggagaaggagaagaagccagcagaggagcataaggggacgggcggagtggcgctcatggcggcagcgggcacgattgacgccgctggaacagagacagcaacgcttgacgatgctttctgggaggaggtgagcgccatctgtgaggagtgtgatgcccagtctgctgccaagagccaggagaggacgaaggaggaggggagcttggtgctgtcctgcgatgatgcttcactcccccctgctatttccatcaccgcggagggtggggagtttgaagatgcattctgggagatcaatgccgttatggaggagcacaatgccaaagctcatgccaagtatcaggaggggctcaagggaatggaggagaaagatggattgttagcactgtgcggtgatcatgatccttcagtttccccagtaatatccgttgcaatggggggtggagcgcttgttgatgcactccttggtgaggttgatgctgccgtccatgatgggcatgctgatatgtctgctgctaagggccaggtggaacagcaagatatggaactagaaaaggaggaagatgaagcgtgtgctccaaagaagtacaatgaatatttgcactccttgaatgataggcagaaggaggctgcatgtaatgatgttgctgttcctctaatgattgttgctggtccaggaagtggaaagacttccacaatggttggtagggtgctcacacttctcaaagaggctaggacgcacatctgaattcataatctacggacatggacagcaacgaagggcgcttattgagacagagcgccttttggaaaatgacaaaaataatggtgttggagatacaactaaacagtatgatggggacataaaaaattctttcaaagacaaagctaaaaagtggcagaaatttattacacaggcaaaagcttcaggaagaactccagaggactatgaaaaaaagggtgatttgacaggagcttctgttcttcgacattacaatgaaatattaagatcttgtaatgctcttgattaccatgatttcattaactcatctataacccttctcacaaattttcctgaagtgtacaaagagtgtcaggatatgtggcgggcaattgtagttgatgagtttcaggataccagtgctatgcagtattgtcttctgaagattctagcttcccacaatcatataactattgtcggtgatgaagatcagtccatcttcagtttcaatggtgccgatgtatctggctttgattcatttcgtaaagattttccggatcataaagagatcaggttgagcaagaattaccgctccacacgtgcaattgttgaagcagcaactgctctaattcagaacaacactaagcggcatcatcctaggcttgtagagaccgacaacccttctggctgtaagatcactgtcaaggagtgccacagtgaagattcacaatgcgcatttgttattgacaaaatcattgaaattacatctggtaccgctgaggggtgcaactttggcaacattgctgtcctatatcgaagacagataactggcaaagctttccaagtctccttccgcaacaggaaaattccctttaacattcatggtgtggctttctacaggaaaaaggtgatcaaagctatcatggcaatacttcggaccacattacctggttgtgatgatggtccttggcgtcaagccttcaaggcccttttacccggtgacaaagaagaaaagaagaagggcccagattactcaaggacgtaaggttttatcgaccttggatagcctatcaaaacttgttgaaaaggaacaatcagtttcagtcatcatttcgtctgcgggagacatgctacctcagaaatatctccttgagaagcgtgctgttgttgatgttgataatggcaagttattaaatgaagatagtgatatcagatcggtccttcagtttttaatggatgatgtgtctgacttcttgtcaacacatttttctagttcaatggagagaagcaagactgatgagaaaggctgtgcttctacacttaaagctttcattgattatatatctttgagggaaactgaaaattttcgatcccgaaaggaggaaaataagaattctatcacattaacaactattcatcagtcaaaaggtttggagtgggatgttgtgtttattgtgcaggcaaatgattcggaaattcctttgttgcatgagtacaatggtagtgtgaaagaagctggaagcacactggaggaggagaggaggttactctatgttgcaatgacacgagctcggaaaaagctgtacatcttgcatgttacaattgattctaaccgtcagcttctgcaaccatcacgttttctcagggaaattcctgatcaccttcttgaggtgcagggcgaagagcctctgagaaaaatgcctgaacgaccttcaggtgatgttccttttgatgactctgaagtggatacatcaatcggaaagccaattatgggaccaaacgaagcttcatcttatccagaacaggctcaggcatgccttgctaatgatttcttgagaaggtttgatattgatgatagatcggtagtctcacatatatttcatcattggggcaagaagcaggcatttcaaaatccaaagagattacttgaaaagatcagttttgtaattgatgaacgcctacgtggtaaaggatacaagcgcaaggatgtcttgcgaaagctgaaatcgttcctaagcggtgatgaagcattgggctacgcacaatatgttatcaagtgggaacagattcctatagaaaagcggaatcatttgataagagaaaggcaggaacatttccaaaagcagaggattgagaactctatgggttcgtcagaacccacagccaagcagatatcgtaccttcgaagcttggggtgcaccatcactccgacttctcgcttacacgcatcacatcttatcgaaaagtacaaatcgctctaacttggttgaagaaagtacaaatcacaacattttattgttttttatgtacatgccgtccatactacaaatgtagtagtgttgtgtactggatacatcaaggttgtacggcagctccgatcatatctattgtctgttcttcttagccatattcctgtagtacatgctgcattgttgtgacaccaagagtttttgcttctcttgggccttggcagtggtattggctaggcactggctaaccttgtactccattcctacttatatgaactccattgtgtttattattcatgagataaaaaaacattacactgaataaactgtcatctaagcaaatgaaaaaaaa

SEQ ID NO: 22453 - DNA, 4285 bp, Zea Mays
atttttcaaaagggcgaaaacgccgcgtgccccagcatatccaccacagtaaccaaaacctcgccggcggcgggcggcggcgggcggccatgtcgcactggaaggagaaggagaatgctccacctctcccgctctacccaagcggcgcctctaacccctctcatctcctcccctgcaagcgcccgctgcaatccccatccccatgcccaccgctgcgccggccgctcgtcgatatcactggcaacgcattggaacagcggggcgggtatgggtatacaactcccctcccgaacgcttccaggccttgcgggtttcttctgcacgacgacgaagacgacatgaacgaggcattcttgcgggaggtggacgccatctgcgaggagcgtgcgcggtccacggccaggaaggaggaaaaggagaaggagaaggagaaggagaagaagccagcagaggagcataaggggacgggcggagtggcgctcatggcggcagcgggcacgattgacgccgctggaacagagacagcaacgcttgacgatgctttctgggaggaggtgagcgccatctgtgaggagtgtgatgcccagtctgctgccaagagccaggagaggacgaaggaggaggggagcttggtgctgtcctgcgatgatgcttcactcccccctgctatttccatcaccgcggagggtggggagtttgaagatgcattctgggagatcaatgccgttatggaggagcacaatgccaaagctcatgccaagtatcaggaggggctcaagggaatggaggagaaagatggattgttagcactgtgcggtgatcatgatccttcagtttccccagtaatatccgttgcaatggggggtggagcgcttgttgatgcactccttggtgaggttgatgctgccgtccatgatgggcatgctgatatgtctgctgctaagggccaggtggaacagcaagatatggaactagaaaaggaggaagatgaagcgtgtgctccaaagaagtacaatgaatatttgcactccttgaatgataggcagaaggaggctgcatgtaatgatgttgctgttcctctaatgattgttgctggtccaggaagtggaaagacttccacaatggttggtagggtgctcacacttctcaaagagggtattccaccaccaaacattcttgctatgacattcaccacggctgctgcctcagaaatgagagagaggatagggacagtggtgggaaaggcagttgccaaggatattgcaataagcacatttcactcattttgcttgcagctttgcagaacacatgctgaaaagctaggacgcacatctgaattcataatctacggacatggacagcaacgaagggcgcttattgagacagagcgccttttggaaaatgacaaaaataatggtgttggagatacaactaaacagtatgatggggacataaaaaattctttcaaagacaaagctaaaaagtggcagaaatttattacacaggcaaaagcttcaggaagaactccagaggactatgaaaaaaagggtgatttgacaggagcttctgttcttcgacattacaatgaaatattaagatcttgtaatgctcttgattaccatgatttcattaactcatctataacccttctcacaaattttcctgaagtgtacaaagagtgtcaggatatgtggcgggcaattgtagttgatgagtttcaggataccagtgctatgcagtattgtcttctgaagattctagcttcccacaatcatataactattgtcggtgatgaagatcagtccatcttcagtttcaatggtgccgatgtatctggctttgattcatttcgtaaagattttccggatcataaagagatcaggttgagcaagaattaccgctccacacgtgcaattgttgaagcagcaactgctctaattcagaacaacactaagcggcatcatcctaggcttgtagagaccgacaacccttctggctgtaagatcactgtcaaggagtgccacagtgaagattcacaatgcgcatttgttattgacaaaatcattgaaattacatctggtaccgctgaggggtgcaactttggcaacattgctgtcctatatcgaagacagataactggcaaagctttccaagtctccttccgcaacaggaaaattccctttaacattcatggtgtggctttctacaggaaaaaggtgatcaaagctatcatggcaatacttcggaccacattacctggttgtgatgatggtccttggcgtcaagccttcaaggcccttttacccggtgacaaagaagaaaagaagaagattatatatcatgttcaaaagatttcactggctagaacgtgtagttttttaactgctgctagtgacatcttcagcgctaaggtctctggtaccttcaaaagggcccagattactcaaggacgtaaggttttatcgaccttggatagcctatcaaaacttgttgaaaaggaacaatcagtttcagtcatcatttcgtctgcgggagacatgctacctcagaaatatctccttgagaagcgtgctgttgttgatgttgataatggcaagttattaaatgaagatagtgatatcagatcggtccttcagtttttaatggatgatgtgtctgacttcttgtcaacacatttttctagttcaatggagagaagcaagactgatgagaaaggctgtgcttctacacttaaagctttcattgattatatatctttgagggaaactgaaaattttcgatcccgaaaggaggaaaataagaattctatcacattaacaactattcatcagtcaaaaggtttggagtgggatgttgtgtttattgtgcaggtatttctttactcttcaggacgagcttgcatatacaaatactctgccatatatgtagtgttaggcagacagtgtggtagcgtctggcatctaattgctgattaagcagcttgtcctctgtgatctggctgaagaaacaattcagtactgtctggccacatgtgtgtttgctagagaggcctggaccctcctcttattcatcaaattgagatggctgactctctcacctcatccaaatgacagaatcctacgctggtggagtcaatctgttaaggcaaatgattcggaaattcctttgttgcatgagtacaatggtagtgtgaaagaagctggaagcacactggaggaggagaggaggttactctatgttgcaatgacacgagctcggaaaaagctgtacatcttgcatgttacaattgattctaaccgtcagcttctgcaaccatcacgttttctcagggaaattcctgatcaccttcttgaggtgcagggcgaagagcctctgagaaaaatgcctgaacgaccttcaggtgatgttccttttgatgactctgaagtggatacatcaatcggaaagccaattatgggaccaaacgaagcttcatcttatccagaacaggctcaggcatgccttgctaatgatttcttgagaaggtttgatattgatgatagatcggtagtctcacatatatttcatcattggggcaagaagcaggcatttcaaaatccaaagagattacttgaaaagatcagttttgtaattgatgaacgcctacgtggtaaaggatacaagcgcaaggatgtcttgcgaaagctgaaatcgttcctaagcggtgatgaagcattgggctacgcacaatatgttatcaagtgggaacagattcctatagaaaagcggaatcatttgataagagaaaggcaggaacatttccaaaagcagaggattgagaactctatgggttcgtcagaacccacagccaagcagatatcgtaccttcgaagcttggggtgcaccatcactccgacttctcgcttacacgcatcacatcttatcgaaaagtacaaatcgctctaacttggttgaagaaagtacaaatcacaacattttattgttttttatgtacatgccgtccatactacaaatgtagtagtgttgtgtactggatacatcaaggttgtacggcagctccgatcatatctattgtctgttcttcttagccatattcctgtagtacatgctgcattgttgtgacaccaagagtttttgcttctcttgggccttggcagtggtattggctaggcactggctaaccttgtactccattcctacttatatgaactccattgtgtttattattcatgagataaaaaaacattacactgaataaactgtcatctaagcaaatgaaaaaaaa

SEQ ID NO: 22454 - DNA, 3305 bp, Zea Mays
agtttttctaagctcgactaagttttaaaaaaaacataccataacatttatgttttcaaataggtttgctataaaattatttttaccattcatctgataatacttatttgacatcataaaaatgctaccatttttaagagatttggtcatacttaaaattatttaactcatcgaaaaataagaattacactttttgggatgttgtgactatttatcaatgaagaaatagtttgattcgatgatctttgaatgcttgtatttttcaaaccatctaaccaacacatgttttgtttccaatttgagagttattcttgctgaattggtgtttgaggtagaagaaatgttgaaaaagaatgaaatataagaggattatgaataaagaaatttgcagaattgaggaattcaaatggaagggttgattttttaataattcaagaggccaaggaggaaagtacaaatgacatgtcatggagatgttgaattcacacatgaagagtgactaatgacgatgttagagcgagacgacagtgcaataattgtccatgaaaacccatgagaagtttgagataaaacccaactcaaaaagtgtttgaaacaagggagttgatagtgcaatagaggcaccagatatgtctagtgtgcataggatatgtgccacctgacatgggtcattcttgtttagaattggtatatcatcggcgtgtctagtgtgcaccagataaggattaaatatcaacaataattcagttatatctatggattttaagcattctcatgttaaatagcaacaaaacacttcatgaatcattagccaagttacttattcaaaatgattaatattatatcttaatcattattatgcaaaataatgaataaacaaaattttaggtcgggtgtgggttggacctgtgggtcaaaatcttcacccgtacctgcactcgtcgggtttcgagtttgcgggttaaattgtcattcctaactattagccatggtattagctatgactatttggaacccaataactaatttttagtaactaactattagttctagaggttccaaacagggtctaagctaggctcgctaatagttagtcagctaacaaattattagatagattgagtcaattagtgaactaattgttagttgtgagttagctaacagtgagatggagtattagctagaagtgtttggaacctctacaactaattttaggagataactattaggtttcaaacaggacctaataaacatgcgcagctcagtgacatgtgctagacactattaagttgtatacacaaaccagttcaacctaaaaacttaagctgacagtaagaggcggacaattcacttatattatattctaacactcaagaactagtagcgaacaataattattttatttaattatgccaaacaagattcgaactcaaaatatctggctttgatatcatattaagttgcatacatcaaccagttcaacctaaaagtttaacctgataggaagagacagataattcacttatattatattctatcaggcacaatagagaatcggtatatattactagtagtagaataaataggatatattattaccacgacacgattatcagagcagcatgaatacacagcagccagcacaaattactgtttgcgcaggccacatgattacacacgtcctcctagcagagtaaggcagtccctgcttaactgggctgcaggctaattaggttacaatcagcatatgtctatatatatatatatatatatatatatatatatatatatatatatataactagggttttcggggcgggtagacgatagacgcataaatatctatcggtagtgatgatgctagcatatcctgctgcatgacagaagagagagagcatgctttatctgatctggaagtggttcccggccgggtcgccgcggccgttctggtcggcgtgttggcggaatccattattgccgccgccggcgtgcgcgtcggccgagctcttccggcgccgctcgttgtggccggccagacgcaggcggcagctgcgcttgacgtcgtcgaactccgacagctcgtggaacctgccggaaacacacgtacggggggtcggtcagacggacctgcttaattgtatctgttgttgttacgcgcgctagctctaatcaatccaagggccacggatagtaaaaaacctcctgtcactcgtgagctagctactagccattacgaaactagtagccttgtacatgcatatatatgtgtccgtgtatttgtcagtggctcaacagcaccaggacagcttgaacagcagggagggaccaacaagaacttgtcatggcacacattaataagactgcaccagcctttattcgtcgtagtacgtaccaaggcttgaaggctactagtaaagccggatgcgctgctctcatcatgcatgtggtgcacatgcatgtagccggggattggagagtccagaaaagtggcgcgcgcagcaagatgctgaaaagctagctatgcctcaggaatcagggccgatcgaggagaacaagatcggcggcagtgaaaatgcccaaatatatagttcactgaagcaggcagccaaaattaaaccatgaaaacctagtccgtcctcttttctaatcgtcctgctactcttcttctttttaactacacaaatacacagtacacacatggttggttgtttactgggtttggttaatggatggttactgctggtactacggaacatcgtcctgctagaacagtaacattttttgagtgtgcgccagggtgtgtgtgacgtacggagcattgatcttgcctcggttagctaggctcacaggaacaggattagctagaccactagcgcgcgccgcagtggatgctgcagtcaccaaaagaggaactgtgtgcatgtatccagatttttctcggtgcaaatgtggcgcgggattatatgtggtgaggagcaagctaacatcctgtgtctaataatggttcatactattgctaacctacttaacttcttttataattttagcggaaaccggcgagccgctgcaacatcttaattattacaggctcgtcatgctatccatgatccaagaaaaaaaaaatcctatccgattttgaagatccatggactttaggcactgatgattttcctctctctctctctctgaataatgtaaaaaaaatggaactaagttcagtagcgcgagctgagcctgaaagtggctcgacgagcttcgggcgggcgcggggcttaccggctgcattgctggcagaagcgctggcg

SEQ ID NO: 22455 - DNA, 3359 bp, Zea Mays
tttttccctcccagaaatatatatcgagaaagaggaagaaaccaaaacgttatggacaccgtgcaaacttattgcagcgcactcgtctgcagtgcaacacagcacacgcataggaaggggccgtcgccgtgtacgtcggcgtcgcggcgtccacgaagtctccatttctgattctgaaacgcccacggcttcctcgctttgtcgctctcctctgtctgtccgcctgtccgagacctcggagccgacggccggttttaaaagagcctgcgcggtgtaaggattctcgggtcgggctcgggacgggagcaaccgcagtgggagacatgcccccttgcacaggagttggggctggggctggggctgtgcagcgccgagtagtaggagccgggaggcggtgacggacggaacagaaggcgcgggtcctgttgggcggccgcctggttcccgggtcctgttgggcgggcgcgcggctgagcggggccatccatcattgcctcctccgcgtgggtcttggctgcctctgtcgtcgtcctcgcggcgcgggtcgcgcggccgaggtgaagaccgtcaacttgtactcttccggcgctcgctggcggtggaggggacgaaagtagatagcgtacggaagcatcggcattgggtcgcgcgcgtaggggatggaccgtcggagctggctgtggcggcgcaagtcgacggacaagagccccggggagaccgagacctcggcgtccgagaagattactgatgaacaggattctgccaagagctctccaaactcgactcggtcgccggagatcacgtcgaaggaactggaggacgataacgacgtgaaggtgaaggtattgagtgagaggctatcatccgtagttctggatgtccgtgcgaaggatgatctcgtgaagcagcattccaaagttgcagaggaggctgttctaggatgggagaaggccgagaaggagatctcatcgctgaaggcgcagctgagcgctgcaacggccaagaactccgcgctggaggaccggctcgtccacctggacggcgccctcaaggaatgcgtccggcagctccggcgcgccaaggacgagcaggaccagacggtgcaggacgcgctggcacggcaagcgcggcagtgggagtcccacaaggccgacctcgagctgcgcatcgttgagctcacggcgaggctggaggccaagtccgagcgctcggtggtgggcgccaccgacggcgacacccgttccagcaggctagccgccctggagaaggagaactcggcgctgaagttgcagctgctcgccaagacggaggaactggagctcaggacgatagagaaggagctcaaccggcgggcggcggagacggcgagcaagcagcagctggagggcatcaggaaggtggccaagctccaagctgagtgcaggaggctgcaggccgcggcacaacggagggcgtcctccgtgaacgtcgagctccggcgttctccgagctcggcctgcgtcgagtcgctcacggattgccagtcggactgctccgactcatgggcctcggccctcgtcacggagctcgaccagttcaagaaggacaagagcggcgcgagcaccaggacagcgagcctcgtggccgcggacatcgacgtgatggacgacttcctcgagatggagaagctcgcctccgcgaacggctcgtcgaaaggcgacgccgtcgaggacgcgagcgggcaggtggagaaggcgctgcacgaggctcagcgcgagctgaggacttgccgccgccgggtaatggtggcagaggagagatcagctgagctacagcggcagctgaaccatgccaatggcgacaaacacgccatggaggcggaggcggaagctgctgaggcgaagggaagggagcttgagggcaagctcgagctcgcccgtgccgatatcgcgggcttgctggacaaggggcgcatcctggaggaacggctcgagtctgagaaggcgctgacacttgagctcgcagccaagtaccaggacatggagacgctggaggcagagaagagggagctgaacgctcagctggagacgtcacggtccgaagccaagaagctcagcgacaagatcgccctgatggagaggaagctggaggtggagaaggccctgtcgatccgactggcgacgaaatgccatggcgttgatgctctggaagcaaagaagaagggcgtcgagctcgagctggagtcggcacgcgaggaaatcgcttccctgcgaaacaaggctagtagcttggaactgcaagtcatggaagagaaagcgtcgtccgctggactcgcaatgcggtgccaagaactggaggagcttagatcccagcttgtgtcttcaaactcacggatcgttgagctgaacgagaaggttaaaacgctcgaggatgtgatcgagaaacagaggccagtgacggcggaattggagtctcagctccagtcgagacacgacgaaatcagcagcttgaaggaggacataagcctgttgcagaagaagctggagtcccagaagaacctgtcgtcagcttacatatctgcgctgggcgcttctgaaaccgagaagaaagaactggctacccggtttgaactcggagagaaagaggccgaggaattgcgcgggaagacgagtttgctggaggaacagatccacgaagagagggcacggtcatctgagtttgcggtaaaatgtcggaagatggaggaacagttctcccgcagatctcttcttggccaccaaccagtgaaatcttcggcgatcaaagatattcagataagaaaggagacagagctggccaaggctgccgggaaactggccgactgccagaagacgatagcttcactgagcagccagctgaaatcgttggccgatttcgacgagttcctccctgaaaccgagactagtggcgccgactcagccgacgcctgggacggcgacctgaagctgctccaccctgcaagctatcccacgcagattggctgtttggcagtcacatgagtcacgatcctcgttggcaggtgggcggagaaactgtttttgttcgggttccaccgcatgattgctgtggtgagattgccatgatcttccaccacatgccatatagagttaagtttataatagtctataggtgagaaaatgttcatatgaaagctgtttatagagttggttggtgaagcttcaaaggaactcataaactttgatctcccattcttcctgtcccttggaaacggcttttaaccaccagcatgtgttccatcttgattgtcttccggctattttatattctgcaggagttcattgtgcaatgaaatgaatggaatattcagttagatctgaaac

SEQ ID NO: 22456 - DNA, 3305 bp, Zea Mays
cgtgcaaacttattgcagcgcactcgtctgcagtgcaacacagcacacgcataggaaggggccgtcgccgtgtacgtcggcgtcgcggcgtccacgaagtctccatttctgattctgaaacgcccacggcttcctcgctttgtcgctctcctctgtctgtccgcctgtccgagacctcggagccgacggccggttttaaaagagcctgcgcggtgtaaggattctcgggtcgggctcgggacgggagcaaccgcagtgggagacatgcccccttgcacaggagttggggctggggctggggctgtgcagcgccgagtagtaggagccgggaggcggtgacggacggaacagaaggcgcgggtcctgttgggcggccgcctggttcccgggtcctgttgggcgggcgcgcggctgagcggggccatccatcattgcctcctccgcgtgggtcttggctgcctctgtcgtcgtcctcgcggcgcgggtcgcgcggccgaggtgaagcgaagaccgtcaacttgtactcttccggcgctcgctggcggtggaggggacgaaagtagatagcgtacggaagcatcggcattgggtcgcgcgcgtaggggatggaccgtcggagctggctgtggcggcgcaagtcgacggacaagagccccggggagaccgagacctcggcgtccgagaagattactgatgaacaggattctgccaagagctctccaaactcgactcggtcgccggagatcacgtcgaaggaactggaggacgataacgacgtgaaggtgaaggtattgagtgagaggctatcatccgtagttctggatgtccgtgcgaaggatgatctcgtgaagcagcattccaaagttgcagaggaggctgttctaggatgggagaaggccgagaaggagatctcatcgctgaaggcgcagctgagcgctgcaacggccaagaactccgcgctggaggaccggctcgtccacctggacggcgccctcaaggaatgcgtccggcagctccggcgcgccaaggacgagcaggaccagacggtgcaggacgcgctggcacggcaagcgcggcagtgggagtcccacaaggccgacctcgagctgcgcatcgttgagctcacggcgaggctggaggccaagtccgagcgctcggtggtgggcgccaccgacggcgacacccgttccagcaggctagccgccctggagaaggagaactcggcgctgaagttgcagctgctcgccaagacggaggaactggagctcaggacgatagagaaggagctcaaccggcgggcggcggagacggcgagcaagcagcagctggagggcatcaggaaggtggccaagctccaagctgagtgcaggaggctgcaggccgcggcacaacggagggcgtcctccgtgaacgtcgagctccggcgttctccgagctcggcctgcgtcgagtcgctcacggattgccagtcggactgctccgactcatgggcctcggccctcgtcacggagctcgaccagttcaagaaggacaagagcggcgcgagcaccaggacagcgagcctcgtggccgcggacatcgacgtgatggacgacttcctcgagatggagaagctcgcctccgcgaacggctcgtcgaaaggcgacgccgtcgaggacgcgagcgggcaggtggagaaggcgctgcacgaggctcagcgcgagctgaggacttgccgccgccgggtaatggtggcagaggagagatcagctgagctacagcggcagctgaaccatgccaatggcgacaaacacgccatggaggcggaggcggaagctgctgaggcgaagggaagggagcttgagggcaagctcgagctcgcccgtgccgatatcgcgggcttgctggacaaggggcgcatcctggaggaacggctcgagtctgagaaggcgctgacacttgagctcgcagccaagtaccaggacatggagacgctggaggcagagaagagggagctgaacgctcagctggagacgtcacggtccgaagccaagaagctcagcgacaagatcgccctgatggagaggaagctggaggtggagaaggccctgtcgatccgactggcgacgaaatgccatggcgttgatgctctggaagcaaagaagaagggcgtcgagctcgagctggagtcggcacgcgaggaaatcgcttccctgcgaaacaaggctagtagcttggaactgcaagtcatggaagagaaagcgtcgtccgctggactcgcaatgcggtgccaagaactggaggagcttagatcccagcttgtgtcttcaaactcacggatcgttgagctgaacgagaaggttaaaacgctcgaggatgtgatcgagaaacagaggccagtgacggcggaattggagtctcagctccagtcgagacacgacgaaatcagcagcttgaaggaggacataagcctgttgcagaagaagctggagtcccagaagaacctgtcgtcagcttacatatctgcgctgggcgcttctgaaaccgagaagaaagaactggctacccggtttgaactcggagagaaagaggccgaggaattgcgcgggaagacgagtttgctggaggaacagatccacgaagagagggcacggtcatctgagtttgcggtaaaatgtcggaagatggaggaacagttctcccgcagatctcttcttggccaccaaccagtgaaatcttcggcgatcaaagatattcagataagaaaggagacagagctggccaaggctgccgggaaactggccgactgccagaagacgatagcttcactgagcagccagctgaaatcgttggccgatttcgacgagttcctccctgaaaccgagactagtggcgccgactcagccgacgcctgggacggcgacctgaagctgctccaccctgcaagctatcccacgcagattggctgtttggcagtcacatgagtcacgatcctcgttggcaggtgggcggagaaactgtttttgttcgggttccaccgcatgattgctgtggtgagattgccatgatcttccaccacatgccatatagagttaagtttataatagtctataggtgagaaaatgttcatatgaaagctgtttatagagttggttggtgaagcttcaaaggaactcataaactttgatctcccattcttcctgtcccttggaaacggcttttaaccaccagcatgtgttccatcttgattgtcttccggctattttatattctgcaggagttcattgtgcaatgaaatgaatggaatattcagttagatctgaaac

SEQ ID NO: 22457 - DNA, 2689 bp, Zea Mays
cacgaagtctccatttctgattctgaaacgcccacggcttcctcgctttgtcgctctcctctgtctgtccgcctgtccgagacctcggagccgacggccggttttaaaagagcctgcgcggtgtaaggattctcgggtcgggctcgggacgggagcaaccgcagtgggagacatgcccccttgcacaggagttggggctggggctggggctgtgcagcgccgagtagtaggagccgggaggcggtgacggacggaacagaaggcgcgggtcctgttgggcggccgcctggttcccgggtcctgttgggcgggcgcgcggctgagcggggccatccatcattgcctcctccgcgtgggtcttggctgcctctgtcgtcgtcctcgcggcgcgggtcgcgcggccgaggtgaagcgaagaccgtcaacttgtactcttccggcgctcgctggcggtggaggggacgaaagtagatagcgtacggaagcatcggcattgggtcgcgcgcgtaggggatggaccgtcggagctggctgtggcggcgcaagtcgacggacaagagccccggggagaccgagacctcggcgtccgagaagattactgatgaacaggattctgccaagagctctccaaactcgactcggtcgccggagatcacgtcgaaggaactggaggacgataacgacgtgaaggtgaaggtattgagtgagaggctatcatccgtagttctggatgtccgtgcgaaggatgatctcgtgaagcagcattccaaagttgcagaggaggctgttctaggatgggagaaggccgagaaggagatctcatcgctgaaggcgcagctgagcgctgcaacggccaagaactccgcgctggaggaccggctcgtccacctggacggcgccctcaaggaatgcgtccggcagctccggcgcgccaaggacgagcaggaccagacggtgcaggacgcgctggcacggcaagcgcggcagtgggagtcccacaaggccgacctcgagctgcgcatcgttgagctcacggcgaggctggaggccaagtccgagcgctcggtggtgggcgccaccgacggcgacacccgttccagcaggctagccgccctggagaaggagaactcggcgctgaagttgcagctgctcgccaagacggaggaactggagctcaggacgatagagaaggagctcaaccggcgggcggcggagacggcgagcaagcagcagctggagggcatcaggaaggtggccaagctccaagctgagtgcaggaggctgcaggccgcggcacaacggagggcgtcctccgtgaacgtcgagctccggcgttctccgagctcggcctgcgtcgagtcgctcacggattgccagtcggactgctccgactcatgggcctcggccctcgtcacggagctcgaccagttcaagaaggacaagagcggcgcgagcaccaggacagcgagcctcgtggccgcggacatcgacgtgatggacgacttcctcgagatggagaagctcgcctccgcgaacggctcgtcgaaaggcgacgccgtcgaggacgcgagcgggcaggtggagaaggcgctgcacgaggctcagcgcgagctgaggacttgccgccgccgggtaatggtggcagaggagagatcagctgagctacagcggcagctgaaccatgccaatggcgacaaacacgccatggaggcggaggcggaagctgctgaggcgaagggaagggagcttgagggcaagctcgagctcgcccgtgccgatatcgcgggcttgctggacaaggggcgcatcctggaggaacggctcgagtctgagaaggcgctgacacttgagctcgcagccaagtaccaggacatggagacgctggaggcagagaagagggagctgaacgctcagctggagacgtcacggtccgaagccaagaagctcagcgacaagatcgccctgatggagaggaagctggaggtggagaaggccctgtcgatccgactggcgacgaaatgccatggcgttgatgctctggaagcaaagaagaagggcgtcgagctcgagctggagtcggcacgcgaggaaatcgcttccctgcgaaacaaggctagtagcttggaactgcaagtcatggaagagaaagcgtcgtccgctggactcgcaatgcggtgccaagaactggaggagcttagatcccagcttgtgtcttcaaactcacggatcgttgagctgaacgagaaggttaaaacgctcgaggatgtgatcgagaaacagaggccagtgacggcggaattggagtctcagctccagtcgagacacgacgaaatcagcagcttgaaggaggacataagcctgttgcagaagaagctggagtcccagaagaacctgtcgtcagcttacatatctgcgctgggcgcttctgaaaccgagaagaaagaactggctacccggtttgaactcggagagaaagaggccgaggaattgcgcgggaagacgagtttgctggaggaacagatccacgaagagagggcacggtcatctgagtttgcggtaaaatgtcggaagatggaggaacagttctcccgcagatctcttcttggccaccaaccagtgaaatcttcggcgatcaaagatattcagataagaaagaaagggtgtcgggtgtccaatgtttttgtttttt

SEQ ID NO: 22458 - DNA, 3450 bp, Zea Mays
tcggagccgacggccggttttaaaagagcctgcgcggtgtaaggattctcgggtcgggctcgggacgggagcaaccgcagtgggagacatgcccccttgcacaggagttggggctggggctggggctgtgcagcgccgagtagtaggagccgggaggcggtgacggacggaacagaaggcgcgggtcctgttgggcggccgcctggttcccgggtcctgttgggcgggcgcgcggctgagcggggccatccatcattgcctcctccgcgtgggtcttggctgcctctgtcgtcgtcctcgcggcgcgggtcgcgcggccgaggtgaagcgaagaccgtcaacttgtactcttccggcgctcgctggcggtggaggggacgaaagtagatagcgtacggaagcatcggcattgggtcgcgcgcgtaggggatggaccgtcggagctggctgtggcggcgcaagtcgacggacaagagccccggggagaccgagacctcggcgtccgagaagattactgatgaacagacaatcatttcttatagctatcaaccatctattatcatcccttgtcccgttcacgtgttagggcaagttaccaatgcatctctaagactgtccgcaactgttaccattaggcaaaacgatacatacacagtatcaggcaagagaaaaagcaaatcattattttctatgttcctgtccgagacagtccagcctgtgtttaaaatagggaatgaaatagatgacagtacaatgggtagaggacgaggccggcagtgtgactgtcctggtggtttccataccaggtctgcagtctccaatggcaatgtggcacagtcagaccaggattctgccaagagctctccaaactcgactcggtcgccggagatcacgtcgaaggaactggaggacgataacgacgtgaaggtgaaggtattgagtgagaggctatcatccgtagttctggatgtccgtgcgaaggatgatctcgtgaagcagcattccaaagttgcagaggaggctgttctaggatgggagaaggccgagaaggagatctcatcgctgaaggcgcagctgagcgctgcaacggccaagaactccgcgctggaggaccggctcgtccacctggacggcgccctcaaggaatgcgtccggcagctccggcgcgccaaggacgagcaggaccagacggtgcaggacgcgctggcacggcaagcgcggcagtgggagtcccacaaggccgacctcgagctgcgcatcgttgagctcacggcgaggctggaggccaagtccgagcgctcggtggtgggcgccaccgacggcgacacccgttccagcaggctagccgccctggagaaggagaactcggcgctgaagttgcagctgctcgccaagacggaggaactggagctcaggacgatagagaaggagctcaaccggcgggcggcggagacggcgagcaagcagcagctggagggcatcaggaaggtggccaagctccaagctgagtgcaggaggctgcaggccgcggcacaacggagggcgtcctccgtgaacgtcgagctccggcgttctccgagctcggcctgcgtcgagtcgctcacggattgccagtcggactgctccgactcatgggcctcggccctcgtcacggagctcgaccagttcaagaaggacaagagcggcgcgagcaccaggacagcgagcctcgtggccgcggacatcgacgtgatggacgacttcctcgagatggagaagctcgcctccgcgaacggctcgtcgaaaggcgacgccgtcgaggacgcgagcgggcaggtggagaaggcgctgcacgaggctcagcgcgagctgaggacttgccgccgccgggtaatggtggcagaggagagatcagctgagctacagcggcagctgaaccatgccaatggcgacaaacacgccatggaggcggaggcggaagctgctgaggcgaagggaagggagcttgagggcaagctcgagctcgcccgtgccgatatcgcgggcttgctggacaaggggcgcatcctggaggaacggctcgagtctgagaaggcgctgacacttgagctcgcagccaagtaccaggacatggagacgctggaggcagagaagagggagctgaacgctcagctggagacgtcacggtccgaagccaagaagctcagcgacaagatcgccctgatggagaggaagctggaggtggagaaggccctgtcgatccgactggcgacgaaatgccatggcgttgatgctctggaagcaaagaagaagggcgtcgagctcgagctggagtcggcacgcgaggaaatcgcttccctgcgaaacaaggctagtagcttggaactgcaagtcatggaagagaaagcgtcgtccgctggactcgcaatgcggtgccaagaactggaggagcttagatcccagcttgtgtcttcaaactcacggatcgttgagctgaacgagaaggttaaaacgctcgaggatgtgatcgagaaacagaggccagtgacggcggaattggagtctcagctccagtcgagacacgacgaaatcagcagcttgaaggaggacataagcctgttgcagaagaagctggagtcccagaagaacctgtcgtcagcttacatatctgcgctgggcgcttctgaaaccgagaagaaagaactggctacccggtttgaactcggagagaaagaggccgaggaattgcgcgggaagacgagtttgctggaggaacagatccacgaagagagggcacggtcatctgagtttgcggtaaaatgtcggaagatggaggaacagttctcccgcagatctcttcttggccaccaaccagtgaaatcttcggcgatcaaagatattcagataagaaaggagacagagctggccaaggctgccgggaaactggccgactgccagaagacgatagcttcactgagcagccagctgaaatcgttggccgatttcgacgagttcctccctgaaaccgagactagtggcgccgactcagccgacgcctgggacggcgacctgaagctgctccaccctgcaagctatcccacgcagattggctgtttggcagtcacatgagtcacgatcctcgttggcaggtgggcggagaaactgtttttgttcgggttccaccgcatgattgctgtggtgagattgccatgatcttccaccacatgccatatagagttaagtttataatagtctataggtgagaaaatgttcatatgaaagctgtttatagagttggttggtgaagcttcaaaggaactcataaactttgatctcccattcttcctgtcccttggaaacggcttttaaccaccagcatgtgttccatcttgattgtcttccggctattttatattctgcaggagttcattgtgcaatgaaatgaatggaatattcagttagatctgaaac

SEQ ID NO: 22459 - DNA, 3627 bp, Zea Mays
tcggagccgacggccggttttaaaagagcctgcgcggtgtaaggattctcgggtcgggctcgggacgggagcaaccgcagtgggagacatgcccccttgcacaggagttggggctggggctggggctgtgcagcgccgagtagtaggagccgggaggcggtgacggacggaacagaaggcgcgggtcctgttgggcggccgcctggttcccgggtcctgttgggcgggcgcgcggctgagcggggccatccatcattgcctcctccgcgtgggtcttggctgcctctgtcgtcgtcctcgcggcgcgggtcgcgcggccgaggtgaaggtgaggactgaggagaacttctcttcccgtctcatggagacgaaggacttcttctactcctcggcgctctcttcggtttcttttctcatcgactctgctctgttcgttcgatttgcgagcggcggagcatagtggtatggtatatccgaattgtgtggtttcttggtgatttttgctttcttgcttggggacccaataagccaagtaattctgctccttctctcggtttcgatcgacgggtacagtacagtttgtgcgaaggagggcgcgcgcacgaacatgaggagtggtctgcgattgaattaggcgattacgtttgaagataaaataaaactgttaaaaggcgtcttgttgttattcttcttcttttccacggacccaacaagcattggattagttcgtgttcttgaaggtcctgcttcggatcgcgtggatactaactgctggatatgtgtgactcaactttttttttttgtttggggtctattttggtttcagcgaagaccgtcaacttgtactcttccggcgctcgctggcggtggaggggacgaaagtagatagcgtacggaagcatcggcattgggtcgcgcgcgtaggggatggaccgtcggagctggctgtggcggcgcaagtcgacggacaagagccccggggagaccgagacctcggcgtccgagaagattactgatgaacaggattctgccaagagctctccaaactcgactcggtcgccggagatcacgtcgaaggaactggaggacgataacgacgtgaaggtgaaggtattgagtgagaggctatcatccgtagttctggatgtccgtgcgaaggatgatctcgtgaagcagcattccaaagttgcagaggaggctgttctaggatgggagaaggccgagaaggagatctcatcgctgaaggcgcagctgagcgctgcaacggccaagaactccgcgctggaggaccggctcgtccacctggacggcgccctcaaggaatgcgtccggcagctccggcgcgccaaggacgagcaggaccagacggtgcaggacgcgctggcacggcaagcgcggcagtgggagtcccacaaggccgacctcgagctgcgcatcgttgagctcacggcgaggctggaggccaagtccgagcgctcggtggtgggcgccaccgacggcgacacccgttccagcaggctagccgccctggagaaggagaactcggcgctgaagttgcagctgctcgccaagacggaggaactggagctcaggacgatagagaaggagctcaaccggcgggcggcggagacggcgagcaagcagcagctggagggcatcaggaaggtggccaagctccaagctgagtgcaggaggctgcaggccgcggcacaacggagggcgtcctccgtgaacgtcgagctccggcgttctccgagctcggcctgcgtcgagtcgctcacggattgccagtcggactgctccgactcatgggcctcggccctcgtcacggagctcgaccagttcaagaaggacaagagcggcgcgagcaccaggacagcgagcctcgtggccgcggacatcgacgtgatggacgacttcctcgagatggagaagctcgcctccgcgaacggctcgtcgaaaggcgacgccgtcgaggacgcgagcgggcaggtggagaaggcgctgcacgaggctcagcgcgagctgaggacttgccgccgccgggtaatggtggcagaggagagatcagctgagctacagcggcagctgaaccatgccaatggcgacaaacacgccatggaggcggaggcggaagctgctgaggcgaagggaagggagcttgagggcaagctcgagctcgcccgtgccgatatcgcgggcttgctggacaaggggcgcatcctggaggaacggctcgagtctgagaaggcgctgacacttgagctcgcagccaagtaccaggacatggagacgctggaggcagagaagagggagctgaacgctcagctggagacgtcacggtccgaagccaagaagctcagcgacaagatcgccctgatggagaggaagctggaggtggagaaggccctgtcgatccgactggcgacgaaatgccatggcgttgatgctctggaagcaaagaagaagggcgtcgagctcgagctggagtcggcacgcgaggaaatcgcttccctgcgaaacaaggctagtagcttggaactgcaagtcatggaagagaaagcgtcgtccgctggactcgcaatgcggtgccaagaactggaggagcttagatcccagcttgtgtcttcaaactcacggatcgttgagctgaacgagaaggttaaaacgctcgaggatgtgatcgagaaacagaggccagtgacggcggaattggagtctcagctccagtcgagacacgacgaaatcagcagcttgaaggaggacataagcctgttgcagaagaagctggagtcccagaagaacctgtcgtcagcttacatatctgcgctgggcgcttctgaaaccgagaagaaagaactggctacccggtttgaactcggagagaaagaggccgaggaattgcgcgggaagacgagtttgctggaggaacagatccacgaagagagggcacggtcatctgagtttgcggtaaaatgtcggaagatggaggaacagttctcccgcagatctcttcttggccaccaaccagtgaaatcttcggcgatcaaagatattcagataagaaaggagacagagctggccaaggctgccgggaaactggccgactgccagaagacgatagcttcactgagcagccagctgaaatcgttggccgatttcgacgagttcctccctgaaaccgagactagtggcgccgactcagccgacgcctgggacggcgacctgaagctgctccaccctgcaagctatcccacgcagattggctgtttggcagtcacatgagtcacgatcctcgttggcaggtgggcggagaaactgtttttgttcgggttccaccgcatgattgctgtggtgagattgccatgatcttccaccacatgccatatagagttaagtttataatagtctataggtgagaaaatgttcatatgaaagctgtttatagagttggttggtgaagcttcaaaggaactcataaactttgatctcccattcttcctgtcccttggaaacggcttttaaccaccagcatgtgttccatcttgattgtcttccggctattttatattctgcaggagttcattgtgcaatgaaatgaatggaatattcagttagatctgaaac

SEQ ID NO: 22460 - DNA, 3664 bp, Zea Mays
tcggagccgacggccggttttaaaagagcctgcgcggtgtaaggattctcgggtcgggctcgggacgggagcaaccgcagtgggagacatgcccccttgcacaggagttggggctggggctggggctgtgcagcgccgagtagtaggagccgggaggcggtgacggacggaacagaaggcgcgggtcctgttgggcggccgcctggttcccgggtcctgttgggcgggcgcgcggctgagcggggccatccatcattgcctcctccgcgtgggtcttggctgcctctgtcgtcgtcctcgcggcgcgggtcgcgcggccgaggtgaagcgaagaccgtcaacttgtactcttccggcgctcgctggcggtggaggggacgaaagtagatagcgtacggaagcatcggcattgggtcgcgcgcgtaggggatggaccgtcggagctggctgtggcggcgcaagtcgacggacaagagccccggggagaccgagacctcggcgtccgagaagattactgatgaacagacaatcatttcttatagctatcaaccatctattatcatcccttgtcccgttcacgtgttagggcaagttaccaatgcatctctaagactgtccgcaactgttaccattaggcaaaacgatacatacacagtatcaggcaagagaaaaagcaaatcattattttctatgttcctgtccgagacagtccagcctgtgtttaaaatagggaatgaaatagatgacagtacaatgggtagaggacgaggccggcagtgtgactgtcctggtggtttccataccaggtctgcagtctccaatggcaatgtggcacagtcagaccaggtactgctagtcctgctgtttagaaacttgacggtcttggcttcaaatctttcacccatcacaccgttgtgtattagtatttcaaatcctatgaacacaaattcatagtggtcaaccaagtttgagatgggtcgtgttcttctctagttgctgcaaaataagaaagctaacctgcaggatgtttgactgtttactgttttggcttcttgatcaggattctgccaagagctctccaaactcgactcggtcgccggagatcacgtcgaaggaactggaggacgataacgacgtgaaggtgaaggtattgagtgagaggctatcatccgtagttctggatgtccgtgcgaaggatgatctcgtgaagcagcattccaaagttgcagaggaggctgttctaggatgggagaaggccgagaaggagatctcatcgctgaaggcgcagctgagcgctgcaacggccaagaactccgcgctggaggaccggctcgtccacctggacggcgccctcaaggaatgcgtccggcagctccggcgcgccaaggacgagcaggaccagacggtgcaggacgcgctggcacggcaagcgcggcagtgggagtcccacaaggccgacctcgagctgcgcatcgttgagctcacggcgaggctggaggccaagtccgagcgctcggtggtgggcgccaccgacggcgacacccgttccagcaggctagccgccctggagaaggagaactcggcgctgaagttgcagctgctcgccaagacggaggaactggagctcaggacgatagagaaggagctcaaccggcgggcggcggagacggcgagcaagcagcagctggagggcatcaggaaggtggccaagctccaagctgagtgcaggaggctgcaggccgcggcacaacggagggcgtcctccgtgaacgtcgagctccggcgttctccgagctcggcctgcgtcgagtcgctcacggattgccagtcggactgctccgactcatgggcctcggccctcgtcacggagctcgaccagttcaagaaggacaagagcggcgcgagcaccaggacagcgagcctcgtggccgcggacatcgacgtgatggacgacttcctcgagatggagaagctcgcctccgcgaacggctcgtcgaaaggcgacgccgtcgaggacgcgagcgggcaggtggagaaggcgctgcacgaggctcagcgcgagctgaggacttgccgccgccgggtaatggtggcagaggagagatcagctgagctacagcggcagctgaaccatgccaatggcgacaaacacgccatggaggcggaggcggaagctgctgaggcgaagggaagggagcttgagggcaagctcgagctcgcccgtgccgatatcgcgggcttgctggacaaggggcgcatcctggaggaacggctcgagtctgagaaggcgctgacacttgagctcgcagccaagtaccaggacatggagacgctggaggcagagaagagggagctgaacgctcagctggagacgtcacggtccgaagccaagaagctcagcgacaagatcgccctgatggagaggaagctggaggtggagaaggccctgtcgatccgactggcgacgaaatgccatggcgttgatgctctggaagcaaagaagaagggcgtcgagctcgagctggagtcggcacgcgaggaaatcgcttccctgcgaaacaaggctagtagcttggaactgcaagtcatggaagagaaagcgtcgtccgctggactcgcaatgcggtgccaagaactggaggagcttagatcccagcttgtgtcttcaaactcacggatcgttgagctgaacgagaaggttaaaacgctcgaggatgtgatcgagaaacagaggccagtgacggcggaattggagtctcagctccagtcgagacacgacgaaatcagcagcttgaaggaggacataagcctgttgcagaagaagctggagtcccagaagaacctgtcgtcagcttacatatctgcgctgggcgcttctgaaaccgagaagaaagaactggctacccggtttgaactcggagagaaagaggccgaggaattgcgcgggaagacgagtttgctggaggaacagatccacgaagagagggcacggtcatctgagtttgcggtaaaatgtcggaagatggaggaacagttctcccgcagatctcttcttggccaccaaccagtgaaatcttcggcgatcaaagatattcagataagaaaggagacagagctggccaaggctgccgggaaactggccgactgccagaagacgatagcttcactgagcagccagctgaaatcgttggccgatttcgacgagttcctccctgaaaccgagactagtggcgccgactcagccgacgcctgggacggcgacctgaagctgctccaccctgcaagctatcccacgcagattggctgtttggcagtcacatgagtcacgatcctcgttggcaggtgggcggagaaactgtttttgttcgggttccaccgcatgattgctgtggtgagattgccatgatcttccaccacatgccatatagagttaagtttataatagtctataggtgagaaaatgttcatatgaaagctgtttatagagttggttggtgaagcttcaaaggaactcataaactttgatctcccattcttcctgtcccttggaaacggcttttaaccaccagcatgtgttccatcttgattgtcttccggctattttatattctgcaggagttcattgtgcaatgaaatgaatggaatattcagttagatctgaaac

SEQ ID NO: 22461 - DNA, 2928 bp, Zea Mays
ctgaggagaacttctcttcccgtctcatggagacgaaggacttcttctactcctcggcgctctcttcggtttcttttctcatcgactctgctctgttcgttcgatttgcgagcggcggagcatagtgcgaagaccgtcaacttgtactcttccggcgctcgctggcggtggaggggacgaaagtagatagcgtacggaagcatcggcattgggtcgcgcgcgtaggggatggaccgtcggagctggctgtggcggcgcaagtcgacggacaagagccccggggagaccgagacctcggcgtccgagaagattactgatgaacaggattctgccaagagctctccaaactcgactcggtcgccggagatcacgtcgaaggaactggaggacgataacgacgtgaaggtgaaggtattgagtgagaggctatcatccgtagttctggatgtccgtgcgaaggatgatctcgtgaagcagcattccaaagttgcagaggaggctgttctaggatgggagaaggccgagaaggagatctcatcgctgaaggcgcagctgagcgctgcaacggccaagaactccgcgctggaggaccggctcgtccacctggacggcgccctcaaggaatgcgtccggcagctccggcgcgccaaggacgagcaggaccagacggtgcaggacgcgctggcacggcaagcgcggcagtgggagtcccacaaggccgacctcgagctgcgcatcgttgagctcacggcgaggctggaggccaagtccgagcgctcggtggtgggcgccaccgacggcgacacccgttccagcaggctagccgccctggagaaggagaactcggcgctgaagttgcagctgctcgccaagacggaggaactggagctcaggacgatagagaaggagctcaaccggcgggcggcggagacggcgagcaagcagcagctggagggcatcaggaaggtggccaagctccaagctgagtgcaggaggctgcaggccgcggcacaacggagggcgtcctccgtgaacgtcgagctccggcgttctccgagctcggcctgcgtcgagtcgctcacggattgccagtcggactgctccgactcatgggcctcggccctcgtcacggagctcgaccagttcaagaaggacaagagcggcgcgagcaccaggacagcgagcctcgtggccgcggacatcgacgtgatggacgacttcctcgagatggagaagctcgcctccgcgaacggctcgtcgaaaggcgacgccgtcgaggacgcgagcgggcaggtggagaaggcgctgcacgaggctcagcgcgagctgaggacttgccgccgccgggtaatggtggcagaggagagatcagctgagctacagcggcagctgaaccatgccaatggcgacaaacacgccatggaggcggaggcggaagctgctgaggcgaagggaagggagcttgagggcaagctcgagctcgcccgtgccgatatcgcgggcttgctggacaaggggcgcatcctggaggaacggctcgagtctgagaaggcgctgacacttgagctcgcagccaagtaccaggacatggagacgctggaggcagagaagagggagctgaacgctcagctggagacgtcacggtccgaagccaagaagctcagcgacaagatcgccctgatggagaggaagctggaggtggagaaggccctgtcgatccgactggcgacgaaatgccatggcgttgatgctctggaagcaaagaagaagggcgtcgagctcgagctggagtcggcacgcgaggaaatcgcttccctgcgaaacaaggctagtagcttggaactgcaagtcatggaagagaaagcgtcgtccgctggactcgcaatgcggtgccaagaactggaggagcttagatcccagcttgtgtcttcaaactcacggatcgttgagctgaacgagaaggttaaaacgctcgaggatgtgatcgagaaacagaggccagtgacggcggaattggagtctcagctccagtcgagacacgacgaaatcagcagcttgaaggaggacataagcctgttgcagaagaagctggagtcccagaagaacctgtcgtcagcttacatatctgcgctgggcgcttctgaaaccgagaagaaagaactggctacccggtttgaactcggagagaaagaggccgaggaattgcgcgggaagacgagtttgctggaggaacagatccacgaagagagggcacggtcatctgagtttgcggtaaaatgtcggaagatggaggaacagttctcccgcagatctcttcttggccaccaaccagtgaaatcttcggcgatcaaagatattcagataagaaaggagacagagctggccaaggctgccgggaaactggccgactgccagaagacgatagcttcactgagcagccagctgaaatcgttggccgatttcgacgagttcctccctgaaaccgagactagtggcgccgactcagccgacgcctgggacggcgacctgaagctgctccaccctgcaagctatcccacgcagattggctgtttggcagtcacatgagtcacgatcctcgttggcaggtgggcggagaaactgtttttgttcgggttccaccgcatgattgctgtggtgagattgccatgatcttccaccacatgccatatagagttaagtttataatagtctataggtgagaaaatgttcatatgaaagctgtttatagagttggttggtgaagcttcaaaggaactcataaactttgatctcccattcttcctgtcccttggaaacggcttttaaccaccagcatgtgttccatcttgattgtcttccggctattttatattctgcaggagttcattgtgcaatgaaatgaatggaatattcagttagatctgaaac

SEQ ID NO: 22462 - DNA, 2843 bp, Zea Mays
atcgactctgctctgttcgttcgatttgcgagcggcggagcatagtgaccgtcaacttgtactcttccggcgctcgctggcggtggaggggacgaaagtagatagcgtacggaagcatcggcattgggtcgcgcgcgtaggggatggaccgtcggagctggctgtggcggcgcaagtcgacggacaagagccccggggagaccgagacctcggcgtccgagaagattactgatgaacaggattctgccaagagctctccaaactcgactcggtcgccggagatcacgtcgaaggaactggaggacgataacgacgtgaaggtgaaggtattgagtgagaggctatcatccgtagttctggatgtccgtgcgaaggatgatctcgtgaagcagcattccaaagttgcagaggaggctgttctaggatgggagaaggccgagaaggagatctcatcgctgaaggcgcagctgagcgctgcaacggccaagaactccgcgctggaggaccggctcgtccacctggacggcgccctcaaggaatgcgtccggcagctccggcgcgccaaggacgagcaggaccagacggtgcaggacgcgctggcacggcaagcgcggcagtgggagtcccacaaggccgacctcgagctgcgcatcgttgagctcacggcgaggctggaggccaagtccgagcgctcggtggtgggcgccaccgacggcgacacccgttccagcaggctagccgccctggagaaggagaactcggcgctgaagttgcagctgctcgccaagacggaggaactggagctcaggacgatagagaaggagctcaaccggcgggcggcggagacggcgagcaagcagcagctggagggcatcaggaaggtggccaagctccaagctgagtgcaggaggctgcaggccgcggcacaacggagggcgtcctccgtgaacgtcgagctccggcgttctccgagctcggcctgcgtcgagtcgctcacggattgccagtcggactgctccgactcatgggcctcggccctcgtcacggagctcgaccagttcaagaaggacaagagcggcgcgagcaccaggacagcgagcctcgtggccgcggacatcgacgtgatggacgacttcctcgagatggagaagctcgcctccgcgaacggctcgtcgaaaggcgacgccgtcgaggacgcgagcgggcaggtggagaaggcgctgcacgaggctcagcgcgagctgaggacttgccgccgccgggtaatggtggcagaggagagatcagctgagctacagcggcagctgaaccatgccaatggcgacaaacacgccatggaggcggaggcggaagctgctgaggcgaagggaagggagcttgagggcaagctcgagctcgcccgtgccgatatcgcgggcttgctggacaaggggcgcatcctggaggaacggctcgagtctgagaaggcgctgacacttgagctcgcagccaagtaccaggacatggagacgctggaggcagagaagagggagctgaacgctcagctggagacgtcacggtccgaagccaagaagctcagcgacaagatcgccctgatggagaggaagctggaggtggagaaggccctgtcgatccgactggcgacgaaatgccatggcgttgatgctctggaagcaaagaagaagggcgtcgagctcgagctggagtcggcacgcgaggaaatcgcttccctgcgaaacaaggctagtagcttggaactgcaagtcatggaagagaaagcgtcgtccgctggactcgcaatgcggtgccaagaactggaggagcttagatcccagcttgtgtcttcaaactcacggatcgttgagctgaacgagaaggttaaaacgctcgaggatgtgatcgagaaacagaggccagtgacggcggaattggagtctcagctccagtcgagacacgacgaaatcagcagcttgaaggaggacataagcctgttgcagaagaagctggagtcccagaagaacctgtcgtcagcttacatatctgcgctgggcgcttctgaaaccgagaagaaagaactggctacccggtttgaactcggagagaaagaggccgaggaattgcgcgggaagacgagtttgctggaggaacagatccacgaagagagggcacggtcatctgagtttgcggtaaaatgtcggaagatggaggaacagttctcccgcagatctcttcttggccaccaaccagtgaaatcttcggcgatcaaagatattcagataagaaaggagacagagctggccaaggctgccgggaaactggccgactgccagaagacgatagcttcactgagcagccagctgaaatcgttggccgatttcgacgagttcctccctgaaaccgagactagtggcgccgactcagccgacgcctgggacggcgacctgaagctgctccaccctgcaagctatcccacgcagattggctgtttggcagtcacatgagtcacgatcctcgttggcaggtgggcggagaaactgtttttgttcgggttccaccgcatgattgctgtggtgagattgccatgatcttccaccacatgccatatagagttaagtttataatagtctataggtgagaaaatgttcatatgaaagctgtttatagagttggttggtgaagcttcaaaggaactcataaactttgatctcccattcttcctgtcccttggaaacggcttttaaccaccagcatgtgttccatcttgattgtcttccggctattttatattctgcaggagttcattgtgcaatgaaatgaatggaatattcagttagatctgaaac

SEQ ID NO: 22463 - DNA, 460 bp, Zea Mays
ctttgcaatgcagtatcatataagcggacctgaaaaggcaacaattttacgatgatcattcttgcacaagaaggttccagcagtgaaccaaggtcgagtgaatatgccaagactatttgctcggggcttcagatgaaacaaaggaagaaaatcatttaataaatgatgaaggtatctatattagtatcaaagataaattaaagaagtcaatgagtgcttacagatttagcagaccatgtcttactactagatgtgatatcccacaagttcacttctatgcctttcctacaacaaacggaaccattatttatgaaacttgaaatttgcttaaaggttttcatgtcaaatagcaagtatgatgaacaaaggcaataacgctcaaatacaaattttgaaataaaacagataaacgccatttcagattctttaagctcaccctccaaatatcacatagctttcg

SEQ ID NO: 22464 - DNA, 881 bp, Zea Mays
aacccggaggtgggactgggaggcaccgtgtcgtcgtcgtcccctttcccttctctactccgccgccgctcgctcgccggatctgtggagactcgtgagtacgtgacccccacggtggatgaggataggcgggcctcgtccggcagcctgtgctctctgggacgggaggcagagctggcaccagagagagcacgaattgaggccggcccaggtgaacgctgctgaagctgctgctcaattaaaactaggggaacagatggggatgaagcgcgagcaagaaagaaagaaaggctgcacaactggcactgtccactttctgaagggcctggagaacttgtgccaaaagtaacaatggaagtttgttcatgggattgagttgacacagggcttagggagcccactgactggagacacttagcttggaggcctgttcatgaagaaagatatcgagaaagacgtcgaacatgaaatggaggacagcgtgtcaacctaccagaatgctgatgtcggggaaggagagatcagctgctgtcaatagtgtacctctctctattccaactgtgaacctgggattctatgatcatgtgcgtgctatgtaacctatgctgccactgtgcaacgtcacaagtcagcacatgctgcacgcctgcactaggatgtctagcgtatgctggacagctggagtacaatagttgggcgttgctgtctgtttttgtggttgtcatgtacagatgtgctagtgctaatgtatgttgtaggtgttccaggtctatgtaaactggacattctgtaaagaaggtaaaaaaaacaaagaatagtgagatatccatctatactatagttattatgtatcaatgtatgtgtttagagaaagatgtttg

SEQ ID NO: 22465 - DNA, 968 bp, Zea Mays
aacccggaggtgggactgggaggcaccgtgtcgtcgtcgtcccctttcccttctctactccgccgccgctcgctcgccggtgaagagcaaatgctgctgctgttacggcagcggctctgttggcgccgcgtatctccgacttacctcgcgcctttgtaggatctgtggagactcgtgagtacgtgacccccacggtggatgaggataggcgggcctcgtccggcagcctgtgctctctgggacgggaggcagagctggcaccagagagagcacgaattgaggccggcccaggtgaacgctgctgaagctgctgctcaattaaaactaggggaacagatggggatgaagcgcgagcaagaaagaaagaaaggctgcacaactggcactgttcaacagccactttctgaagggcctggagaacttgtgccaaaagtaacaatggaagtttgttcatgggattgagttgacacagggcttagggagcccactgactggagacacttagcttggaggcctgttcatgaagaaagatatcgagaaagacgtcgaacatgaaatggaggacagcgtgtcaacctaccagaatgctgatgtcggggaaggagagatcagctgctgtcaatagtgtacctctctctattccaactgtgaacctgggattctatgatcatgtgcgtgctatgtaacctatgctgccactgtgcaacgtcacaagtcagcacatgctgcacgcctgcactaggatgtctagcgtatgctggacagctggagtacaatagttgggcgttgctgtctgtttttgtggttgtcatgtacagatgtgctagtgctaatgtatgttgtaggtgttccaggtctatgtaaactggacattctgtaaagaaggtaaaaaaaacaaagaatagtgagatatccatctatactatagttattatgtatcaatgtatgtgtttagagaaagatgtttg

SEQ ID NO: 22466 - DNA, 1027 bp, Zea Mays
aacccggaggtgggactgggaggcaccgtgtcgtcgtcgtcccctttcccttctctactccgccgccgctcgctcgccggtgaagagcaaatgctgctgctgttacggcagcggctctgttggcgccgcgtatctccgacttacctcgcgcctttgtaggatctgtggagactcgtgagtacgtgacccccacggtggatgaggataggcgggcctcgtccggcagcctgtgctctctgggacgggaggcagagctggcaccagggttatgtccactgtccaccttcgaatgttgacattacattacatgtctacactttcaaatttaagagagagcacgaattgaggccggcccaggtgaacgctgctgaagctgctgctcaattaaaactaggggaacagatggggatgaagcgcgagcaagaaagaaagaaaggctgcacaactggcactgtccactttctgaagggcctggagaacttgtgccaaaagtaacaatggaagtttgttcatgggattgagttgacacagggcttagggagcccactgactggagacacttagcttggaggcctgttcatgaagaaagatatcgagaaagacgtcgaacatgaaatggaggacagcgtgtcaacctaccagaatgctgatgtcggggaaggagagatcagctgctgtcaatagtgtacctctctctattccaactgtgaacctgggattctatgatcatgtgcgtgctatgtaacctatgctgccactgtgcaacgtcacaagtcagcacatgctgcacgcctgcactaggatgtctagcgtatgctggacagctggagtacaatagttgggcgttgctgtctgtttttgtggttgtcatgtacagatgtgctagtgctaatgtatgttgtaggtgttccaggtctatgtaaactggacattctgtaaagaaggtaaaaaaaacaaagaatagtgagatatccatctatactatagttattatgtatcaatgtatgtgtttagagaaagatgtttg

SEQ ID NO: 22467 - DNA, 2388 bp, Zea Mays
ggacgagtgattccgaaaatcaccgttgccatccctgtccggaagggttgtcgttggtgtgctgttcgcctgttcccctattcagctattcgtgcacggagaagaagggaggcgaagagagggggcaccgtcggacggcggctcatcacgccatcggtctatgagaggtcaatgaagatggaagtggagcttcgggcagtacatgaaatgagagctgagcttgcacaagttcgtatggacattcaaaaccttggtgcaatgaggcaggaactcatgggccaagttcagggattaacacaggatttggctcagtcggcagaagatttgcataaggtgtctgcattacaagctgaaacccaggagatcaaacatgaaacacaacatttgagatctggtattgagcttgagaagaaaggatatgcacagagttatgagcagggacaggacatgcagatttttttatttatttcagtggcttctttttatcgaacgcgcaggagaactgcgcatcttatatattaagaaaaaggagaaagaggtctaaaatagacccagtacaagctgccaaaaaaaatatatcaagacagaaaaaagaaaaggggggggggggtatccaaacaacccccagccacaccagcacctaaggccacaatctcctaagatctcttgcccctgccaagccccaccgaacagcatcctcatgaatatgctgcatgatgatgctgatgttgggggatgcaccatcaaacacacattcatttctatgcttccatagccaccaagccaccagaatcactaaggaattaaatcctcttttctggttttttggcacctggcactcagcttctctccaccagtcttggaaggtcgttgttgccaatcctggagtcaggcgatgcagccctaccttatgcaaagtctgccaccaagtgtctctggcaaacacacaagccactaagatatgctgaactgtttcctcctgctggtcacaaagggggcacctaacaggatgctcaagacctcgtctgcttaatctatccgctgtccagcaacgatttagagaagccaaccaaatgaagaatttacaccttgggggggcccaacttttccaaattctagtagctggctcaaaagagactgaaccagccataaaacgatcatatgccgatttagtggaataatctccagatgcagacggggaccatctatgcacatcaggaatccccggatgtaactgaaaaccttgcactaggtcccaaattactaagaagtcgaagataatctgagctgacaggctgccagatatgtcattaacccatctattgtttaccaaggcttcttgcacagatctgcttttcttgattctcactgtaatatggctgaccaaagtgggggcaaggacagatattgattgcccatgaatccagcgatcagtccagaacagggttcgagagccatcacctacagtagtgtggaccgaggcagagaaaagagctttgacattggaatgaaccttgaacaagaaatctgcccagggcctttccggttgagtttttttgagccaaagccatcttagatttaaagcccaaccaagaacttcaaggttatggatacccaggccacccatgctaagtggtctgcaaactcttgcccaaccaatagagcagtgaccacctctgatatcttttctgcctttccacaagaaacccctccgaattttgtcaatagccttgatcacccatttagggcattgaagcactataaggtgatggataggaatggctgtgagcactgatttaaccaaggtcagccggcctgctgtgtgaatgagggcagatttccatccggtgtggagaaacttcgagctgaggttggtaacgcgtagaagaggtcacgggccattgtgtcttcaggcaatcaaggttatattggaagctatgggaaccctaaggccaattatgctgcaaacccttttaactctgggtatggcattaatcaagcaagtgctgccactgattatggttcccagtatggaactggtgcagcgcatggttcttgggtgcctacgacttgcaaagggcacccggacgtagataagtactgccaatttgccaggcctttcaccaaagtgtacacatagctttggcaatgactgtatgaatgttgtggtggatcagatgtttaacggataggaatcaggtagatgaattgtacacatgtttacttcagtttagcttctatcggtctgtgcaaaggaacatatatttattgaatcaagcgtgaatatattgaagtaatgtgcaattgtgaatgtgatgtctatcagtctataggcttgttcgattcagctttttttagttttttttacgagcttttctaagaatctat

SEQ ID NO: 22468 - DNA, 2783 bp, Zea Mays
cgaaaatcaccgttgccatccctgtccggaagggttgtcgttggtgtgctgttcgcctgttcccctattcagctattcgtgcacggagaagaagggaggcgaagagagggggcaccgtcggacggcggctcatcacgccatcggtctatgagaggtcaatgaagatggaagtggagcttcgggcagtacatgaaatgagagctgagcttgcacaagttcgtatggacattcaaaaccttggtgcaatgaggcaggaactcatgggccaagttcagggattaacacaggatttggctcagtcggcagaagatttgcataaggtgtctgcattacaagctgaaacccaggagatcaaacatgaaacacaacatttgaggtacatgctattaaatatgtgatctactcttttgaatatagaaggtctaaggattttccacatgcaaacaaactcgttattaatgatgcacaagagaagcaatgatacgcaactctcatgcctattcaaggaaaaaatacaaatcattattaatgttttatctgctcttccctgctttgccttacctcttcctagtcagcattatgagtaaacattgtcatttttcccttttcacctggtcaaaatgttaaactagtcaaaacaccctccactccaaactggattggtaagttcaaaaaaggatttagtggaattttgattttctgctgagtaatagagaggtgaatttgcaacgaatacctttgcttttattcaatcgtctggtatttattatgagccaatatgcagatctggtattgagcttgagaagaaaggatatgcacagagttatgagcagggacaggacatgcagatttttttatttatttcagtggcttctttttatcgaacgcgcaggagaactgcgcatcttatatattaagaaaaaggagaaagaggtctaaaatagacccagtacaagctgccaaaaaaaatatatcaagacagaaaaaagaaaaggggggggggggtatccaaacaacccccagccacaccagcacctaaggccacaatctcctaagatctcttgcccctgccaagccccaccgaacagcatcctcatgaatatgctgcatgatgatgctgatgttgggggatgcaccatcaaacacacattcatttctatgcttccatagccaccaagccaccagaatcactaaggaattaaatcctcttttctggttttttggcacctggcactcagcttctctccaccagtcttggaaggtcgttgttgccaatcctggagtcaggcgatgcagccctaccttatgcaaagtctgccaccaagtgtctctggcaaacacacaagccactaagatatgctgaactgtttcctcctgctggtcacaaagggggcacctaacaggatgctcaagacctcgtctgcttaatctatccgctgtccagcaacgatttagagaagccaaccaaatgaagaatttacaccttgggggggcccaacttttccaaattctagtagctggctcaaaagagactgaaccagccataaaacgatcatatgccgatttagtggaataatctccagatgcagacggggaccatctatgcacatcaggaatccccggatgtaactgaaaaccttgcactaggtcccaaattactaagaagtcgaagataatctgagctgacaggctgccagatatgtcattaacccatctattgtttaccaaggcttcttgcacagatctgcttttcttgattctcactgtaatatggctgaccaaagtgggggcaaggacagatattgattgcccatgaatccagcgatcagtccagaacagggttcgagagccatcacctacagtagtgtggaccgaggcagagaaaagagctttgacattggaatgaaccttgaacaagaaatctgcccagggcctttccggttgagtttttttgagccaaagccatcttagatttaaagcccaaccaagaacttcaaggttatggatacccaggccacccatgctaagtggtctgcaaactcttgcccaaccaatagagcagtgaccacctctgatatcttttctgcctttccacaagaaacccctccgaattttgtcaatagccttgatcacccatttagggcattgaagcactataaggtgatggataggaatggctgtgagcactgatttaaccaaggtcagccggcctgctgtgtgaatgagggcagatttccatccggtgtggagaaacttcgagctgaggttggtaacgcgtagaagaggtcacgggccattgtgtcttcaggcaatcaaggttatattggaagctatgggaaccctaaggccaattatgctgcaaacccttttaactctgggtatggcattaatcaagcaagtgctgccactgattatggttcccagtatggaactggtgcagcgcatggttcttgggtgcctacgacttgcaaagggcacccggacgtagataagtactgccaatttgccaggcctttcaccaaagtgtacacatagctttggcaatgactgtatgaatgttgtggtggatcagatgtttaacggataggaatcaggtagatgaattgtacacatgtttacttcagtttagcttctatcggtctgtgcaaaggaacatatatttattgaatcaagcgtgaatatattgaagtaatgtgcaattgtgaatgtgatgtctatcagtctataggcttgttcgattcagctttttttagttttttttacgagcttttctaagaatctat

SEQ ID NO: 22469 - DNA, 2439 bp, Zea Mays
cgaaaatcaccgttgccatccctgtccggaagggttgtcgttggtgtgctgttcgcctgttcccctattcagctattcgtgcacggagaagaagggaggcgaagagagggggcaccgtcggacggcggctcatcacgccatcggtctatgagaggtcaatgaagatggaagtggagcttcgggcagtacatgaaatgagagctgagcttgcacaagttcgtatggacattcaaaaccttggtgcaatgaggcaggaactcatgggccaagttcagggattaacacaggatttggctcagtcggcagaagatttgcataaggtgtctgcattacaagctgaaacccaggagatcaaacatgaaacacaacatttgagatctggtattgagcttgagaagaaaggatatgcacagagttatgagcagggacaggacatgcagatttttttatttatttcagtggcttctttttatcgaacgcgcaggagaactgcgcatcttatatattaagaaaaaggagaaagaggtctaaaatagacccagtacaagctgccaaaaaaaatatatcaagacagaaaaaagaaaaggggggggggggtatccaaacaacccccagccacaccagcacctaaggccacaatctcctaagatctcttgcccctgccaagccccaccgaacagcatcctcatgaatatgctgcatgatgatgctgatgttgggggatgcaccatcaaacacacattcatttctatgcttccatagccaccaagccaccagaatcactaaggaattaaatcctcttttctggttttttggcacctggcactcagcttctctccaccagtcttggaaggtcgttgttgccaatcctggagtcaggcgatgcagccctaccttatgcaaagtctgccaccaagtgtctctggcaaacacacaagccactaagatatgctgaactgtttcctcctgctggtcacaaagggggcacctaacaggatgctcaagacctcgtctgcttaatctatccgctgtccagcaacgatttagagaagccaaccaaatgaagaatttacaccttgggggggcccaacttttccaaattctagtagctggctcaaaagagactgaaccagccataaaacgatcatatgccgatttagtggaataatctccagatgcagacggggaccatctatgcacatcaggaatccccggatgtaactgaaaaccttgcactaggtcccaaattactaagaagtcgaagataatctgagctgacaggctgccagatatgtcattaacccatctattgtttaccaaggcttcttgcacagatctgcttttcttgattctcactgtaatatggctgaccaaagtgggggcaaggacagatattgattgcccatgaatccagcgatcagtccagaacagggttcgagagccatcacctacagtagtgtggaccgaggcagagaaaagagctttgacattggaatgaaccttgaacaagaaatctgcccagggcctttccggttgagtttttttgagccaaagccatcttagatttaaagcccaaccaagaacttcaaggttatggatacccaggccacccatgctaagtggtctgcaaactcttgcccaaccaatagagcagtgaccacctctgatatcttttctgcctttccacaagaaacccctccgaattttgtcaatagccttgatcacccatttagggcattgaagcactataaggtgatggataggaatggctgtgagcactgatttaaccaaggtcagccggcctgctgtgtgaatgagggcagatttccatccggttagtttatcagctatcttgtcaatgagttctagaaaagtgtttttggggagtttcttgactgaaaggggtaaacccaggtgtggagaaacttcgagctgaggttggtaacgcgtagaagaggtcacgggccattgtgtcttcaggcaatcaaggttatattggaagctatgggaaccctaaggccaattatgctgcaaacccttttaactctgggcaagtgctgccactgattatggttcccagtatggaactggtgcagcgcatggttcttgggtgcctacgacttgcaaagggcacccggacgtagataagtactgccaatttgccaggcctttcaccaaagtgtacacatagctttggcaatgactgtatgaatgttgtggtggatcagatgtttaacggataggaatcaggtagatgaattgtacacatgtttacttcagtttagcttctatcggtctgtgcaaaggaacatatatttattgaatcaagcgtgaatatattgaagtaatgtgcaattgtgaatgtgatgtctatcagtctataggcttgttcgattcagctttttttagttttttttacgagcttttctaagaatctat

SEQ ID NO: 22470 - DNA, 4011 bp, Zea Mays
ggttgtcgttggtgtgctgttcgcctgttcccctattcagctattcgtgcacggagaagaagggaggcgaagagagggggcaccgtcggacggcggctcatcacgccatcggtagggtttcggcgatcccatggccaggcgccacctgcccctttcctgctcccgcgccgcgaccatccgcctcctccacttcaccacctcctcccgccacaccacctcctcggcgactacgacgactaccgctacccttcccgcctgccacccggccacccccgacatcttccaggagtcgccgccaccgcatctccgccattttgtgggccacggccacaacggcaccgatgtccccatgccacattgccaccccagccgcatgtggtggcatcgctggaggagcggcttggcgcggagatggacgaggcgcatgtgctgcttgcgcaggaccagcggttgacgcacatggcgctcgtgcaggaggtcgctgccgcgcggcgcgatctcggctgcaccgcgcacgagctcacctccgctcatgaggagagcgaccaatgccttcacgaatcacgaggcgtggtcactccccctcacgagcttacgggctgaatgcatcttcttttctatgcgttgcaattctgggtacttatctggaagcagcttgctccaattgaaccagaaattgaagttgtccatatccctagaggaacatgtttgtttggtgtctatacagtcctaattttctcccagtcttgcaaatttcgggctaaacttgaaagcagatacattaaacaacctagatactgcagaatacatgcttatgtgtatgtattatgtaggtcatcttccttcatgtttggtgcactgtgctcaaaattttaacatgtcccatattgtttttctctctctttttaccaacatcatgtgaacccactcctttttttgtaaccacgaaattaactttgtgtattttgcttgcaaaaccaattcaagttcaattatgctataatttttaattatagttacacttgtatgtatgtgcattttccatgaaatttcatagttttgcattaatcgtaggtttgaaactgcattagcataattgcaggaatacattggatttcatgttttatcttgatgtaacgccccattttttcgagccaatacatgcatgttaacattatgtaaattcatgtaaataggaacccgcctgacttagttcaataagatagttctgttcgtttcaaatatatttatgttttatcttgaggtaaggccccattttctggaggtcgtctttggacatgtacaaacaatctcaacctatgttgaaaaagtttttattcaattagtgctatccctatcctataacatatgtcatcattctggactcgatcccatcttgtatggacataaatccaacgcaagatacacaattttgcaacacttatatattgaacatgttgtcttttttgtaggccaacattttgcaccatacaacatagcaagctaatcgctatcctataaaatttgtcttttagtttatgtggtatcctcttgtcatatagaatgtcaggtacttgacgtcacttcatccaccctgctttagttctatgcctaacatcttcatcaatattcttgtctctctgtagcattgatcctaaatacctaaagtgtccttcctaggcattacttgaccttccaaatgtgtagtagtgccgaaatcacatttcatatattcggttttaattctaccgagtctaacatccaaaataattttaataggtctatgagaggtcaatgaagatggaagtggagcttcgggcagtacatgaaatgagagctgagcttgcacaagttcgtatggacattcaaaaccttggtgcaatgaggcaggaactcatgggccaagttcagggattaacacaggatttggctcagtcggcagaagatttgcataaggtgtctgcattacaagctgaaacccaggagatcaaacatgaaacacaacatttgagatctggtattgagcttgagaagaaaggatatgcacagagttatgagcagggacaggacatgcagatttttttatttatttcagtggcttctttttatcgaacgcgcaggagaactgcgcatcttatatattaagaaaaaggagaaagaggtctaaaatagacccagtacaagctgccaaaaaaaatatatcaagacagaaaaaagaaaaggggggggggggtatccaaacaacccccagccacaccagcacctaaggccacaatctcctaagatctcttgcccctgccaagccccaccgaacagcatcctcatgaatatgctgcatgatgatgctgatgttgggggatgcaccatcaaacacacattcatttctatgcttccatagccaccaagccaccagaatcactaaggaattaaatcctcttttctggttttttggcacctggcactcagcttctctccaccagtcttggaaggtcgttgttgccaatcctggagtcaggcgatgcagccctaccttatgcaaagtctgccaccaagtgtctctggcaaacacacaagccactaagatatgctgaactgtttcctcctgctggtcacaaagggggcacctaacaggatgctcaagacctcgtctgcttaatctatccgctgtccagcaacgatttagagaagccaaccaaatgaagaatttacaccttgggggggcccaacttttccaaattctagtagctggctcaaaagagactgaaccagccataaaacgatcatatgccgatttagtggaataatctccagatgcagacggggaccatctatgcacatcaggaatccccggatgtaactgaaaaccttgcactaggtcccaaattactaagaagtcgaagataatctgagctgacaggctgccagatatgtcattaacccatctattgtttaccaaggcttcttgcacagatctgcttttcttgattctcactgtaatatggctgaccaaagtgggggcaaggacagatattgattgcccatgaatccagcgatcagtccagaacagggttcgagagccatcacctacagtagtgtggaccgaggcagagaaaagagctttgacattggaatgaaccttgaacaagaaatctgcccagggcctttccggttgagtttttttgagccaaagccatcttagatttaaagcccaaccaagaacttcaaggttatggatacccaggccacccatgctaagtggtctgcaaactcttgcccaaccaatagagcagtgaccacctctgatatcttttctgcctttccacaagaaacccctccgaattttgtcaatagccttgatcacccatttagggcattgaagcactataaggtgatggataggaatggctgtgagcactgatttaaccaaggtcagccggcctgctgtgtgaatgagggcagatttccatccggtgtggagaaacttcgagctgaggttggtaacgcgtagaagaggtcacgggccattgtgtcttcaggcaatcaaggttatattggaagctatgggaaccctaaggccaattatgctgcaaacccttttaactctgggtatggcattaatcaagcaagtgctgccactgattatggttcccagtatggaactggtgcagcgcatggttcttgggtgcctacgacttgcaaagggcacccggacgtagataagtactgccaatttgccaggcctttcaccaaagtgtacacatagctttggcaatgactgtatgaatgttgtggtggatcagatgtttaacggataggaatcaggtagatgaattgtacacatgtttacttcagtttagcttctatcggtctgtgcaaaggaacatatatttattgaatcaagcgtgaatatattgaagtaatgtgcaattgtgaatgtgatgtctatcagtctataggcttgttcgattcagctttttttagttttttttacgagcttttctaagaatctat

SEQ ID NO: 22471 - DNA, 857 bp, Zea Mays
tcccctattcagctattcgtgcacggagaagaagggaggcgaagagagggggcaccgtcggacggcggctcatcacgccatcggtctatgagaggtcaatgaagatggaagtggagcttcgggcagtacatgaaatgagagctgagcttgcacaagttcgtatggacattcaaaaccttggtgcaatgaggcaggaactcatgggccaagttcagggattaacacaggatttggctcagtcggcagaagatttgcataaggtgtctgcattacaagctgaaacccaggagatcaaacatgaaacacaacatttgaggtgtggagaaacttcgagctgaggttggtaacgcgtagaagaggtcacgggccattgtgtcttcaggcaatcaaggttatattggaagctatgggaaccctaaggccaattatgctgcaaacccttttaactctgggtatggcattaatcaagcaagtgctgccactgattatggttcccagtatggaactggtgcagcgcatggttcttgggtgcctacgacttgcaaagggcacccggacgtagataagtactgccaatttgccaggcctttcaccaaagtgtacacatagctttggcaatgactgtatgaatgttgtggtggatcagatgtttaacggataggaatcaggtagatgaattgtacacatgtttacttcagtttagcttctatcggtctgtgcaaaggaacatatatttattgaatcaagcgtgaatatattgaagtaatgtgcaattgtgaatgtgatgtctatcagtctataggcttgttcgattcagctttttttagttttttttacgagcttttctaagaatctat

SEQ ID NO: 22472 - DNA, 2824 bp, Zea Mays
tcccctattcagctattcgtgcacggagaagaagggaggcgaagagagggggcaccgtcggacggcggctcatcacgccatcggtagggtttcggcgatcccatggccaggcgccacctgcccctttcctgctcccgcgccgcgaccatccgcctcctccacttcaccacctcctcccgccacaccacctcctcggcgactacgacgactaccgctacccttcccgcctgccacccggccacccccgacatcttccaggagtcgccgccaccgcatctccgccattttgtgggccacggccacaacggcaccgatgtccccatgccacattgccaccccagccgcatgtggtggcatcgctggaggagcggcttggcgcggagatggacgaggcgcatgtgctgcttgcgcaggaccagcggttgacgcacatggcgctcgtgcaggaggtcgctgccgcgcggcgcgatctcggctgcaccgcgcacgagctcacctccgctcatgaggagagcgaccaatgccttcacgaatcacgaggcgtggtcactccccctcacgagcttacgggctgaatgcatcttcttttctatgcgttgcaattctgggtctatgagaggtcaatgaagatggaagtggagcttcgggcagtacatgaaatgagagctgagcttgcacaagttcgtatggacattcaaaaccttggtgcaatgaggcaggaactcatgggccaagttcagggattaacacaggatttggctcagtcggcagaagatttgcataaggtgtctgcattacaagctgaaacccaggagatcaaacatgaaacacaacatttgagatctggtattgagcttgagaagaaaggatatgcacagagttatgagcagggacaggacatgcagatttttttatttatttcagtggcttctttttatcgaacgcgcaggagaactgcgcatcttatatattaagaaaaaggagaaagaggtctaaaatagacccagtacaagctgccaaaaaaaatatatcaagacagaaaaaagaaaaggggggggggggtatccaaacaacccccagccacaccagcacctaaggccacaatctcctaagatctcttgcccctgccaagccccaccgaacagcatcctcatgaatatgctgcatgatgatgctgatgttgggggatgcaccatcaaacacacattcatttctatgcttccatagccaccaagccaccagaatcactaaggaattaaatcctcttttctggttttttggcacctggcactcagcttctctccaccagtcttggaaggtcgttgttgccaatcctggagtcaggcgatgcagccctaccttatgcaaagtctgccaccaagtgtctctggcaaacacacaagccactaagatatgctgaactgtttcctcctgctggtcacaaagggggcacctaacaggatgctcaagacctcgtctgcttaatctatccgctgtccagcaacgatttagagaagccaaccaaatgaagaatttacaccttgggggggcccaacttttccaaattctagtagctggctcaaaagagactgaaccagccataaaacgatcatatgccgatttagtggaataatctccagatgcagacggggaccatctatgcacatcaggaatccccggatgtaactgaaaaccttgcactaggtcccaaattactaagaagtcgaagataatctgagctgacaggctgccagatatgtcattaacccatctattgtttaccaaggcttcttgcacagatctgcttttcttgattctcactgtaatatggctgaccaaagtgggggcaaggacagatattgattgcccatgaatccagcgatcagtccagaacagggttcgagagccatcacctacagtagtgtggaccgaggcagagaaaagagctttgacattggaatgaaccttgaacaagaaatctgcccagggcctttccggttgagtttttttgagccaaagccatcttagatttaaagcccaaccaagaacttcaaggttatggatacccaggccacccatgctaagtggtctgcaaactcttgcccaaccaatagagcagtgaccacctctgatatcttttctgcctttccacaagaaacccctccgaattttgtcaatagccttgatcacccatttagggcattgaagcactataaggtgatggataggaatggctgtgagcactgatttaaccaaggtcagccggcctgctgtgtgaatgagggcagatttccatccggtgtggagaaacttcgagctgaggttggtaacgcgtagaagaggtcacgggccattgtgtcttcaggcaatcaaggttatattggaagctatgggaaccctaaggccaattatgctgcaaacccttttaactctgggcaagtgctgccactgattatggttcccagtatggaactggtgcagcgcatggttcttgggtgcctacgacttgcaaagggcacccggacgtagataagtactgccaatttgccaggcctttcaccaaagtgtacacatagctttggcaatgactgtatgaatgttgtggtggatcagatgtttaacggataggaatcaggtagatgaattgtacacatgtttacttcagtttagcttctatcggtctgtgcaaaggaacatatatttattgaatcaagcgtgaatatattgaagtaatgtgcaattgtgaatgtgatgtctatcagtctataggcttgttcgattcagctttttttagttttttttacgagcttttctaagaatctat

SEQ ID NO: 22473 - DNA, 4391 bp, Zea Mays
tcccctattcagctattcgtgcacggagaagaagggaggcgaagagagggggcaccgtcggacggcggctcatcacgccatcggtagggtttcggcgatcccatggccaggcgccacctgcccctttcctgctcccgcgccgcgaccatccgcctcctccacttcaccacctcctcccgccacaccacctcctcggcgactacgacgactaccgctacccttcccgcctgccacccggccacccccgacatcttccaggagtcgccgccaccgcatctccgccattttgtgggccacggccacaacggcaccgatgtccccatgccacattgccaccccagccgcatgtggtggcatcgctggaggagcggcttggcgcggagatggacgaggcgcatgtgctgcttgcgcaggaccagcggttgacgcacatggcgctcgtgcaggaggtcgctgccgcgcggcgcgatctcggctgcaccgcgcacgagctcacctccgctcatgaggagagcgaccaatgccttcacgaatcacgaggcgtggtcactccccctcacgagcttacgggctgaatgcatcttcttttctatgcgttgcaattctgggtacttatctggaagcagcttgctccaattgaaccagaaattgaagttgtccatatccctagaggaacatgtttgtttggtgtctatacagtcctaattttctcccagtcttgcaaatttcgggctaaacttgaaagcagatacattaaacaacctagatactgcagaatacatgcttatgtgtatgtattatgtaggtcatcttccttcatgtttggtgcactgtgctcaaaattttaacatgtcccatattgtttttctctctctttttaccaacatcatgtgaacccactcctttttttgtaaccacgaaattaactttgtgtattttgcttgcaaaaccaattcaagttcaattatgctataatttttaattatagttacacttgtatgtatgtgcattttccatgaaatttcatagttttgcattaatcgtaggtttgaaactgcattagcataattgcaggaatacattggatttcatgttttatcttgatgtaacgccccattttttcgagccaatacatgcatgttaacattatgtaaattcatgtaaataggaacccgcctgacttagttcaataagatagttctgttcgtttcaaatatatttatgttttatcttgaggtaaggccccattttctggaggtcgtctttggacatgtacaaacaatctcaacctatgttgaaaaagtttttattcaattagtgctatccctatcctataacatatgtcatcattctggactcgatcccatcttgtatggacataaatccaacgcaagatacacaattttgcaacacttatatattgaacatgttgtcttttttgtaggccaacattttgcaccatacaacatagcaagctaatcgctatcctataaaatttgtcttttagtttatgtggtatcctcttgtcatatagaatgtcaggtacttgacgtcacttcatccaccctgctttagttctatgcctaacatcttcatcaatattcttgtctctctgtagcattgatcctaaatacctaaagtgtccttcctaggcattacttgaccttccaaatgtgtagtagtgccgaaatcacatttcatatattcggttttaattctaccgagtctaacatccaaaataattttaataggtctatgagaggtcaatgaagatggaagtggagcttcgggcagtacatgaaatgagagctgagcttgcacaagttcgtatggacattcaaaaccttggtgcaatgaggcaggaactcatgggccaagttcagggattaacacaggatttggctcagtcggcagaagatttgcataaggtgtctgcattacaagctgaaacccaggagatcaaacatgaaacacaacatttgaggtacatgctattaaatatgtgatctactcttttgaatatagaaggtctaaggattttccacatgcaaacaaactcgttattaatgatgcacaagagaagcaatgatacgcaactctcatgcctattcaaggaaaaaatacaaatcattattaatgttttatctgctcttccctgctttgccttacctcttcctagtcagcattatgagtaaacattgtcatttttcccttttcacctggtcaaaatgttaaactagtcaaaacaccctccactccaaactggattggtaagttcaaaaaaggatttagtggaattttgattttctgctgagtaatagagaggtgaatttgcaacgaatacctttgcttttattcaatcgtctggtatttattatgagccaatatgcagatctggtattgagcttgagaagaaaggatatgcacagagttatgagcagggacaggacatgcagatttttttatttatttcagtggcttctttttatcgaacgcgcaggagaactgcgcatcttatatattaagaaaaaggagaaagaggtctaaaatagacccagtacaagctgccaaaaaaaatatatcaagacagaaaaaagaaaaggggggggggggtatccaaacaacccccagccacaccagcacctaaggccacaatctcctaagatctcttgcccctgccaagccccaccgaacagcatcctcatgaatatgctgcatgatgatgctgatgttgggggatgcaccatcaaacacacattcatttctatgcttccatagccaccaagccaccagaatcactaaggaattaaatcctcttttctggttttttggcacctggcactcagcttctctccaccagtcttggaaggtcgttgttgccaatcctggagtcaggcgatgcagccctaccttatgcaaagtctgccaccaagtgtctctggcaaacacacaagccactaagatatgctgaactgtttcctcctgctggtcacaaagggggcacctaacaggatgctcaagacctcgtctgcttaatctatccgctgtccagcaacgatttagagaagccaaccaaatgaagaatttacaccttgggggggcccaacttttccaaattctagtagctggctcaaaagagactgaaccagccataaaacgatcatatgccgatttagtggaataatctccagatgcagacggggaccatctatgcacatcaggaatccccggatgtaactgaaaaccttgcactaggtcccaaattactaagaagtcgaagataatctgagctgacaggctgccagatatgtcattaacccatctattgtttaccaaggcttcttgcacagatctgcttttcttgattctcactgtaatatggctgaccaaagtgggggcaaggacagatattgattgcccatgaatccagcgatcagtccagaacagggttcgagagccatcacctacagtagtgtggaccgaggcagagaaaagagctttgacattggaatgaaccttgaacaagaaatctgcccagggcctttccggttgagtttttttgagccaaagccatcttagatttaaagcccaaccaagaacttcaaggttatggatacccaggccacccatgctaagtggtctgcaaactcttgcccaaccaatagagcagtgaccacctctgatatcttttctgcctttccacaagaaacccctccgaattttgtcaatagccttgatcacccatttagggcattgaagcactataaggtgatggataggaatggctgtgagcactgatttaaccaaggtcagccggcctgctgtgtgaatgagggcagatttccatccggtgtggagaaacttcgagctgaggttggtaacgcgtagaagaggtcacgggccattgtgtcttcaggcaatcaaggttatattggaagctatgggaaccctaaggccaattatgctgcaaacccttttaactctgggtatggcattaatcaagcaagtgctgccactgattatggttcccagtatggaactggtgcagcgcatggttcttgggtgcctacgacttgcaaagggcacccggacgtagataagtactgccaatttgccaggcctttcaccaaagtgtacacatagctttggcaatgactgtatgaatgttgtggtggatcagatgtttaacggataggaatcaggtagatgaattgtacacatgtttacttcagtttagcttctatcggtctgtgcaaaggaacatatatttattgaatcaagcgtgaatatattgaagtaatgtgcaattgtgaatgtgatgtctatcagtctataggcttgttcgattcagctttttttagttttttttacgagcttttctaagaatctat

SEQ ID NO: 22474 - DNA, 4375 bp, Zea Mays
tcccctattcagctattcgtgcacggagaagaagggaggcgaagagagggggcaccgtcggacggcggctcatcacgccatcggtagggtttcggcgatcccatggccaggcgccacctgcccctttcctgctcccgcgccgcgaccatccgcctcctccacttcaccacctcctcccgccacaccacctcctcggcgactacgacgactaccgctacccttcccgcctgccacccggccacccccgacatcttccaggagtcgccgccaccgcatctccgccattttgtgggccacggccacaacggcaccgatgtccccatgccacattgccaccccagccgcatgtggtggcatcgctggaggagcggcttggcgcggagatggacgaggcgcatgtgctgcttgcgcaggaccagcggttgacgcacatggcgctcgtgcaggaggtcgctgccgcgcggcgcgatctcggctgcaccgcgcacgagctcacctccgctcatgaggagagcgaccaatgccttcacgaatcacgaggcgtggtcactccccctcacgagcttacgggctgaatgcatcttcttttctatgcgttgcaattctgggtacttatctggaagcagcttgctccaattgaaccagaaattgaagttgtccatatccctagaggaacatgtttgtttggtgtctatacagtcctaattttctcccagtcttgcaaatttcgggctaaacttgaaagcagatacattaaacaacctagatactgcagaatacatgcttatgtgtatgtattatgtaggtcatcttccttcatgtttggtgcactgtgctcaaaattttaacatgtcccatattgtttttctctctctttttaccaacatcatgtgaacccactcctttttttgtaaccacgaaattaactttgtgtattttgcttgcaaaaccaattcaagttcaattatgctataatttttaattatagttacacttgtatgtatgtgcattttccatgaaatttcatagttttgcattaatcgtaggtttgaaactgcattagcataattgcaggaatacattggatttcatgttttatcttgatgtaacgccccattttttcgagccaatacatgcatgttaacattatgtaaattcatgtaaataggaacccgcctgacttagttcaataagatagttctgttcgtttcaaatatatttatgttttatcttgaggtaaggccccattttctggaggtcgtctttggacatgtacaaacaatctcaacctatgttgaaaaagtttttattcaattagtgctatccctatcctataacatatgtcatcattctggactcgatcccatcttgtatggacataaatccaacgcaagatacacaattttgcaacacttatatattgaacatgttgtcttttttgtaggccaacattttgcaccatacaacatagcaagctaatcgctatcctataaaatttgtcttttagtttatgtggtatcctcttgtcatatagaatgtcaggtacttgacgtcacttcatccaccctgctttagttctatgcctaacatcttcatcaatattcttgtctctctgtagcattgatcctaaatacctaaagtgtccttcctaggcattacttgaccttccaaatgtgtagtagtgccgaaatcacatttcatatattcggttttaattctaccgagtctaacatccaaaataattttaataggtctatgagaggtcaatgaagatggaagtggagcttcgggcagtacatgaaatgagagctgagcttgcacaagttcgtatggacattcaaaaccttggtgcaatgaggcaggaactcatgggccaagttcagggattaacacaggatttggctcagtcggcagaagatttgcataaggtgtctgcattacaagctgaaacccaggagatcaaacatgaaacacaacatttgaggtacatgctattaaatatgtgatctactcttttgaatatagaaggtctaaggattttccacatgcaaacaaactcgttattaatgatgcacaagagaagcaatgatacgcaactctcatgcctattcaaggaaaaaatacaaatcattattaatgttttatctgctcttccctgctttgccttacctcttcctagtcagcattatgagtaaacattgtcatttttcccttttcacctggtcaaaatgttaaactagtcaaaacaccctccactccaaactggattggtaagttcaaaaaaggatttagtggaattttgattttctgctgagtaatagagaggtgaatttgcaacgaatacctttgcttttattcaatcgtctggtatttattatgagccaatatgcagatctggtattgagcttgagaagaaaggatatgcacagagttatgagcagggacaggacatgcagatttttttatttatttcagtggcttctttttatcgaacgcgcaggagaactgcgcatcttatatattaagaaaaaggagaaagaggtctaaaatagacccagtacaagctgccaaaaaaaatatatcaagacagaaaaaagaaaaggggggggggggtatccaaacaacccccagccacaccagcacctaaggccacaatctcctaagatctcttgcccctgccaagccccaccgaacagcatcctcatgaatatgctgcatgatgatgctgatgttgggggatgcaccatcaaacacacattcatttctatgcttccatagccaccaagccaccagaatcactaaggaattaaatcctcttttctggttttttggcacctggcactcagcttctctccaccagtcttggaaggtcgttgttgccaatcctggagtcaggcgatgcagccctaccttatgcaaagtctgccaccaagtgtctctggcaaacacacaagccactaagatatgctgaactgtttcctcctgctggtcacaaagggggcacctaacaggatgctcaagacctcgtctgcttaatctatccgctgtccagcaacgatttagagaagccaaccaaatgaagaatttacaccttgggggggcccaacttttccaaattctagtagctggctcaaaagagactgaaccagccataaaacgatcatatgccgatttagtggaataatctccagatgcagacggggaccatctatgcacatcaggaatccccggatgtaactgaaaaccttgcactaggtcccaaattactaagaagtcgaagataatctgagctgacaggctgccagatatgtcattaacccatctattgtttaccaaggcttcttgcacagatctgcttttcttgattctcactgtaatatggctgaccaaagtgggggcaaggacagatattgattgcccatgaatccagcgatcagtccagaacagggttcgagagccatcacctacagtagtgtggaccgaggcagagaaaagagctttgacattggaatgaaccttgaacaagaaatctgcccagggcctttccggttgagtttttttgagccaaagccatcttagatttaaagcccaaccaagaacttcaaggttatggatacccaggccacccatgctaagtggtctgcaaactcttgcccaaccaatagagcagtgaccacctctgatatcttttctgcctttccacaagaaacccctccgaattttgtcaatagccttgatcacccatttagggcattgaagcactataaggtgatggataggaatggctgtgagcactgatttaaccaaggtcagccggcctgctgtgtgaatgagggcagatttccatccggtgtggagaaacttcgagctgaggttggtaacgcgtagaagaggtcacgggccattgtgtcttcaggcaatcaaggttatattggaagctatgggaaccctaaggccaattatgctgcaaacccttttaactctgggcaagtgctgccactgattatggttcccagtatggaactggtgcagcgcatggttcttgggtgcctacgacttgcaaagggcacccggacgtagataagtactgccaatttgccaggcctttcaccaaagtgtacacatagctttggcaatgactgtatgaatgttgtggtggatcagatgtttaacggataggaatcaggtagatgaattgtacacatgtttacttcagtttagcttctatcggtctgtgcaaaggaacatatatttattgaatcaagcgtgaatatattgaagtaatgtgcaattgtgaatgtgatgtctatcagtctataggcttgttcgattcagctttttttagttttttttacgagcttttctaagaatctat

SEQ ID NO: 22475 - DNA, 2840 bp, Zea Mays
tcccctattcagctattcgtgcacggagaagaagggaggcgaagagagggggcaccgtcggacggcggctcatcacgccatcggtagggtttcggcgatcccatggccaggcgccacctgcccctttcctgctcccgcgccgcgaccatccgcctcctccacttcaccacctcctcccgccacaccacctcctcggcgactacgacgactaccgctacccttcccgcctgccacccggccacccccgacatcttccaggagtcgccgccaccgcatctccgccattttgtgggccacggccacaacggcaccgatgtccccatgccacattgccaccccagccgcatgtggtggcatcgctggaggagcggcttggcgcggagatggacgaggcgcatgtgctgcttgcgcaggaccagcggttgacgcacatggcgctcgtgcaggaggtcgctgccgcgcggcgcgatctcggctgcaccgcgcacgagctcacctccgctcatgaggagagcgaccaatgccttcacgaatcacgaggcgtggtcactccccctcacgagcttacgggctgaatgcatcttcttttctatgcgttgcaattctgggtctatgagaggtcaatgaagatggaagtggagcttcgggcagtacatgaaatgagagctgagcttgcacaagttcgtatggacattcaaaaccttggtgcaatgaggcaggaactcatgggccaagttcagggattaacacaggatttggctcagtcggcagaagatttgcataaggtgtctgcattacaagctgaaacccaggagatcaaacatgaaacacaacatttgagatctggtattgagcttgagaagaaaggatatgcacagagttatgagcagggacaggacatgcagatttttttatttatttcagtggcttctttttatcgaacgcgcaggagaactgcgcatcttatatattaagaaaaaggagaaagaggtctaaaatagacccagtacaagctgccaaaaaaaatatatcaagacagaaaaaagaaaaggggggggggggtatccaaacaacccccagccacaccagcacctaaggccacaatctcctaagatctcttgcccctgccaagccccaccgaacagcatcctcatgaatatgctgcatgatgatgctgatgttgggggatgcaccatcaaacacacattcatttctatgcttccatagccaccaagccaccagaatcactaaggaattaaatcctcttttctggttttttggcacctggcactcagcttctctccaccagtcttggaaggtcgttgttgccaatcctggagtcaggcgatgcagccctaccttatgcaaagtctgccaccaagtgtctctggcaaacacacaagccactaagatatgctgaactgtttcctcctgctggtcacaaagggggcacctaacaggatgctcaagacctcgtctgcttaatctatccgctgtccagcaacgatttagagaagccaaccaaatgaagaatttacaccttgggggggcccaacttttccaaattctagtagctggctcaaaagagactgaaccagccataaaacgatcatatgccgatttagtggaataatctccagatgcagacggggaccatctatgcacatcaggaatccccggatgtaactgaaaaccttgcactaggtcccaaattactaagaagtcgaagataatctgagctgacaggctgccagatatgtcattaacccatctattgtttaccaaggcttcttgcacagatctgcttttcttgattctcactgtaatatggctgaccaaagtgggggcaaggacagatattgattgcccatgaatccagcgatcagtccagaacagggttcgagagccatcacctacagtagtgtggaccgaggcagagaaaagagctttgacattggaatgaaccttgaacaagaaatctgcccagggcctttccggttgagtttttttgagccaaagccatcttagatttaaagcccaaccaagaacttcaaggttatggatacccaggccacccatgctaagtggtctgcaaactcttgcccaaccaatagagcagtgaccacctctgatatcttttctgcctttccacaagaaacccctccgaattttgtcaatagccttgatcacccatttagggcattgaagcactataaggtgatggataggaatggctgtgagcactgatttaaccaaggtcagccggcctgctgtgtgaatgagggcagatttccatccggtgtggagaaacttcgagctgaggttggtaacgcgtagaagaggtcacgggccattgtgtcttcaggcaatcaaggttatattggaagctatgggaaccctaaggccaattatgctgcaaacccttttaactctgggtatggcattaatcaagcaagtgctgccactgattatggttcccagtatggaactggtgcagcgcatggttcttgggtgcctacgacttgcaaagggcacccggacgtagataagtactgccaatttgccaggcctttcaccaaagtgtacacatagctttggcaatgactgtatgaatgttgtggtggatcagatgtttaacggataggaatcaggtagatgaattgtacacatgtttacttcagtttagcttctatcggtctgtgcaaaggaacatatatttattgaatcaagcgtgaatatattgaagtaatgtgcaattgtgaatgtgatgtctatcagtctataggcttgttcgattcagctttttttagttttttttacgagcttttctaagaatctat

SEQ ID NO: 22476 - DNA, 3369 bp, Zea Mays
ccttcatgtttggtgcactgtgctcaaaattttaacatgtcccatattgtttttctctctctttttaccaacatcatgtgaacccactcctttttttgtaaccacgaaattaactttgtgtattttgcttgcaaaaccaattcaagttcaattatgctataatttttaattatagttacacttgtatgtatgtgcattttccatgaaatttcatagttttgcattaatcgtaggtttgaaactgcattagcataattgcaggaatacattggatttcatgttttatcttgatgtaacgccccattttttcgagccaatacatgcatgttaacattatgtaaattcatgtaaataggaacccgcctgacttagttcaataagatagttctgttcgtttcaaatatatttatgttttatcttgaggtaaggccccattttctggaggtcgtctttggacatgtacaaacaatctcaacctatgttgaaaaagtttttattcaattagtgctatccctatcctataacatatgtcatcattctggactcgatcccatcttgtatggacataaatccaacgcaagatacacaattttgcaacacttatatattgaacatgttgtcttttttgtaggccaacattttgcaccatacaacatagcaagctaatcgctatcctataaaatttgtcttttagtttatgtggtatcctcttgtcatatagaatgtcaggtctatgagaggtcaatgaagatggaagtggagcttcgggcagtacatgaaatgagagctgagcttgcacaagttcgtatggacattcaaaaccttggtgcaatgaggcaggaactcatgggccaagttcagggattaacacaggatttggctcagtcggcagaagatttgcataaggtgtctgcattacaagctgaaacccaggagatcaaacatgaaacacaacatttgaggtacatgctattaaatatgtgatctactcttttgaatatagaaggtctaaggattttccacatgcaaacaaactcgttattaatgatgcacaagagaagcaatgatacgcaactctcatgcctattcaaggaaaaaatacaaatcattattaatgttttatctgctcttccctgctttgccttacctcttcctagtcagcattatgagtaaacattgtcatttttcccttttcacctggtcaaaatgttaaactagtcaaaacaccctccactccaaactggattggtaagttcaaaaaaggatttagtggaattttgattttctgctgagtaatagagaggtgaatttgcaacgaatacctttgcttttattcaatcgtctggtatttattatgagccaatatgcagatctggtattgagcttgagaagaaaggatatgcacagagttatgagcagggacaggacatgcagatttttttatttatttcagtggcttctttttatcgaacgcgcaggagaactgcgcatcttatatattaagaaaaaggagaaagaggtctaaaatagacccagtacaagctgccaaaaaaaatatatcaagacagaaaaaagaaaaggggggggggggtatccaaacaacccccagccacaccagcacctaaggccacaatctcctaagatctcttgcccctgccaagccccaccgaacagcatcctcatgaatatgctgcatgatgatgctgatgttgggggatgcaccatcaaacacacattcatttctatgcttccatagccaccaagccaccagaatcactaaggaattaaatcctcttttctggttttttggcacctggcactcagcttctctccaccagtcttggaaggtcgttgttgccaatcctggagtcaggcgatgcagccctaccttatgcaaagtctgccaccaagtgtctctggcaaacacacaagccactaagatatgctgaactgtttcctcctgctggtcacaaagggggcacctaacaggatgctcaagacctcgtctgcttaatctatccgctgtccagcaacgatttagagaagccaaccaaatgaagaatttacaccttgggggggcccaacttttccaaattctagtagctggctcaaaagagactgaaccagccataaaacgatcatatgccgatttagtggaataatctccagatgcagacggggaccatctatgcacatcaggaatccccggatgtaactgaaaaccttgcactaggtcccaaattactaagaagtcgaagataatctgagctgacaggctgccagatatgtcattaacccatctattgtttaccaaggcttcttgcacagatctgcttttcttgattctcactgtaatatggctgaccaaagtgggggcaaggacagatattgattgcccatgaatccagcgatcagtccagaacagggttcgagagccatcacctacagtagtgtggaccgaggcagagaaaagagctttgacattggaatgaaccttgaacaagaaatctgcccagggcctttccggttgagtttttttgagccaaagccatcttagatttaaagcccaaccaagaacttcaaggttatggatacccaggccacccatgctaagtggtctgcaaactcttgcccaaccaatagagcagtgaccacctctgatatcttttctgcctttccacaagaaacccctccgaattttgtcaatagccttgatcacccatttagggcattgaagcactataaggtgatggataggaatggctgtgagcactgatttaaccaaggtcagccggcctgctgtgtgaatgagggcagatttccatccggtgtggagaaacttcgagctgaggttggtaacgcgtagaagaggtcacgggccattgtgtcttcaggcaatcaaggttatattggaagctatgggaaccctaaggccaattatgctgcaaacccttttaactctgggtatggcattaatcaagcaagtgctgccactgattatggttcccagtatggaactggtgcagcgcatggttcttgggtgcctacgacttgcaaagggcacccggacgtagataagtactgccaatttgccaggcctttcaccaaagtgtacacatagctttggcaatgactgtatgaatgttgtggtggatcagatgtttaacggataggaatcaggtagatgaattgtacacatgtttacttcagtttagcttctatcggtctgtgcaaaggaacatatatttattgaatcaagcgtgaatatattgaagtaatgtgcaattgtgaatgtgatgtctatcagtctataggcttgttcgattcagctttttttagttttttttacgagcttttctaagaatctat

SEQ ID NO: 22477 - DNA, 1568 bp, Zea Mays
ctacgaacctgcaggccggccacagatcgcgcgtcggccaggaagcaatcaacggggaaagcgcaggggcgaagcctgacacaggcaaacaccacgaaactgagagtgggtcgaccgtggcgcgcggacctggtgctgccgatacacgccggggacatcgagcgcctctgcagtcgtacaagcaggccaaccaagcagctctgcagtcgagacatgaagcgagccgtctccgctctctgggcgcgccgcgccgtccgccaagcctacctctacacccccaccgccgccaccgccacctcgtcgtcgcctgagtttggggcgtccacatcagaggcgtgggacgggcgtttccggctccacaagccgcgcgggcagcacctgctcaccaacccgcgcgtcctcgacgccatcgcgcgccacgccgccatcagtccaggcgacgccgtcctcgaggtcgggcccggcacgggcaacctcaccgcgcgcctcctcgcgtcccaggcggcgcgcgtcaccgccgtcgagatcgacccgcgcatggtcgaggccgtcaccgcgcgcgccgctgctctcggcctcgcgcacaagttcaaggtgattgcgggcgacgccgtggaggtagagttcccggagttcgacgtctgcgtggccaacatcccctacggcatctcctcgccgctgatcgccaagctgctgttcggcccctaccggttccggacggcgacgctgctgctccagaaggagttcgcgcggcggctcgtggccgcgccgggcgacggggagtacaaccggttggcggccaacgtgcgcctggtcgccgacgtcaggctgctcatggacgtgagcaagagggacttcgtgcccatgccccgggtggactcgtccctcgtcgagatccggccgcggggcaccgtgccaggggtcgacgtcagcgagtggctggcgttcacgcgcgtgtgtttcgggcagaagaacaagaccctcgccgccatcttcaagcagaagaggatggtcgttgagctgttgcgccggtcgctgagaacggagagatgtgccggtggtgtcagcctaggtccgcttgaggtcgacgacagtggagaagatgactgtgggggaaacgacgatggcagcaacagagtggttggtttcagcgaggaagaggtcgcggcgttcaaggagaaggttgctggagcgttggacaccgccgagctcgccggcaagaggccatcgaaggtgtccaacgacgagctgaaacgattgctccggctgttcaacgatcgcggggtgcggttccagtagaggtagcgcacggtgaggtttgtgtcgccaaggtcgcaccacgcctgatgcaatggcaggttcccagcacgctggaagtcattgtagacgtaagcgctacttgcctgtcttgttctgagttaatggcgtcagccttatccataccatgttcaatagtatgtccaatcttccattctgctgagttaatgttgaactcgagggcacgcattttgctgagttaaaacagtgaggtttgatgatatctgaaagactgaaagttgcccacgtct

SEQ ID NO: 22478 - DNA, 1776 bp, Zea Mays
gccaggacgggtcgcgcgtgggcccgcttatccctttcccttcgcttcgacaaaacctccaatacacacacacacctccgttcctccctcacgccggcggcctgtatccctctccccatggctgctggactgggagcgcgcccctccgccaccttcgtggccggaaggttccggcctctcgctgcccctctccgccccgtccgctccggcaagttcgttgtgccaaagcgatgcttcattgtatcaagcaggcttgcatgggtggaagatgagcttatggagatacaaaagtcacaagagcaaagttcagtaaaatcaaagaaaaggccacctttgaggcgtggaaaggtctccccacaacttcctgtaccagggcacattccaagaccatcttatgttggtgcgaaaggattgcctgaactatgcaagggccaattacatgatgctcaaggaattactggaatgagagctgcttgcaaacttgctgcccgtgttcttgacttcgctgggactttagttaagccatccattactacaaatgaaattgacgcagcagtccataatatgatcattgaggctggtgcttatccttctccacttggctatcatggatttcctaagagtatatgtacatcagtaaatgagtgtgtctgtcatggggtacctgattcaactcagctgcagaatggggatattataaatattgatgtaaatgtgttcctgaatggataccatgggggtacctccagaacatttgcatgtggacaagtggatgattctatcaaacattttctcaatgcagctgaagaatgcttggagaaaggcatttctatctgcagggatggtgtgaactacagaaagattggcaagaaaataagcaagcttgcctatttttatggctattatgtggtggaacgctttgttgggcatgggattggaactatgtatcattctgagccactaattctacatcatgccaacgaaaactcagggcgtatggttgagggccaaacatttacaattgaacctatactcacaatggagaaaacagagtgtgttacatgggaagatggatggacgactgtcactgctgatggtagctgggctgcgcagtttgagcataccatactggtgactagggacggtgcagaaatactgacgaaagtctgagctattctcctgcccgataattattgtcagaattctcagctatggttcctgtcccaaggcatcctggtcatgtccgttgctcgccgcaatactcatttcagagttttgagatctgctgcaggccgacatacgggaaaggtttcccccatgtagcagcaacttgcaggtgatagcctgctgtagtggtgttgctgtgcctttggattctagaagacattctgtatataaaacagcactcctaacagttcagtctagaacctagaagtagaaactgttattgttatgatacggaagcactttaggggaacagttggagacacatttttatgtttttcaaaaaaaaaatgatttagaaaagacttatagggagctcttggaaatgctctaataaaaacatctcctaaaattttgtttttggacgtataacattacaagccatgtccaacagatcccagtgtgtgctcccaatttgacggtgtcccaaaatcagacctcttttggcgtaaattttagcacacatacggacgctcccaatctttttttttaaaaaaaattggtctacggccccgcagctagaccccagcacaccgcccccgggatcttcgg

SEQ ID NO: 22479 - DNA, 2813 bp, Zea Mays
gccaggacgggtcgcgcgtgggcccgcttatccctttcccttcgcttcgacaaaacctccaatacacacacacacctccgttcctccctcacgccggcggcctgtatccctctccccatggctgctggactgggagcgcgcccctccgccaccttcgtggccggaaggttccggcctctcgctgcccctctccgccccgtccgctccggcaagttcgttgtgccaaagcgatgcttcattgtatcaagcaggcttgcatgggtggaagatgagcttatggagatacaaaaggatgagagcatacccacctgaattttcattgattgagtgtggcaaaccgctcggattacaacatcaacacatacaacaacaccacaagcatggacaaacttaggagggctcagaaagctcctttaagctcttggcagttcttttgcatcttgatatttagcagtatccagagtccttggtctagactcaagatattggatcctagatttcttgtaatctttggctgtctattagttcaaacacaccttgatttgtggcttctgataggtttcaactctaacctacctcaacttgttgggaactaaagggctttgttgttgttgtactagttcatacacatcttatgagaatcttgcagtttgtgggttatctacattgaactaatataccatggttctccaccataaaaaaacaaactaatacaccaagaccaactttcgccatgtgtcatatataataactctgctaacagaccaatacacttccacatttgaaggtcacaagagcaaagttcagtaaaatcaaagaaaaggccacctttgaggcgtggaaaggtctccccacaacttcctgtaccagggcacattccaagaccatcttatgttggtgcgaaaggattgcctgaactatgcaagggccaattacatgatgctcaaggaattactggaatgagagctgcttgcaaacttgctgcccgtgttcttgacttcgctgggactttagttaagccatccattactacaaatgaaattgacgcagcagtccataatatgatcattgaggctggtgcttatccttctccacttggctatcatggatttcctaagagtatatgtacatcagtaaatgagtgtgtctgtcatggggtacctgattcaactcagctgcagaatggggatattataaatattgatgtaaatgtgttcctgaatggataccatgggggtacctccagaacatttgcatgtggacaagtggatgattctatcaaacattttctcaatgcagctgaagaatgcttggagaaaggcatttctatctgcagggatggtgtgaactacagaaagattggcaagaaaataagcaagcttgcctatttttatggctattatgtggtggaacgctttgttgggcatgggattggaactatgtatcattctgagccactaattctacatcatggtgggtaccatttttgacatttaaacctactttagtattggcattttgttttatcatacaataataattcatggagtgtggcttctcgtattgctagatttactggtttcgtgttcagatgtcctaaattttcaattccatcgcttgctaggcacattggcttctttagactgacaatatgtggtactaaacattttagctacatgtatgcttaaattatcactggcaagatggaaacgtcttatttccttgcagaactgtctacgctgtcattataagccagtttatcttgatttacactggttagaccattgaaatccagggatcaatgaaacccccatgaccaatccaggtttgaaagctggcatgaacttcttgagaacaaaatcagtgggatgtctctcttgcctagttgagttttttggggggtcagttgccataatgtcctgttgaaatcatgcttgaattttagtatacatgagattaatgaattcttgattttgtagccaacgaaaactcagggcgtatggttgagggccaaacatttacaattgaacctatactcacaatggagaaaacagagtgtgttacatgggaagatggatggacgactgtcactgctgatggtagctgggctgcgcagtttgagcataccatactggtgactagggacggtgcagaaatactgacgaaagtctgagctattctcctgcccgataattattgtcagaagtgagtcatccattttcccagcgcgatggttcagagttttgagatctgctgcaggccgacatacgggaaaggtttcccccatgtagcagcaacttgcaggtgataggtgagggcacacacacacacagagacacggctgcatctctgtgattaacacattactggtctcctgcagcctgctgtagtggtgttgctgtgcctttggattctagaagacattctgtatataaaacagcactcctaacagttcagtctagaacctagaagtagaaactgttattgttatgatacggaagcactttaggggaacagttggagacacatttttatgtttttcaaaaaaaaaatgatttagaaaagacttatagggagctcttggaaatgctctaataaaaacatctcctaaaattttgtttttggacgtataacattacaagccatgtccaacagatcccagtgtgtgctcccaatttgacggtgtcccaaaatcagacctcttttggcgtaaattttagcacacatacggacgctcccaatctttttttttaaaaaaaattggtctacggccccgcagctagaccccagcacaccgcccccgggatcttcgg

SEQ ID NO: 22480 - DNA, 5083 bp, Zea Mays
accttttgctctttaagatgtttatcagtactccgtcgacaaagctctggcagaagttatacgctaattcaattctgatgtaccagcagcagtcggcaataatctcacccttccatggaccaagctcatcgtcctcccggaggagagagaaagagagcagcaaaagtagactgatagccgtagtggttggtgcaagtcgctaggagagagaagagatagggataggaagagagagtgtgtggaagctagggaagagagagagagggaggggagatgcacacgcagagacgcaagcgatagaattgctaaacaaacaaaaaaaaaaaggcgagcaagagagagagagagaaggcaggcgaaccaaaccccaaggaggccaagacgcggacggcagcaggcaggcagccatgccgcggtcgccgtcaccatcgccgtcgccatccccatcgccggagaggcgccagaaccagcaccagcccgcgcgccggagggccgccgccgcctcgtcccagatgctgctgctccaccaccaccaccgcggcggcggcggccgctcgccgtcgccgccgccccgccgctcgctccgcccgcgccgcgccgccgccccctcctcccgcccgctcgtcgacgacttcttccccttcccctcctcgccgtcctcctcaccctctcgcccccgccagcgggggctgtcgccggagccgtccagctccgactccggatgcgacggtggcgccgccggctcctcggtctccgaccggcgccggcgcaagctcaagctcgtcgtcaagctctctcagctgcccccggaccagaatcaccgccgggccccactccccccacagtactctgacggctccgacggggctgatgacctggccggggacggaagcggcgacgaggagcaggtcaagccgcccaagaagcgccggatcgagccgcgcgccgacagatctcgccatcgcgaggttgttgctggtggtaggagcgaccccgcgagcgcgccgcggacgaagcggtcttcggtgccagggacagcgaggacgacgccactgccggaccggaaggcgctggagatgattctcgagaaacttcaaaagaaggatacatatggagtgtttgcggagcctgtggatccagaggagctgcctgattaccacgatgtgattgagcacccaatggacttcagcaccgtcaggaagaagcttgccaggaatgcatatcgctcgttcgagcaatttgaggatgatgtattcttaatttgcagcaacgcgatgcagtacaatgcacctgatacaatttatttcagacaggctcattccatacaagagctggcaagaaagaagtttcaggaactgagggatgaaggcatacctacagaaaatccgataaagagtgaacagaaaagtagaccaaatttctgcagtggagaacaggttaaaaaacctgttttgaggtatctggatgatgatctagacttcctgtcccgcaaagatcaagataaaagatccaattcaaataatgtgaatgatgacatgagcttcaacggtcatgttaagaaaaccttgtccaagaatgcaccggatcaaagttgcttattacagaaagagcggattaataaacccatctccagaaattcagaggacaatttaagttcctcattccacaaaaagcagcgtaagaaactgatctccagacattcggaggacgacctgaactgcccatctggcagagaccgagctaggaaagtcatttcaaaaaattcagaaaatgatgaaaactcccctttccacaaacatcaagtcaagaagtcagctccgcagagatcaatcgatggtctctcattccaggaaaagcacattaagaagccaattgatggaaatggagaagatccaggtttttcatcctgcaaaagacgcatcgaggatcccttttgcacaaatgttgaagatgcaagcttctcatctacgaaaaggctgtctgagaagcccatgtctgagaagcccatcagtataaacaaagaagaggaccttgaccattgccaccaggaatcatctaagaaacctagttgcagagttgagcaagatgatcatggttactcatgtgatgaagaggctgttaaaaagccgggttgtatggatagccacgatgcccaaggttcagatatctctgctgcaactattgcttctgttggagatggctctaatggtttaagcatgccacagcctaataattctgaacctactggttgtactgtcgccaatggggttatagacaaagatatcagctctccactagatgaaataagatctgagaagactgacgatattttggccaagcctagctacaagacaattgtggtagatgagaacagacggaaaacttatgatgcatctgaaggacagtctccaatggaatctgatccagtttttgatgttttctctgcggaaccaaaagagctcgtgaatgttggccttgatgctgaacactcatatgcatatgcaaggagtctggctcgttttgctggttcatttggcgctcaaggctggagaattgcttctgaccgcattcggcaagcattacctgctgatgtaaagtatggtcgtggttgggttggagaatatgagcccccattactgcctattcttgttgtgaatgatcaacctagatacctgaagagctctgagacaaatagacaaaggaatgcttctctgcctagggataatgaaaggctcagatcaacagaaacaaataatccgaaggatatgagacggatgaccactgacaacaatgtagttggagtgcctggacaattagacagtccagaatttaagccaagattatttggtgtttccaatgagcttcaacacaggagcacaggcacattatcactgcatgagaaccatagagtatctggtaatgttgcgaaaaccaaaagaacaaccaatgagaaaacgagaaaaggcacttcatcttccagtgcccgacctcgtgaaatgcagctacagaaaggagcttcttctggtgcacttgataaccttgcctcaaacaaaatggctggccagcctagaccgtttttgcaaccaccagaatcaaatagaacccagccaatgagaaaaattgactcatcaaaaaacaaaattccaattgaaatggcaccacagcaagttgagtgtgcaaaaggtgctgcttctggtgtgcatgacactcctttgtcagatgggcagcctaaacacttcttccagtcacaagcagcagcttcctctggtgtgcatgatatgcattcctctaatgggcagcctaaacactacttccagtcacaagcagcagcttcctctgatatgcatgctatgccttcctcaaatgggcagcctaaacactacttcaagtcacacgcagcagtttcctctgtcgtgcatgatatgccttcctccaatgggcagcctaaacaaattttccagtcacaagcagtagcttcttctggtgggcatgatatgccctcaaatgggcagtctaaacccttgttccagtcccaagaagcaactatactacagcccaaaaatgaagcaacgtgggtgtaccatggacgacctggtgatggaaaggttggaacatcaaacaaaagcagaccatcgaccagtattgggttcatcaataaaaatcatcaatcagtaaatgctgcaacttttgccatgaatttgaatggacagaagattgtcagtgaccatgcaaaatcagcaggcacaactgcaatgcctgtccaggtaaatataccaaacagaggtcttgatgctcctcggaacatgttctcagcatttccagctgctgttagggagaaccatagcattccaccagctccaatggctcaatcttggatttcatttggtgctactacagagaacaaaccaaccattgtcagcccaacttcccttgacaataattgtggctggaaaatgccatttgctaacgtccaaccttctgatgataccaaaataaatgccgttcctcagttatttaggcatcctgtccaggtagctagagagaactcggttcaaagcaagggtttggtaatatttccccagttggtgcagccagatttcgcgagatcacaagggcaaccacagtggcaggggctggttccccacatgcaacagaagccaggcaaggatgtactccgcccggacttgaacatcgggttcccatctccacgttcaccaccagcccgacaatcgtctggcatcaatttggaagcacagcagccagaccttgctttgcagttatgagctggggatagacactaccgggatttatgctataatctctaagcatgtaaaggcacgatgagctgaggtgtgaaagaaagcgaggacaattgggacatccggtacagggatcggtgatgatcgattgggatgtaggccttacatgccacatggcatcatcgcagctcatcaactcatcgcgtcgctgtacaaaagatatcagaaaatggatggatggacactgcttgaaatgagatcatgtctactgggggcattgtgataggagttcaaatcccagcattcggagaaatgctttgggagtttgggtggcatacatgtaggtagcatactagcaatgcccatgatcagaatactttggaggaacctctctgaccacaatacagctttcttcggtggaaattttggcaccagaatttaggctttcatttggtagtgtagacccctgtgtaatgcccgtatcgaaatgtatgttggttgtaaatggttttgcgttgaatagattgttagagtagggcagtggggagtggcctttacccccgtcttctgaatgaaattgcttcttttgtccatgatgtatgtagtagcaggaagccaggaactgaggtctgtgccctattcagttcaaatggcatgctgaagctaaaaaaggttgccaattctctcgttgcgatgcactgattcgtttgtccttgcatttgattctagccttgaagctgggatgtcattaatgatgagcaacgccaggcatgactttgctgataaactcttattcactggacataagtttgtttgaaactgga

SEQ ID NO: 22481 - DNA, 3847 bp, Zea Mays
tcgtatatgatgatgtattcttaatttgcagcaacgcgatgcagtacaatgcacctgatacaatttatttcagacaggctcattccatacaagagctggcaagaaagaagtttcaggaactgagggatgaaggcatacctacagaaaatccgataaagagtgaacagaaaagtagaccaaatttctgcagtggagaacaggttaaaaaacctgttttgaggtatctggatgatgatctagacttcctgtcccgcaaagatcaagataaaagatccaattcaaataatgtgaatgatgacatgagcttcaacggtcatgttaagaaaaccttgtccaagaatgcaccggatcaaagttgcttattacagaaagagcggattaataaacccatctccagaaattcagaggacaatttaagttcctcattccacaaaaagcagcgtaagaaactgatctccagacattcggaggacgacctgaactgcccatctggcagagaccgagctaggaaagtcatttcaaaaaattcagaaaatgatgaaaactcccctttccacaaacatcaagtcaagaagtcagctccgcagagatcaatcgatggtctctcattccaggaaaagcacattaagaagccaattgatggaaatggagaagatccaggtttttcatcctgcaaaagacgcatcgaggatcccttttgcacaaatgttgaagatgcaagcttctcatctacgaaaaggctgtctgagaagcccatgtctgagaagcccatcagtataaacaaagaagaggaccttgaccattgccaccaggaatcatctaagaaacctagttgcagagttgagcaagatgatcatggttactcatgtgatgaagaggctgttaaaaagccgggttgtatggatagccacgatgcccaaggttcagatatctctgctgcaactattgcttctgttggagatggctctaatggtttaagcatgccacagcctaataattctgaacctactggttgtactgtcgccaatggggttatagacaaagatatcagctctccactagatgaaataagatctgagaagactgacgatattttggccaagcctagctacaagacaattgtggtagatgagaacagacggaaaacttatgatgcatctgaaggacagtctccaatggaatctgatccagtttttgatgttttctctgcggaaccaaaagagctcgtgaatgttggccttgatgctgaacactcatatgcatatgcaaggagtctggctcgttttgctggttcatttggcgctcaaggctggagaattgcttctgaccgcattcggcaagcattacctgctgatgtaaagtatggtcgtggttgggttggagaatatgagcccccattactgcctattcttgttgtgaatgatcaacctagatacctgaagagctctgagacaaatagacaaaggaatgcttctctgcctagggataatgaaaggctcagatcaacagaaacaaataatccgaaggatatgagacggatgaccactgacaacaatgtagttggagtgcctggacaattagacagtccagaatttaagccaagattatttggtgtttccaatgagcttcaacacaggagcacaggcacattatcactgcatgagaaccatagagtatctggtaatgttgcgaaaaccaaaagaacaaccaatgagaaaacgagaaaaggcacttcatcttccagtgcccgacctcgtgaaatgcagctacagaaaggagcttcttctggtgcacttgataaccttgcctcaaacaaaatggctggccagcctagaccgtttttgcaaccaccagaatcaaatagaacccagccaatgagaaaaattgactcatcaaaaaacaaaattccaattgaaatggcaccacagcaagttgagtgtgcaaaaggtgctgcttctggtgtgcatgacactcctttgtcagatgggcagcctaaacacttcttccagtcacaagcagcagcttcctctggtgtgcatgatatgcattcctctaatgggcagcctaaacactacttccagtcacaagcagcagcttcctctgatatgcatgctatgccttcctcaaatgggcagcctaaacactacttcaagtcacacgcagcagtttcctctgtcgtgcatgatatgccttcctccaatgggcagcctaaacaaattttccagtcacaagcagtagcttcttctggtgggcatgatatgccctcaaatgggcagtctaaacccttgttccagtcccaagaagcaactatactacagcccaaaaatgaagcaacgtgggtgtaccatggacgacctggtgatggaaaggttggaacatcaaacaaaagcagaccatcgaccagtattgggttcatcaataaaaatcatcaatcagtaaatgctgcaacttttgccatgaatttgaatggacagaagattgtcagtgaccatgcaaaatcagcaggcacaactgcaatgcctgtccaggtaaatataccaaacagaggtcttgatgctcctcggaacatgttctcagcatttccagctgctgttagggagaaccatagcattccaccagctccaatggctcaatcttggatttcatttggtgctactacagagaacaaaccaaccattgtcagcccaacttcccttgacaataattgtggctggaaaatgccatttgctaacgtccaaccttctgatgataccaaaataaatgccgttcctcagttatttaggcatcctgtccaggtagctagagagaactcggttcaaagcaagggtttggtaatatttccccagttggtgcagccagatttcgcgagatcacaagggcaaccacagtggcaggggctggttccccacatgcaacagaagccaggcaaggatgtactccgcccggacttgaacatcgggttcccatctccacgttcaccaccagcccgacaatcgtctggcatcaatttggaagcacagcagccagaccttgctttgcagttatgagctggggatagacactaccgggatttatgctataatctctaagcatgtaaaggcacgatgagctgaggtgtgaaagaaagcgaggacaattgggacatccggtacagggatcggtgatgatcgattgggatgtaggccttacatgccacatggcatcatcgcagctcatcaactcatcgcgtcgctgtacaaaagatatcagaaaatggatggatggacactgcttgaaatgagatcatgtctactgggggcattgtgataggagttcaaatcccagcattcggagaaatgctttgggagtttgggtggcatacatgtaggtagcatactagcaatgcccatgatcagaatactttggaggaacctctctgaccacaatacagctttcttcggtggaaattttggcaccagaatttaggctttcatttggtagtgtagacccctgtgtaatgcccgtatcgaaatgtatgttggttgtaaatggttttgcgttgaatagattgttagagtagggcagtggggagtggcctttacccccgtcttctgaatgaaattgcttcttttgtccatgatgtatgtagtagcaggaagccaggaactgaggtctgtgccctattcagttcaaatggcatgctgaagctaaaaaaggttgccaattctctcgttgcgatgcactgattcgtttgtccttgcatttgattctagccttgaagctgggatgtcattaatgatgagcaacgccaggcatgactttgctgataaactcttattcactggacataagtttgtttgaaactgga

SEQ ID NO: 22482 - DNA, 3582 bp, Zea Mays
gcctcctacctggctacctgtccgctgccggtggggccgcgcaccttctcgcgcgcggacgcggctggcggttcgagttccctccaaagcagccttcctttcggcgggggcagctcgcagctcgctccccctcttctttatcactcgccaatcgccgcagcgcagcgaagatgcacagagcggccgcctcaccgctccgacacagcctccgccgcctctcctcctgctccgcggctacccctctcgtttgggctgcccgcttcttcgtgccctgctccgagagtcgtctccccgcgttcacctcgtctcgcttcctccggtcggcggcggctgcgccgtgccggtgttgctcaggcgctgcgatcaccgagcggcctgcgtctgcgtggcgcggagtcgccaccatggccgatggtagtagccgcttcgggcatgtcctcacaagcctcccaaagcccggtggtggagagtacgggaagtactatagcttaccagccctgaatgatcgtaggatagaaagattgccatactctatccggtatctactggagtcagccatccgcaactgtgacggttttcagattacagagaaggatgtcgaaaatatcattgactgggagaataccgctcccaagctagtggagatacccttcaagcctgcccgtgtgcttctgcaggattttaccggtgtcccagctatcgttgatcttgcaagcatgcgtgatgctatggcccgactgggtgatgatcctggaaagattgatcccctgattccagtggatctagtcattgatcattcggtacaagctgatgtggtaagatcagagaatgccctccaagctaatatgcagcgcgaattcgataggaacaaggagcgcttcgctttccttcggtggggctctgtggcattcaataatatgcttattgttccaccaggttcaggaattgttcatcaggtgaatcttgaatatcttggacgagttgttttcaataccgatggcattttatatcttgatagcgtgctgggaacagattctcacactactatgattgatggaatgggggttgcaggctggggtgttgggggaattgaagcagaagcaacaatgcttggtcagccaatgagcatggtcttgcccagtgtagttggatttaaactgtcagggaaattgcgtgatggtgttactgcaaccgatctagtattgacagtgacacatattcttaggaagcatggtgttgttggcaaatttgttgagttttatggcgagggaatgagtgagttagcagttgctaacagggcaacaattgctaacatgtcaccagaatacggtgcaacaatgggcttcttccctgttgatcatgtgacccttggatacctgaagctgacagggagaagtgatgaaaaggttgagatggtggaggcatatcttcgagctaacaatatgtttgttgattacaacgagactcaaacagaaagagtttactcatcttatctagagttagatttagcagacgttgaaccatgtgtttcaggcccgaaaagacctcatgaccatgttgctctgaaagatatgaaatcagactggcattcctgtctcggtaataaagttggttttaagggctttggtgtacctaaagagcaacatgataaattcgtcaagttcaccttccatggacaacctgcagagattagacatggtagcattgtgattgctgccataacaagttgcacaaacacatcaaatccaagtgtcatgcttggcgctggccttgttgcaaagaaggcgtgtgagcttggccttgagtcttgcgccaggatccggggcagtgaccaaatatctgctgaaaagtatttagatcatctaggtttcaacttaattggatatggttgcacaacatgcattggtaactcgggcgagcttgatgaagatgttgctaaggcagttaccgacaacggtaacttattgcttattaactagccagatttgcctgatattttttcatgctcgattgtacttcagaaaatgaaatcccatattctttggcatgcctttgtcagatatcattgcggctgcagtactctccggtaacaggaacttcgaagggcgaattcatgcattggttcgggccaattatcttgcctcccctcctctggttgtggcctatgcccttgctggcactgtttatattgattttgagacggaaccaattgggaaaggaaaagatggaacggatgtgtactttaaggacatatggccatcaaatgaagaaattgcagaggttgagcaatcaagtgtgctgcctgacatgttcaggagcacctatgaagcaatcacgcagggcaacccaatgtggaaccagctgtcagttccaaaggcagaccgcttcccatgggaccccagttccacctacattcatgatcctccattcttcaaggatattacaccgactccgccaggtccatgcagcatagagaatgcctattgcctgctgaagtttggtgacagcatcacgaccgaccacatctcaccagctgggagcatccccagggacagccctgctggcaagtacctgcttgagcgtggtgtgcagccaaaggatttcaattcttatggaagccgtcggggcaacgatgaagtgatggcacgaggaacctttgcaaatatcaggattgtgaataggctgttaaatggagaagttggaccgaagacgattcacgtccctacaaacgagaagcttttcgtgttcgatgctgcaatgagatacaaagctgatgggcatcacaccatagtgttggctggagaggaatatggcagtggaagttctcgggattgggctgccaaggggccaatgttactgggggtcaaagcagtaattgccaagagtttcgagaggatccaccgcagcaaccttgtaggaatgggagtgttaccgctgtgtttcaaacctggtgaggatgctgattctctggggctcaccggtcatgagcgctacacgataaggctccctaccaatgtgagcgagatacaaccgggccaagatgtccaggtgctcagtgacactgggaagtcattcacctgcaagctccggattgatacaatggtggagctggcttacttcgatcatggcgggatccttcactacgttttgaggaacctggtgaggcagcaacagcagtaaaacgctaaaaccgcatgcaaacatgtgaatatcttgtctgtttcgaaaaaggctatgataagaataaaattggactcaagaagaagccgatgtaaatgtccatgagatgagctgtggtgttttgtatagtaccctttttatgtgataataaaggtgcatttgtgtcatgtacgggcacaagtataggcgccgtcgtgacatcagacgcgcagctgagcgcgctgctcacgctacacaggatggcgccaccattagtggctgagatttcaaaatttaaacagcagattagtttccatttttcctaaatcaatagtttccttgctatgcctaaattataggagcagattagtttccctttttccccaaatcaatagtttcctttctattagtttccctttttac

SEQ ID NO: 22483 - DNA, 3396 bp, Zea Mays
gcctcctacctggctacctgtccgctgccggtggggccgcgcaccttctcgcgcgcggacgcggctggcggttcgagttccctccaaagcagccttcctttcggcgggggcagctcgcagctcgctccccctcttctttatcactcgccaatcgccgcagcgcagcgaagatgcacagagcggccgcctcaccgctccgacacagcctccgccgcctctcctcctgctccgcggctacccctctcgtttgggctgcccgcttcttcgtgccctgctccgagagtcgtctccccgcgttcacctcgtctcgcttcctccggtcggcggcggctgcgccgtgccggtgttgctcaggcgctgcgatcaccgagcggcctgcgtctgcgtggcgcggagtcgccaccatggccgatggtagtagccgcttcgggcatgtcctcacaagcctcccaaagcccggtggtggagagtacgggaagtactatagcttaccagccctgaatgatcgtaggatagaaagattgccatactctatccggtatctactggagtcagccatccgcaactgtgacggttttcagattacagagaaggatgtcgaaaatatcattgactgggagaataccgctcccaagctagtggagatacccttcaagcctgcccgtgtgcttctgcaggattttaccggtgtcccagctatcgttgatcttgcaagcatgcgtgatgctatggcccgactgggtgatgatcctggaaagattgatcccctgattccagtggatctagtcattgatcattcggtacaagctgatgtggtaagatcagagaatgccctccaagctaatatgcagcgcgaattcgataggaacaaggagcgcttcgctttccttcggtggggctctgtggcattcaataatatgcttattgttccaccaggttcaggaattgttcatcaggtgaatcttgaatatcttggacgagttgttttcaataccgatggcattttatatcttgatagcgtgctgggaacagattctcacactactatgattgatggaatgggggttgcaggctggggtgttgggggaattgaagcagaagcaacaatgcttggtcagccaatgagcatggtcttgcccagtgtagttggatttaaactgtcagggaaattgcgtgatggtgttactgcaaccgatctagtattgacagtgacacatattcttaggaagcatggtgttgttggcaaatttgttgagttttatggcgagggaatgagtgagttagcagttgctaacagggcaacaattgctaacatgtcaccagaatacggtgcaacaatgggcttcttccctgttgatcatgtgacccttggatacctgaagctgacagggagaagtgatgaaaaggttgagatggtggaggcatatcttcgagctaacaatatgtttgttgattacaacgagactcaaacagaaagagtttactcatcttatctagagttagatttagcagacgttgaaccatgtgtttcaggcccgaaaagacctcatgaccatgttgctctgaaagatatgaaatcagactggcattcctgtctcggtaataaagttggttttaagggctttggtgtacctaaagagcaacatgataaattcgtcaagttcaccttccatggacaacctgcagagattagacatggtagcattgtgattgctgccataacaagttgcacaaacacatcaaatccaagtgtcatgcttggcgctggccttgttgcaaagaaggcgtgtgagcttggccttgaggttaatccatggattaaaactagtcttgcgccaggatccggggcagtgaccaaatatctgctgaaaagatatcattgcggctgcagtactctccggtaacaggaacttcgaagggcgaattcatgcattggttcgggccaattatcttgcctcccctcctctggttgtggcctatgcccttgctggcactgtttatattgattttgagacggaaccaattgggaaaggaaaagatggaacggatgtgtactttaaggacatatggccatcaaatgaagaaattgcagaggttgagcaatcaagtgtgctgcctgacatgttcaggagcacctatgaagcaatcacgcagggcaacccaatgtggaaccagctgtcagttccaaaggcagaccgcttcccatgggaccccagttccacctacattcatgatcctccattcttcaaggatattacaccgactccgccaggtccatgcagcatagagaatgcctattgcctgctgaagtttggtgacagcatcacgaccgaccacatctcaccagctgggagcatccccagggacagccctgctggcaagtacctgcttgagcgtggtgtgcagccaaaggatttcaattcttatggaagccgtcggggcaacgatgaagtgatggcacgaggaacctttgcaaatatcaggattgtgaataggctgttaaatggagaagttggaccgaagacgattcacgtccctacaaacgagaagcttttcgtgttcgatgctgcaatgagatacaaagctgatgggcatcacaccatagtgttggctggagaggaatatggcagtggaagttctcgggattgggctgccaaggggccaatgttactgggggtcaaagcagtaattgccaagagtttcgagaggatccaccgcagcaaccttgtaggaatgggagtgttaccgctgtgtttcaaacctggtgaggatgctgattctctggggctcaccggtcatgagcgctacacgataaggctccctaccaatgtgagcgagatacaaccgggccaagatgtccaggtgctcagtgacactgggaagtcattcacctgcaagctccggattgatacaatggtggagctggcttacttcgatcatggcgggatccttcactacgttttgaggaacctggtgaggcagcaacagcagtaaaacgctaaaaccgcatgcaaacatgtgaatatcttgtctgtttcgaaaaaggctatgataagaataaaattggactcaagaagaagccgatgtaaatgtccatgagatgagctgtggtgttttgtatagtaccctttttatgtgataataaaggtgcatttgtgtcatgtacgggcacaagtataggcgccgtcgtgacatcagacgcgcagctgagcgcgctgctcacgctacacaggatggcgccaccattagtggctgagatttcaaaatttaaacagcagattagtttccatttttcctaaatcaatagtttccttgctatgcctaaattataggagcagattagtttccctttttccccaaatcaatagtttcctttctattagtttccctttttac

SEQ ID NO: 22484 - DNA, 3521 bp, Zea Mays
gcctcctacctggctacctgtccgctgccggtggggccgcgcaccttctcgcgcgcggacgcggctggcggttcgagttccctccaaagcagccttcctttcggcgggggcagctcgcagctcgctccccctcttctttatcactcgccaatcgccgcagcgcagcgaagatgcacagagcggccgcctcaccgctccgacacagcctccgccgcctctcctcctgctccgcggctacccctctcgtttgggctgcccgcttcttcgtgccctgctccgagagtcgtctccccgcgttcacctcgtctcgcttcctccggtcggcggcggctgcgccgtgccggtgttgctcaggcgctgcgatcaccgagcggcctgcgtctgcgtggcgcggagtcgccaccatggccgatggtagtagccgcttcgggcatgtcctcacaagcctcccaaagcccggtggtggagagtacgggaagtactatagcttaccagccctgaatgatcgtaggatagaaagattgccatactctatccggtatctactggagtcagccatccgcaactgtgacggttttcagattacagagaaggatgtcgaaaatatcattgactgggagaataccgctcccaagctagtggagatacccttcaagcctgcccgtgtgcttctgcaggattttaccggtgtcccagctatcgttgatcttgcaagcatgcgtgatgctatggcccgactgggtgatgatcctggaaagattgatcccctgattccagtggatctagtcattgatcattcggtacaagctgatgtggtaagatcagagaatgccctccaagctaatatgcagcgcgaattcgataggaacaaggagcgcttcgctttccttcggtggggctctgtggcattcaataatatgcttattgttccaccaggttcaggaattgttcatcaggtgaatcttgaatatcttggacgagttgttttcaataccgatggcattttatatcttgatagcgtgctgggaacagattctcacactactatgattgatggaatgggggttgcaggctggggtgttgggggaattgaagcagaagcaacaatgcttggtcagccaatgagcatggtcttgcccagtgtagttggatttaaactgtcagggaaattgcgtgatggtgttactgcaaccgatctagtattgacagtgacacatattcttaggaagcatggtgttgttggcaaatttgttgagttttatggcgagggaatgagtgagttagcagttgctaacagggcaacaattgctaacatgtcaccagaatacggtgcaacaatgggcttcttccctgttgatcatgtgacccttggatacctgaagctgacagggagaagtgatgaaaaggttgagatggtggaggcatatcttcgagctaacaatatgtttgttgattacaacgagtttcagactcaaacagaaagagtttactcatcttatctagagttagatttagcagacgttgaaccatgtgtttcaggcccgaaaagacctcatgaccatgttgctctgaaagatatgaaatcagactggcattcctgtctcggtaataaagttggttttaagggctttggtgtacctaaagagcaacatgataaattcgtcaagttcaccttccatggacaacctgcagagattagacatggtagcattgtgattgctgccataacaagttgcacaaacacatcaaatccaagtgtcatgcttggcgctggccttgttgcaaagaaggcgtgtgagcttggccttgaggttaatccatggattaaaactagtcttgcgccaggatccggggcagtgaccaaatatctgctgaaaagtggcttgcaaaagtatttagatcatctaggtttcaacttaattggatatggttgcacaacatgcattggtaactcgggcgagcttgatgaagatgttgctaaggcagttaccgacaacgatatcattgcggctgcagtactctccggtaacaggaacttcgaagggcgaattcatgcattggttcgggccaattatcttgcctcccctcctctggttgtggcctatgcccttgctggcactgtttatattgattttgagacggaaccaattgggaaaggaaaagatggaacggatgtgtactttaaggacatatggccatcaaatgaagaaattgcagaggttgagcaatcaagtgtgctgcctgacatgttcaggagcacctatgaagcaatcacgcagggcaacccaatgtggaaccagctgtcagttccaaaggcagaccgcttcccatgggaccccagttccacctacattcatgatcctccattcttcaaggatattacaccgactccgccaggtccatgcagcatagagaatgcctattgcctgctgaagtttggtgacagcatcacgaccgaccacatctcaccagctgggagcatccccagggacagccctgctggcaagtacctgcttgagcgtggtgtgcagccaaaggatttcaattcttatggaagccgtcggggcaacgatgaagtgatggcacgaggaacctttgcaaatatcaggattgtgaataggctgttaaatggagaagttggaccgaagacgattcacgtccctacaaacgagaagcttttcgtgttcgatgctgcaatgagatacaaagctgatgggcatcacaccatagtgttggctggagaggaatatggcagtggaagttctcgggattgggctgccaaggggccaatgttactgggggtcaaagcagtaattgccaagagtttcgagaggatccaccgcagcaaccttgtaggaatgggagtgttaccgctgtgtttcaaacctggtgaggatgctgattctctggggctcaccggtcatgagcgctacacgataaggctccctaccaatgtgagcgagatacaaccgggccaagatgtccaggtgctcagtgacactgggaagtcattcacctgcaagctccggattgatacaatggtggagctggcttacttcgatcatggcgggatccttcactacgttttgaggaacctggtgaggcagcaacagcagtaaaacgctaaaaccgcatgcaaacatgtgaatatcttgtctgtttcgaaaaaggctatgataagaataaaattggactcaagaagaagccgatgtaaatgtccatgagatgagctgtggtgttttgtatagtaccctttttatgtgataataaaggtgcatttgtgtcatgtacgggcacaagtataggcgccgtcgtgacatcagacgcgcagctgagcgcgctgctcacgctacacaggatggcgccaccattagtggctgagatttcaaaatttaaacagcagattagtttccatttttcctaaatcaatagtttccttgctatgcctaaattataggagcagattagtttccctttttccccaaatcaatagtttcctttctattagtttccctttttac

SEQ ID NO: 22485 - DNA, 3400 bp, Zea Mays
gcctcctacctggctacctgtccgctgccggtggggccgcgcaccttctcgcgcgcggacgcggctggcggttcgagttccctccaaagcagccttcctttcggcgggggcagctcgcagctcgctccccctcttctttatcactcgccaatcgccgcagcgcagcgaagatgcacagagcggccgcctcaccgctccgacacagcctccgccgcctctcctcctgctccgcggctacccctctcgtttgggctgcccgcttcttcgtgccctgctccgagagtcgtctccccgcgttcacctcgtctcgcttcctccggtcggcggcggctgcgccgtgccggtgttgctcaggcgctgcgatcaccgagcggcctgcgtctgcgtggcgcggagtcgccaccatggccgatggtagtagccgcttcgggcatgtcctcacaagcctcccaaagcccggtggtggagagtacgggaagtactatagcttaccagccctgaatgatcgtaggatagaaagattgccatactctatccggtatctactggagtcagccatccgcaactgtgacggttttcagattacagagaaggatgtcgaaaatatcattgactgggagaataccgctcccaagctagtggagatacccttcaagcctgcccgtgtgcttctgcaggattttaccggtgtcccagctatcgttgatcttgcaagcatgcgtgatgctatggcccgactgggtgatgatcctggaaagattgatcccctgattccagtggatctagtcattgatcattcggtacaagctgatgtggtaagatcagagaatgccctccaagctaatatgcagcgcgaattcgataggaacaaggagcgcttcgctttccttcggtggggctctgtggcattcaataatatgcttattgttccaccaggttcaggaattgttcatcaggctggggtgttgggggaattgaagcagaagcaacaatgcttggtcagccaatgagcatggtcttgcccagtgtagttggatttaaactgtcagggaaattgcgtgatggtgttactgcaaccgatctagtattgacagtgacacatattcttaggaagcatggtgttgttggcaaatttgttgagttttatggcgagggaatgagtgagttagcagttgctaacagggcaacaattgctaacatgtcaccagaatacggtgcaacaatgggcttcttccctgttgatcatgtgacccttggatacctgaagctgacagggagaagtgatgaaaaggttgagatggtggaggcatatcttcgagctaacaatatgtttgttgattacaacgagactcaaacagaaagagtttactcatcttatctagagttagatttagcagacgttgaaccatgtgtttcaggcccgaaaagacctcatgaccatgttgctctgaaagatatgaaatcagactggcattcctgtctcggtaataaagttggttttaagggctttggtgtacctaaagagcaacatgataaattcgtcaagttcaccttccatggacaacctgcagagattagacatggtagcattgtgattgctgccataacaagttgcacaaacacatcaaatccaagtgtcatgcttggcgctggccttgttgcaaagaaggcgtgtgagcttggccttgaggttaatccatggattaaaactagtcttgcgccaggatccggggcagtgaccaaatatctgctgaaaagtggcttgcaaaagtatttagatcatctaggtttcaacttaattggatatggttgcacaacatgcattggtaactcgggcgagcttgatgaagatgttgctaaggcagttaccgacaacgatatcattgcggctgcagtactctccggtaacaggaacttcgaagggcgaattcatgcattggttcgggccaattatcttgcctcccctcctctggttgtggcctatgcccttgctggcactgtttatattgattttgagacggaaccaattgggaaaggaaaagatggaacggatgtgtactttaaggacatatggccatcaaatgaagaaattgcagaggttgagcaatcaagtgtgctgcctgacatgttcaggagcacctatgaagcaatcacgcagggcaacccaatgtggaaccagctgtcagttccaaaggcagaccgcttcccatgggaccccagttccacctacattcatgatcctccattcttcaaggatattacaccgactccgccaggtccatgcagcatagagaatgcctattgcctgctgaagtttggtgacagcatcacgaccgaccacatctcaccagctgggagcatccccagggacagccctgctggcaagtacctgcttgagcgtggtgtgcagccaaaggatttcaattcttatggaagccgtcggggcaacgatgaagtgatggcacgaggaacctttgcaaatatcaggattgtgaataggctgttaaatggagaagttggaccgaagacgattcacgtccctacaaacgagaagcttttcgtgttcgatgctgcaatgagatacaaagctgatgggcatcacaccatagtgttggctggagaggaatatggcagtggaagttctcgggattgggctgccaaggggccaatgttactgggggtcaaagcagtaattgccaagagtttcgagaggatccaccgcagcaaccttgtaggaatgggagtgttaccgctgtgtttcaaacctggtgaggatgctgattctctggggctcaccggtcatgagcgctacacgataaggctccctaccaatgtgagcgagatacaaccgggccaagatgtccaggtgctcagtgacactgggaagtcattcacctgcaagctccggattgatacaatggtggagctggcttacttcgatcatggcgggatccttcactacgttttgaggaacctggtgaggcagcaacagcagtaaaacgctaaaaccgcatgcaaacatgtgaatatcttgtctgtttcgaaaaaggctatgataagaataaaattggactcaagaagaagccgatgtaaatgtccatgagatgagctgtggtgttttgtatagtaccctttttatgtgataataaaggtgcatttgtgtcatgtacgggcacaagtataggcgccgtcgtgacatcagacgcgcagctgagcgcgctgctcacgctacacaggatggcgccaccattagtggctgagatttcaaaatttaaacagcagattagtttccatttttcctaaatcaatagtttccttgctatgcctaaattataggagcagattagtttccctttttccccaaatcaatagtttcctttctattagtttccctttttac

SEQ ID NO: 22486 - DNA, 3863 bp, Zea Mays
gcctcctacctggctacctgtccgctgccggtggggccgcgcaccttctcgcgcgcggacgcggctggcggttcgagttccctccaaagcagccttcctttcggcgggggcagctcgcagctcgctccccctcttctttatcactcgccaatcgccgcagcgcagcgaagatgcacagagcggccgcctcaccgctccgacacagcctccgccgcctctcctcctgctccgcggctacccctctcgtttgggctgcccgcttcttcgtgccctgctccgagagtcgtctccccgcgttcacctcgtctcgcttcctccggtcggcggcggctgcgccgtgccggtgttgctcaggcgctgcgatcaccgagcggcctgcgtctgcgtggcgcggagtcgccaccatggccgatggtagtagccgcttcgggcatgtcctcacaagcctcccaaagcccggtggtggagagtacgggaagtactatagcttaccagccctgaatgatcgtaggatagaaagattgccatactctatccggtatctactggagtcagccatccgcaactgtgacggttttcagattacagagaaggatgtcgaaaatatcattgactgggagaataccgctcccaagctagtggagatacccttcaagcctgcccgtgtgcttctgcaggattttaccggtgtcccagctatcgttgatcttgcaagcatgcgtgatgctatggcccgactgggtgatgatcctggaaagattgatcccctgattccagtggatctagtcattgatcattcggtacaagctgatgtggtaagatcagagaatgccctccaagctaatatgcagcgcgaattcgataggaacaaggagcgcttcgctttccttcggtggggctctgtggcattcaataatatgcttattgttccaccaggttcaggaattgttcatcaggtgaatcttgaatatcttggacgagttgttttcaataccgatggcattttatatcttgatagcgtgctgggaacagattctcacactactatgattgatggaatgggggttgcaggctggggtgttgggggaattgaagcagaagcaacaatgcttggtcagccaatgagcatggtcttgcccagtgtagttggatttaaactgtcagggaaattgcgtgatggtgttactgcaaccgatctagtattgacagtgacacatattcttaggaagcatggtgttgttggcaaatttgttgagttttatggcgagggaatgagtgagttagcagttgctaacagggcaacaattgctaacatgtcaccagaatacggtgcaacaatgggcttcttccctgttgatcatgtgacccttggatacctgaagctgacagggagaagtgatgaaaaggttgagatggtggaggcatatcttcgagctaacaatatgtttgttgattacaacgagactcaaacagaaagagtttactcatcttatctagagttagatttagcagacgttgaaccatgtgtttcaggcccgaaaagacctcatgaccatgttgctctgaaagatatgaaatcagactggcattcctgtctcggtaataaagttggttttaagggctttggtgtacctaaagagcaacatgataaattcgtcaagttcaccttccatggacaacctgcagagattagacatggtagcattgtgattgctgccataacaagttgcacaaacacatcaaatccaagtgtcatgcttggcgctggccttgttgcaaagaaggcgtgtgagcttggccttgaggttaatccatggattaaaactagtcttgcgccaggatccggggcagtgaccaaatatctgctgaaaaggtagtgtttccgcccctccctagtggttttaaacctgaacaattgtttatcttcgaatcctgacttaagttgcaaaatcagtggcttgcaaaagtatttagatcatctaggtttcaacttaattggatatggttgcacaacatgcattggtaactcgggcgagcttgatgaagatgttgctaaggcagttaccgacaacgatatcattgcggctgcagtactctccggtaacaggaacttcgaagggcgaattcatgcattggttcgggccaattatcttgcctcccctcctctggttgtggcctatgcccttgctggcactgtttatattgattttgagacggaaccaattgggaaaggaaaagatggaacggatgtgtactttaaggacatatggccatcaaatgaagaaattgcagaggttgagcaatcaagtgtgctgcctgacatgttcaggagcacctatgaagcaatcacgcagggcaacccaatgtggaaccagctgtcagttccaaaggcagaccgcttcccatgggaccccagttccacctacattcatgatcctccattcttcaaggatattacaccgactccgccaggtccatgcagcatagagaatgcctattgcctgctgaagtttggtgacagcatcacgaccgaccacatctcaccagctgggagcatccccagggacagccctgctggcaagtacctgcttgagcgtggtgtgcagccaaaggatttcaattcttatggaagccgtcggggcaacgatgaagtgatggcacgaggaacctttgcaaatatcaggattgtgaataggctgttaaatggagaagttggaccgaagacgattcacgtccctacaaacgagaagcttttcgtgttcgatgctgcaatggtcagttcttcaccaagctacgtttctaccaacatactattcagcattatattaagacaaaaaaggcactcgattcgccttgtcagccaactgagctaggctcagttcactggattaattatgaaacataaagtgtccttttacctcatactaaccagacttgtcatttcaacaaataatgcatatgaacttgacatcattattcttgtcaacgagtatttctcttgtactcctattaggtcattacactggttatgcttatttcagagatacaaagctgatgggcatcacaccatagtgttggctggagaggaatatggcagtggaagttctcgggattgggctgccaaggggccaatgttactgggggtcaaagcagtaattgccaagagtttcgagaggatccaccgcagcaaccttgtaggaatgggagtgttaccgctgtgtttcaaacctggtgaggatgctgattctctggggctcaccggtcatgagcgctacacgataaggctccctaccaatgtgagcgagatacaaccgggccaagatgtccaggtgctcagtgacactgggaagtcattcacctgcaagctccggattgatacaatggtggagctggcttacttcgatcatggcgggatccttcactacgttttgaggaacctggtgaggcagcaacagcagtaaaacgctaaaaccgcatgcaaacatgtgaatatcttgtctgtttcgaaaaaggctatgataagaataaaattggactcaagaagaagccgatgtaaatgtccatgagatgagctgtggtgttttgtatagtaccctttttatgtgataataaaggtgcatttgtgtcatgtacgggcacaagtataggcgccgtcgtgacatcagacgcgcagctgagcgcgctgctcacgctacacaggatggcgccaccattagtggctgagatttcaaaatttaaacagcagattagtttccatttttcctaaatcaatagtttccttgctatgcctaaattataggagcagattagtttccctttttccccaaatcaatagtttcctttctattagtttccctttttac

SEQ ID NO: 22487 - DNA, 3496 bp, Zea Mays
gcctcctacctggctacctgtccgctgccggtggggccgcgcaccttctcgcgcgcggacgcggctggcggttcgagttccctccaaagcagccttcctttcggcgggggcagctcgcagctcgctccccctcttctttatcactcgccaatcgccgcagcgcagcgaagatgcacagagcggccgcctcaccgctccgacacagcctccgccgcctctcctcctgctccgcggctacccctctcgtttgggctgcccgcttcttcgtgccctgctccgagagtcgtctccccgcgttcacctcgtctcgcttcctccggtcggcggcggctgcgccgtgccggtgttgctcaggcgctgcgatcaccgagcggcctgcgtctgcgtggcgcggagtcgccaccatggccgatggtagtagccgcttcgggcatgtcctcacaagcctcccaaagcccggtggtggagagtacgggaagtactatagcttaccagccctgaatgatcgtaggatagaaagattgccatactctatccggtatctactggagtcagccatccgcaactgtgacggttttcagattacagagaaggatgtcgaaaatatcattgactgggagaataccgctcccaagctagtggagatacccttcaagcctgcccgtgtgcttctgcagctatcgttgatcttgcaagcatgcgtgatgctatggcccgactgggtgatgatcctggaaagattgatcccctgattccagtggatctagtcattgatcattcggtacaagctgatgtggtaagatcagagaatgccctccaagctaatatgcagcgcgaattcgataggaacaaggagcgcttcgctttccttcggtggggctctgtggcattcaataatatgcttattgttccaccaggttcaggaattgttcatcaggtgaatcttgaatatcttggacgagttgttttcaataccgatggcattttatatcttgatagcgtgctgggaacagattctcacactactatgattgatggaatgggggttgcaggctggggtgttgggggaattgaagcagaagcaacaatgcttggtcagccaatgagcatggtcttgcccagtgtagttggatttaaactgtcagggaaattgcgtgatggtgttactgcaaccgatctagtattgacagtgacacatattcttaggaagcatggtgttgttggcaaatttgttgagttttatggcgagggaatgagtgagttagcagttgctaacagggcaacaattgctaacatgtcaccagaatacggtgcaacaatgggcttcttccctgttgatcatgtgacccttggatacctgaagctgacagggagaagtgatgaaaaggttgagatggtggaggcatatcttcgagctaacaatatgtttgttgattacaacgagactcaaacagaaagagtttactcatcttatctagagttagatttagcagacgttgaaccatgtgtttcaggcccgaaaagacctcatgaccatgttgctctgaaagatatgaaatcagactggcattcctgtctcggtaataaagttggttttaagggctttggtgtacctaaagagcaacatgataaattcgtcaagttcaccttccatggacaacctgcagagattagacatggtagcattgtgattgctgccataacaagttgcacaaacacatcaaatccaagtgtcatgcttggcgctggccttgttgcaaagaaggcgtgtgagcttggccttgaggttaatccatggattaaaactagtcttgcgccaggatccggggcagtgaccaaatatctgctgaaaagtggcttgcaaaagtatttagatcatctaggtttcaacttaattggatatggttgcacaacatgcattggtaactcgggcgagcttgatgaagatgttgctaaggcagttaccgacaacgatatcattgcggctgcagtactctccggtaacaggaacttcgaagggcgaattcatgcattggttcgggccaattatcttgcctcccctcctctggttgtggcctatgcccttgctggcactgtttatattgattttgagacggaaccaattgggaaaggaaaagatggaacggatgtgtactttaaggacatatggccatcaaatgaagaaattgcagaggttgagcaatcaagtgtgctgcctgacatgttcaggagcacctatgaagcaatcacgcagggcaacccaatgtggaaccagctgtcagttccaaaggcagaccgcttcccatgggaccccagttccacctacattcatgatcctccattcttcaaggatattacaccgactccgccaggtccatgcagcatagagaatgcctattgcctgctgaagtttggtgacagcatcacgaccgaccacatctcaccagctgggagcatccccagggacagccctgctggcaagtacctgcttgagcgtggtgtgcagccaaaggatttcaattcttatggaagccgtcggggcaacgatgaagtgatggcacgaggaacctttgcaaatatcaggattgtgaataggctgttaaatggagaagttggaccgaagacgattcacgtccctacaaacgagaagcttttcgtgttcgatgctgcaatgagatacaaagctgatgggcatcacaccatagtgttggctggagaggaatatggcagtggaagttctcgggattgggctgccaaggggccaatgttactgggggtcaaagcagtaattgccaagagtttcgagaggatccaccgcagcaaccttgtaggaatgggagtgttaccgctgtgtttcaaacctggtgaggatgctgattctctggggctcaccggtcatgagcgctacacgataaggctccctaccaatgtgagcgagatacaaccgggccaagatgtccaggtgctcagtgacactgggaagtcattcacctgcaagctccggattgatacaatggtggagctggcttacttcgatcatggcgggatccttcactacgttttgaggaacctggtgaggcagcaacagcagtaaaacgctaaaaccgcatgcaaacatgtgaatatcttgtctgtttcgaaaaaggctatgataagaataaaattggactcaagaagaagccgatgtaaatgtccatgagatgagctgtggtgttttgtatagtaccctttttatgtgataataaaggtgcatttgtgtcatgtacgggcacaagtataggcgccgtcgtgacatcagacgcgcagctgagcgcgctgctcacgctacacaggatggcgccaccattagtggctgagatttcaaaatttaaacagcagattagtttccatttttcctaaatcaatagtttccttgctatgcctaaattataggagcagattagtttccctttttccccaaatcaatagtttcctttctattagtttccctttttac

SEQ ID NO: 22488 - DNA, 3498 bp, Zea Mays
gcctcctacctggctacctgtccgctgccggtggggccgcgcaccttctcgcgcgcggacgcggctggcggttcgagttccctccaaagcagccttcctttcggcgggggcagctcgcagctcgctccccctcttctttatcactcgccaatcgccgcagcgcagcgaagatgcacagagcggccgcctcaccgctccgacacagcctccgccgcctctcctcctgctccgcggctacccctctcgtttgggctgcccgcttcttcgtgccctgctccgagagtcgtctccccgcgttcacctcgtctcgcttcctccggtcggcggcggctgcgccgtgccggtgttgctcaggcgctgcgatcaccgagcggcctgcgtctgcgtggcgcggagtcgccaccatggccgatggtagtagccgcttcgggcatgtcctcacaagcctcccaaagcccggtggtggagagtacgggaagtactatagcttaccagccctgaatgatcgtaggatagaaagattgccatactctatccggtatctactggagtcagccatccgcaactgtgacggttttcagattacagagaaggatgtcgaaaatatcattgactgggagaataccgctcccaagctagtggagatacccttcaagcctgcccgtgtgcttctgcaggattttaccggtgtcccagctatcgttgatcttgcaagcatgcgtgatgctatggcccgactgggtgatgatcctggaaagattgatcccctgattccagtggatctagtcattgatcattcggtacaagctgatgtggtaagatcagagaatgccctccaagctaatatgcagcgcgaattcgataggaacaaggagcgcttcgctttccttcggtggggctctgtggcattcaataatatgcttattgttccaccaggttcaggaattgttcatcaggtgaatcttgaatatcttggacgagttgttttcaataccgatggcattttatatcttgatagcgtgctgggaacagattctcacactactatgattgatggaatgggggttgcaggctggggtgttgggggaattgaagcagaagcaacaatgcttggtcagccaatgagcatggtcttgcccagtgtagttggatttaaactgtcagggaaattgcgtgatggtgttactgcaaccgatctagtattgacagtgacacatattcttaggaagcatggtgttgttggcaaatttgttgagttttatggcgagggaatgagtgagttagcagttgctaacagggcaacaattgctaacatgtcaccagaatacggtgcaacaatgggcttcttccctgttgatcatgtgacccttggatacctgaagctgacagggagaagtgatgaaaaggttgagatggtggaggcatatcttcgagctaacaatatgtttgttgattacaacgagtttcagactcaaacagaaagagtttactcatcttatctagagttagatttagcagacgttgaaccatgtgtttcaggcccgaaaagacctcatgaccatgttgctctgaaagatatgaaatcagactggcattcctgtctcggtaataaagttggttttaagggctttggtgtacctaaagagcaacatgataaattcgtcaagttcaccttccatggacaacctgcagagattagacatggtagcattgtgattgctgccataacaagttgcacaaacacatcaaatccaagtgtcatgcttggcgctggccttgttgcaaagaaggcgtgtgagcttggccttgagtcttgcgccaggatccggggcagtgaccaaatatctgctgaaaagtggcttgcaaaagtatttagatcatctaggtttcaacttaattggatatggttgcacaacatgcattggtaactcgggcgagcttgatgaagatgttgctaaggcagttaccgacaacgatatcattgcggctgcagtactctccggtaacaggaacttcgaagggcgaattcatgcattggttcgggccaattatcttgcctcccctcctctggttgtggcctatgcccttgctggcactgtttatattgattttgagacggaaccaattgggaaaggaaaagatggaacggatgtgtactttaaggacatatggccatcaaatgaagaaattgcagaggttgagcaatcaagtgtgctgcctgacatgttcaggagcacctatgaagcaatcacgcagggcaacccaatgtggaaccagctgtcagttccaaaggcagaccgcttcccatgggaccccagttccacctacattcatgatcctccattcttcaaggatattacaccgactccgccaggtccatgcagcatagagaatgcctattgcctgctgaagtttggtgacagcatcacgaccgaccacatctcaccagctgggagcatccccagggacagccctgctggcaagtacctgcttgagcgtggtgtgcagccaaaggatttcaattcttatggaagccgtcggggcaacgatgaagtgatggcacgaggaacctttgcaaatatcaggattgtgaataggctgttaaatggagaagttggaccgaagacgattcacgtccctacaaacgagaagcttttcgtgttcgatgctgcaatgagatacaaagctgatgggcatcacaccatagtgttggctggagaggaatatggcagtggaagttctcgggattgggctgccaaggggccaatgttactgggggtcaaagcagtaattgccaagagtttcgagaggatccaccgcagcaaccttgtaggaatgggagtgttaccgctgtgtttcaaacctggtgaggatgctgattctctggggctcaccggtcatgagcgctacacgataaggctccctaccaatgtgagcgagatacaaccgggccaagatgtccaggtgctcagtgacactgggaagtcattcacctgcaagctccggattgatacaatggtggagctggcttacttcgatcatggcgggatccttcactacgttttgaggaacctggtgaggcagcaacagcagtaaaacgctaaaaccgcatgcaaacatgtgaatatcttgtctgtttcgaaaaaggctatgataagaataaaattggactcaagaagaagccgatgtaaatgtccatgagatgagctgtggtgttttgtatagtaccctttttatgtgataataaaggtgcatttgtgtcatgtacgggcacaagtataggcgccgtcgtgacatcagacgcgcagctgagcgcgctgctcacgctacacaggatggcgccaccattagtggctgagatttcaaaatttaaacagcagattagtttccatttttcctaaatcaatagtttccttgctatgcctaaattataggagcagattagtttccctttttccccaaatcaatagtttcctttctattagtttccctttttac

SEQ ID NO: 22489 - DNA, 3864 bp, Zea Mays
ctcaaacctgctctctcttcctcaactctctcaagctaccggcagaggctctccctctcggtgaaggcctggagcgcgactacaatctgcgtagtcgcggcccgacgctggcgcttgacaatttgtcacctgaagtttctttctcccacgatgatgcggcaggccggcagcagctgctctgcgttatttatgacatgtctgcactgagtagaaaaaaaaagaaacattgtttgcaactctggaattttattgctcttttgttggttaggaaacaccaagaaagtaattggcataagcgaagtgctcgtaagccaagactgaaacgaagacgaaggacgaaataatcgtcgtcgtgcctcagtccccttcaacccacactgccacatacgaggaacggatgtatcaggtgtgcgtatatacaaggattgaaccacacagtgacacagagcgacctccgccttctacactgcacgcccagttccatctcccgccgccgccgccgccgccgccgccgccagggcgtgcaccggtaccactcccagtcctgccaccgccggatgctcctccgccgcaccgccgccgcagcagcagcagcagcgaagcgctccacctctttaacccctgagcgagccctccgacacgtgggcgccgccggccgcggccacgccaccacctcgtcctcgaccccacgccgccgaggccatcggcgcgcgccgacggccgagtccgatcccctcacgtccaccgccgcgccccgtccattctcggactaccaccctccccggcctgactcgccggacgacgacgcccttgcgcgccgcctcgccgccgcggtgctcgcctcgcctcaccccacctcccttcctccactccccttcctgcccctactccgcccagttcacctccttctcgggctcccgctgctcgcctcccatccgcacctcaccggcctcctcctccctctcctcctcctcttcccctcccgcccccagcagcacccgcacccgcacctgctccgctgcttcgcagtcgctgctcacctcgccgtactacgcggcggcggcggcgccgcgcgcgccatcctctcgcgcgctgtccgcttcccctcccctcataggcatttcgtcgagcactacatctccacctacaagacattttcctcggaccccgcctccttcgacttcctcctcttgtgcctcccctctgcgcccctactgcgccgtcttcgccagtacggcatctccccgtccccggaggcctgcaacgccgtgctctcccgcctccctcttgacgaagccatcgagttgtttcaagaactcccgcacaagaatgtttgctcctacaatatactactcaaggcgctgtgtgatgctggccgtgtgaaggatgcacgccagctgttcgatgaaatggcttcagcgccagatgttgtcacgtatgggattctaatccatggacactgtgctcttggtgagctggagaatgcagtgaagctgttggatgaaatggtggcaggaggggtggagccaaatgcaactgtttatactagcgtcgttgcattattgtgtgacaaagggtggatttcagatgctttgagagttgtggaggatatggtccagcgaaaggtgatattggatgaggctctgtatacgactgtcttgagtggtttttgtaataaaggggatttggtatctgcaagaaggtggtttgatgagatgcaaagaaaaggtttggcaactgatggggtgacctacacaacgatgatcaatgggctttgtcgggctgttgagctggaagaggcagagaaattgcttcaggaaatgtgggccaggcggttggatgttgatgaagtaacatacacagtgctcattgatgggtactgcaagagagggaagatggcggaggcctttcagatgcataatgcaatggttcagagaggagtgacaccaaatgtagtgacatatacagctttgacagatggactatgcaagcaaggggatgttcaggccgctaacgagctattgcatgagatgtctaacaaggggcttgagctgaatgcttgcacatacaactccctgatcaatggcctatgcaaggcaggctatctggagcaggccatgaggactatggcagacatggatacagcatgtcttaaaccagacgtttacacatatacaactcttattgatgcgctctgcaagtcaggggaccttgacagggctcacagcctcttgcaagagatgttagataaaggaattaagccaactatagtgacttacaatgttttgatgaatggtttttgcatgtcaggcagggtagaaggaggaaagaagctgcttgattggatgctcgagaaaaacatacatccaaatgctgcaacttacaattctcttatgaagcagtactgcattgaaaataacatgaagtctaccaccgagatctataaggggatgcgttctcgagatgtagggccaaatgagaatacatacaatatattgatcaagggtcactgcaaggcaagaaatatgaaagaggcactatatttccacgatgaaatgatacagaagggtttcagacttactgcaacctcatacagtgctcttataagattgctgaataaaaagaagaaatttgttgaagcaagagaactgtttcatgatatgaggaaggagggtttgacagctgaatcagatgtatacgatttttatattgatctcaactttaatgaggacaatttggagtcgactcttgctctttgtgatgaactggtggaagccagtattgtgaaatcataaactgaaatggatcaagatgttgtaaaggaacatatacattaggaacataattttggctggttatgtcatgctagcttcttcaggattgtgtttgcatgcagtgtgaatacaagatccagagatagtactgttccttttcacgatgctaaaactggtaattgagggtaaaatcatgcctaatggtacaagagatattacacactggaacttcttggtgataatggatgggttacacactgaaaacggcatcagctattcacttgatgcaacaaaaggcatgttttcttctggtaatctttcagagaagcttcgcatgggacagctaaactgcagaaatgaggtggtggtggatttatttgctggaattggatactttgttcttctgtttcttgtgaaggctaatggcaagctattttatgcatgcgaagggaatccatatgctctggaggctctttggcgcaatgtattatacttgaaggagataaccgggtgactgcacccaaaatcgacgaagcgggtgacaagaccgaagtggccacagcttcaggtggttgagcgagaggcgaggggccacgctttcatcagatgatcagttgatcaccatcccttcccgctgcagacctctctgccgtagtttatcttgtactacactgattgaaatttcctccacgctttcttgtgttctttgtcatttccttcacttgcgcggtcaagatcatatcccaatcttgccgtcgatctggtttgttggttattagcaggggtgtaatgtatcacgattcaaatggttcttcacaaaaagttagttcatatattaatagaaatccttaaagtttataatataaaatctaaagctcattaccatcctactagattttttcttccgctgaccggtgaccatgtggagcaggctttgcattatgataatttcagttgtccgatccatggtgctaaaatttaggccctgtttgagaacaaagtttttgaaaaccacagtttttgaaatactacagtatactttagtcatgacaataccgcagtttacaataccacaattttgaaaactgag

SEQ ID NO: 22490 - DNA, 3808 bp, Zea Mays
ctcaaacctgctctctcttcctcaactctctcaagctaccggcagaggctctccctctcggtgaaggcctggagcgcgactacaatctgcgtagtcgcggcccgacgctggcgcttgacaatttgtcacctgaagtttctttctcccacgatgatgcggcaggccggcagcagctgctctgcgttatttatgacatgtctgcactgagtagaaaaaaaaagaaacattgtttgcaactctggaattttattgctcttttgttggttaggaaacaccaagaaagtaattggcataagcgaagtgctcgtaagccaagactgaaacgaagacgaaggacgaaataatcgtcgtcgtgcctcagtccccttcaacccacactgccacatacgaggaacggatgtatcaggtgtgcgtatatacaaggattgaaccacacagtgacacagagcgacctccgccttctacactgcacgcccagttccatctcccgccgccgccgccgccgccgccgccgccagggcgtgcaccggtaccactcccagtcctgccaccgccggatgctcctccgccgcaccgccgccgcagcagcagcagcagcgaagcgctccacctctttaacccctgagcgagccctccgacacgtgggcgccgccggccgcggccacgccaccacctcgtcctcgaccccacgccgccgaggccatcggcgcgcgccgacggccgagtccgatcccctcacgtccaccgccgcgccccgtccattctcggactaccaccctccccggcctgactcgccggacgacgacgcccttgcgcgccgcctcgccgccgcggtgctcgcctcgcctcaccccacctcccttcctccactccccttcctgcccctactccgcccagttcacctccttctcgggctcccgctgctcgcctcccatccgcacctcaccggcctcctcctccctctcctcctcctcttcccctcccgcccccagcagcacccgcacccgcacctgctccgctgcttcgcagtcgctgctcacctcgccgtactacgcggcggcggcggcgccgcgcgcgccatcctctcgcgcgctgtccgcttcccctcccctcataggcatttcgtcgagcactacatctccacctacaagacattttcctcggaccccgcctccttcgacttcctcctcttgtgcctcccctctgcgcccctactgcgccgtcttcgccagtacggcatctccccgtccccggaggcctgcaacgccgtgctctcccgcctccctcttgacgaagccatcgagttgtttcaagaactcccgcacaagaatgtttgctcctacaatatactactcaaggcgctgtgtgatgctggccgtgtgaaggatgcacgccagctgttcgatgaaatggcttcagcgccagatgttgtcacgtatgggattctaatccatggacactgtgctcttggtgagctggagaatgcagtgaagctgttggatgaaatggtggcaggaggggtggagccaaatgcaactgtttatactagcgtcgttgcattattgtgtgacaaagggtggatttcagatgctttgagagttgtggaggatatggtccagcgaaaggtgatattggatgaggctctgtatacgactgtcttgagtggtttttgtaataaaggggatttggtatctgcaagaaggtggtttgatgagatgcaaagaaaaggtttggcaactgatggggtgacctacacaacgatgatcaatgggctttgtcgggctgttgagctggaagaggcagagaaattgcttcaggaaatgtgggccaggcggttggatgttgatgaagtaacatacacagtgctcattgatgggtactgcaagagagggaagatggcggaggcctttcagatgcataatgcaatggttcagagaggagtgacaccaaatgtagtgacatatacagctttgacagatggactatgcaagcaaggggatgttcaggccgctaacgagctattgcatgagatgtctaacaaggggcttgagctgaatgcttgcacatacaactccctgatcaatggcctatgcaaggcaggctatctggagcaggccatgaggactatggcagacatggatacagcatgtcttaaaccagacgtttacacatatacaactcttattgatgcgctctgcaagtcaggggaccttgacagggctcacagcctcttgcaagagatgttagataaaggaattaagccaactatagtgacttacaatgttttgatgaatggtttttgcatgtcaggcagggtagaaggaggaaagaagctgcttgattggatgctcgagaaaaacatacatccaaatgctgcaacttacaattctcttatgaagcagtactgcattgaaaataacatgaagtctaccaccgagatctataaggggatgcgttctcgagatgtagggccaaatgagaatacatacaatatattgatcaagggtcactgcaaggcaagaaatatgaaagaggcactatatttccacgatgaaatgatacagaagggtttcagacttactgcaacctcatacagtgctcttataagattgctgaataaaaagaagaaatttgttgaagcaagagaactgtttcatgatatgaggaaggagggtttgacagctgaatcagatgtatacgatttttatattgatctcaactttaatgaggacaatttggagtcgactcttgctctttgtgatgaactggtggaagccagtattgtgaaatcataaactgaaatggatcaagatgttgtaaaggaacatatacattaggaacataattttggctggttatgtcatgctagcttcttcaggattgtgtttgcatgcagtgtgaatacaagatccagagatagtactgttccttttcacgatgctaaaactggtaattgagggtaaaatcatgcctaatggtacaagagatattacacactggaacttcttggtgataatggatgggttacacactgaaaacggcatcagctattcacttgatgcaacaaaaggcatgttttcttctggtaatctttcagagaagcttcgcatgggacagctaaactgcagaaatgagggctaatggcaagctattttatgcatgcgaagggaatccatatgctctggaggctctttggcgcaatgtattatacttgaaggagataaccgggtgactgcacccaaaatcgacgaagcgggtgacaagaccgaagtggccacagcttcaggtggttgagcgagaggcgaggggccacgctttcatcagatgatcagttgatcaccatcccttcccgctgcagacctctctgccgtagtttatcttgtactacactgattgaaatttcctccacgctttcttgtgttctttgtcatttccttcacttgcgcggtcaagatcatatcccaatcttgccgtcgatctggtttgttggttattagcaggggtgtaatgtatcacgattcaaatggttcttcacaaaaagttagttcatatattaatagaaatccttaaagtttataatataaaatctaaagctcattaccatcctactagattttttcttccgctgaccggtgaccatgtggagcaggctttgcattatgataatttcagttgtccgatccatggtgctaaaatttaggccctgtttgagaacaaagtttttgaaaaccacagtttttgaaatactacagtatactttagtcatgacaataccgcagtttacaataccacaattttgaaaactgag

SEQ ID NO: 22491 - DNA, 2747 bp, Zea Mays
cctccgccttctacactgcacgcccagttccatctcccgccgccgccgccgccgccgccgccgccagggcgtgcaccggtaccactcccagtcctgccaccgccggatgctcctccgccgcaccgccgccgcagcagcagcagcagcgaagcgctccacctctttaacccctgagcgagccctccgacacgtgggcgccgccggccgcggccacgccaccacctcgtcctcgaccccacgccgccgaggccatcggcgcgcgccgacggccgagtccgatcccctcacgtccaccgccgcgccccgtccattctcggactaccaccctccccggcctgactcgccggacgacgacgcccttgcgcgccgcctcgccgccgcggtgctcgcctcgcctcaccccacctcccttcctccactccccttcctgcccctactccgcccagttcacctccttctcgggctcccgctgctcgcctcccatccgcacctcaccggcctcctcctccctctcctcctcctcttcccctcccgcccccagcagcacccgcacccgcacctgctccgctgcttcgcagtcgctgctcacctcgccgtactacgcggcggcggcggcgccgcgcgcgccatcctctcgcgcgctgtccgcttcccctcccctcataggcatttcgtcgagcactacatctccacctacaagacattttcctcggaccccgcctccttcgacttcctcctcttgtgcctcccctctgcgcccctactgcgccgtcttcgccagtacggcatctccccgtccccggaggcctgcaacgccgtgctctcccgcctccctcttgacgaagccatcgagttgtttcaagaactcccgcacaagaatgtttgctcctacaatatactactcaaggcgctgtgtgatgctggccgtgtgaaggatgcacgccagctgttcgatgaaatggcttcagcgccagatgttgtcacgtatgggattctaatccatggacactgtgctcttggtgagctggagaatgcagtgaagctgttggatgaaatggtggcaggaggggtggagccaaatgcaactgtttatactagcgtcgttgcattattgtgtgacaaagggtggatttcagatgctttgagagttgtggaggatatggtccagcgaaaggtgatattggatgaggctctgtatacgactgtcttgagtggtttttgtaataaaggggatttggtatctgcaagaaggtggtttgatgagatgcaaagaaaaggtttggcaactgatggggtgacctacacaacgatgatcaatgggctttgtcgggctgttgagctggaagaggcagagaaattgcttcaggaaatgtgggccaggcggttggatgttgatgaagtaacatacacagtgctcattgatgggtactgcaagagagggaagatggcggaggcctttcagatgcataatgcaatggttcagagaggagtgacaccaaatgtagtgacatatacagctttgacagatggactatgcaagcaaggggatgttcaggccgctaacgagctattgcatgagatgtctaacaaggggcttgagctgaatgcttgcacatacaactccctgatcaatggcctatgcaaggcaggctatctggagcaggccatgaggactatggcagacatggatacagcatgtcttaaaccagacgtttacacatatacaactcttattgatgcgctctgcaagtcaggggaccttgacagggctcacagcctcttgcaagagatgttagataaaggaattaagccaactatagtgacttacaatgttttgatgaatggtttttgcatgtcaggcagggtagaaggaggaaagaagctgcttgattggatgctcgagaaaaacatacatccaaatgctgcaacttacaattctcttatgaagcagtactgcattgaaaataacatgaagtctaccaccgagatctataaggggatgcgttctcgagatgtagggccaaatgagaatacatacaatatattgatcaagggtcactgcaaggcaagaaatatgaaagaggcactatatttccacgatgaaatgatacagaagggtttcagacttactgcaacctcatacagtgctcttataagattgctgaataaaaagaagaaatttgttgaagcaagagaactgtttcatgatatgaggaaggagggtttgacagctgaatcagatgtatacgatttttatattgatctcaactttaatgaggacaatttggagtcgactcttgctctttgtgatgaactggtggaagccagtattgtgaaatcataaactgaaatggatcaagatgttgtaaaggaacatatacattaggaacataattttggctggttatgtcatgctagcttcttcaggattgtgtttgcatgcagtgtgaatacaagatccagagatagtactgttccttttcacgatgctaaaactggtaattgagtttgatattgcaaaaaagcttgttcaacatcggttgagatgctttgcacatgtccaatgaagacctccaaaggcactaatgtgtaatgggattctaagacgcaatagcactcagaggagagacagaggacggccgaaccgtcgaagttgacatgggaagaaactgtaaaaagatttgaaaagatggaatatacctaaagatttagcttgaaataggagtgcatagaataatagaaaacag

SEQ ID NO: 22492 - DNA, 3414 bp, Zea Mays
cctccgccttctacactgcacgcccagttccatctcccgccgccgccgccgccgccgccgccgccagggcgtgcaccggtaccactcccagtcctgccaccgccggatgctcctccgccgcaccgccgccgcagcagcagcagcagcgaagcgctccacctctttaacccctgagcgagccctccgacacgtgggcgccgccggccgcggccacgccaccacctcgtcctcgaccccacgccgccgaggccatcggcgcgcgccgacggccgagtccgatcccctcacgtccaccgccgcgccccgtccattctcggactaccaccctccccggcctgactcgccggacgacgacgcccttgcgcgccgcctcgccgccgcggtgctcgcctcgcctcaccccacctcccttcctccactccccttcctgcccctactccgcccagttcacctccttctcgggctcccgctgctcgcctcccatccgcacctcaccggcctcctcctccctctcctcctcctcttcccctcccgcccccagcagcacccgcacccgcacctgctccgctgcttcgcagtcgctgctcacctcgccgtactacgcggcggcggcggcgccgcgcgcgccatcctctcgcgcgctgtccgcttcccctcccctcataggcatttcgtcgagcactacatctccacctacaagacattttcctcggaccccgcctccttcgacttcctcctcttgtgcctcccctctgcgcccctactgcgccgtcttcgccagtacggcatctccccgtccccggaggcctgcaacgccgtgctctcccgcctccctcttgacgaagccatcgagttgtttcaagaactcccgcacaagaatgtttgctcctacaatatactactcaaggcgctgtgtgatgctggccgtgtgaaggatgcacgccagctgttcgatgaaatggcttcagcgccagatgttgtcacgtatgggattctaatccatggacactgtgctcttggtgagctggagaatgcagtgaagctgttggatgaaatggtggcaggaggggtggagccaaatgcaactgtttatactagcgtcgttgcattattgtgtgacaaagggtggatttcagatgctttgagagttgtggaggatatggtccagcgaaaggtgatattggatgaggctctgtatacgactgtcttgagtggtttttgtaataaaggggatttggtatctgcaagaaggtggtttgatgagatgcaaagaaaaggtttggcaactgatggggtgacctacacaacgatgatcaatgggctttgtcgggctgttgagctggaagaggcagagaaattgcttcaggaaatgtgggccaggcggttggatgttgatgaagtaacatacacagtgctcattgatgggtactgcaagagagggaagatggcggaggcctttcagatgcataatgcaatggttcagagaggagtgacaccaaatgtagtgacatatacagctttgacagatggactatgcaagcaaggggatgttcaggccgctaacgagctattgcatgagatgtctaacaaggggcttgagctgaatgcttgcacatacaactccctgatcaatggcctatgcaaggcaggctatctggagcaggccatgaggactatggcagacatggatacagcatgtcttaaaccagacgtttacacatatacaactcttattgatgcgctctgcaagtcaggggaccttgacagggctcacagcctcttgcaagagatgttagataaaggaattaagccaactatagtgacttacaatgttttgatgaatggtttttgcatgtcaggcagggtagaaggaggaaagaagctgcttgattggatgctcgagaaaaacatacatccaaatgctgcaacttacaattctcttatgaagcagtactgcattgaaaataacatgaagtctaccaccgagatctataaggggatgcgttctcgagatgtagggccaaatgagaatacatacaatatattgatcaagggtcactgcaaggcaagaaatatgaaagaggcactatatttccacgatgaaatgatacagaagggtttcagacttactgcaacctcatacagtgctcttataagattgctgaataaaaagaagaaatttgttgaagcaagagaactgtttcatgatatgaggaaggagggtttgacagctgaatcagatgtatacgatttttatattgatctcaactttaatgaggacaatttggagtcgactcttgctctttgtgatgaactggtggaagccagtattgtgaaatcataaactgaaatggatcaagatgttgtaaaggaacatatacattaggaacataattttggctggttatgtcatgctagcttcttcaggattgtgtttgcatgcagtgtgaatacaagatccagagatagtactgttccttttcacgatgctaaaactggtaattgagggtaaaatcatgcctaatggtacaagagatattacacactggaacttcttggtgataatggatgggttacacactgaaaacggcatcagctattcacttgatgcaacaaaaggcatgttttcttctggtaatctttcagagaagcttcgcatgggacagctaaactgcagaaatgaggtggtggtggatttatttgctggaattggatactttgttcttctgtttcttgtgaaggctaatggcaagctattttatgcatgcgaagggaatccatatgctctggaggctctttggcgcaatgtattatacttgaaggagataaccgggtgactgcacccaaagatcgacgaagcgggtgacaagaccgaagtggccacagcttcaggtggttgagcgagaggcgaggggccacgctttcatcagatgatcagttgatcaccatcccttcccgctgcagacctctctgccgtagtttatcttgtactacactgattgaaatttcctccacgctttcttgtgttctttgtcatttccttcacttgcgcggtcaagatcatatcccaatcttgccgtcgatctggtttgttggttattagcaggggtgtaatgtatcacgattcaaatggttcttcacaaaaagttagttcatatattaatagaaatccttaaagtttataatataaaatctaaagctcattaccatcctactagattttttcttccgctgaccggtgaccatgtggagcaggctttgcattatgataatttcagttgtccgatccatggtgctaaaatttaggccctgtttgagaacaaagtttttgaaaaccacagtttttgaaatactacagtatactttagtcatgacaataccgcagtttacaataccacaattttgaaaactgag

SEQ ID NO: 22493 - DNA, 1897 bp, Zea Mays
gcccatcctcggtcagtccgtctcgtcggcggcggcgcagagtggaactggaagccaacgtccaagaggctcttcagctgcgagttcgttttcgtttatggattagaaaatgacgtgacgagctagcatccggccgccgcggcggcagcggacagagccagatgcggtcagggtcaatctctccttgagctctcctctccaccgcgctgagaccagcctttcggcccttgcacgccgcacacgccagtccaggtctcaccgtcgggctgcttcaccggtgcctaatagcgatgcccaccaccatctgcagtttgagcaagcaacataaatggaagatagcagtctctgtgatgctgttctccgtgctcctaatagcatgtgattcgccattcagggccttttttagcaagtacctcagctccattgtaccatcatctggatcatcacatgacactgcactaacccaggagaatcgacatttatactcagaggtcagagcatgccactaacctgactaacagcaaggcagcgaaacagatcgaacatggcatgtacaacatgaacaccagttcgatcaatgcagcttccagttggagcattatgaaggaggagttcacatttcaagcacatgatcgccctttcaataattgtcatgcttccaccattgtagaggttgagaaagaaatttttttggtttcatattttggtggatccatagaaggggctcctgatgtcaaaatctggacacagagatacagtgatggctattggcatcctccagtagtagctgatgaagaaaatgcgacagcaatgtggaatcctgttttatttcagctcccctctcatgagttgcttctcttctacaagattggtgaacaccctcaaaactggagcggtgccatgaaaagatctctcaatggtggtatgtcctggttagagagggagcaattaccacctggtattcttggccctattaagaataagccctttttgcttgatgatggccgtttactatgtgggacatctgttgaaagttggaactcttggggtgcatggcttgaggtagcagcagacaatgtaacagaagatgctggccggacatggagcaaatatggtcctatatttatccaaggcgagaaacttggtgtcattcagccagtaccttatcagaccaccaatgggagtatacgtatgttgctgaggtctcaccaaacaatcggttcggtatgcatggctgattcctacgatggaggattaagatggagttttgcgcgcaagagtgtgcttccaaaccctaattcagggatcgatggaatcaagatgaaagatgggagagtggcacttgcctacaacaccgtctccagaggcacgctcaaagtggccgtctccacagacgacggcctctcatggcaagaggtggtgacgctggagaacgcggaaggctgggagttctcgtatcctgcagtgatccaaacccagggccggccctgagggtatgcaggatatacgaccgctcaggaccctcaaggtttatagggcccccgtttattcaacttatatccaaatacatatacattacagataaatctatattctcgttcttttgttgtgtctctttaattttctggcaatcatctcttcgaggtcgcgcaacagtctgcttgatgacgaatactaaatattgattaacgtgggaaggacggatggtgttgtacacttatgcgtgtcgcgttgcttaattctagcctatccgagggtcaaccctaataacctatgttgcttaatcattgtttagtttgttgaactttgttttcaaaaaaaattgctcgaatgtatatagatttggtttactgtgcattttaaggtttaggttagtttgacaaattaaaagtaaaaa

SEQ ID NO: 22494 - DNA, 2072 bp, Zea Mays
ctcggtcagtccgtctcgtcggcggcggcgcagagtggaactggaagccaacgtccaagaggctcttcagctgcgagttcgttttcgtttatggattagaaaatgacgtgacgagctagcatccggccgccgcggcggcagcggacagagccagatgcggtcagggtcaatctctccttgagctctcctctccaccgcgctgagaccagcctttcggcccttgcacgccgcacacgccagtccaggtctcaccgtcgggctgcttcaccggtgcctaatagcgatgcccaccaccatctgcagtttgagcaagcaacataaatggaagatagcagtctctgtgatgctgttctccgtgctcctaatagcatgtgattcgccattcagggccttttttagcaagtacctcagctccattgtaccatcatctggatcatcacatgacactgcactaacccaggagaatcgacatttatactcagaggtcagagcatgccactaacctgactaacagcaaggcagcgaaacagatcgaacatggcatgtacaacatgaacaccagttcgatcaatgcagcttccagttggagcattatgaaggaggagttcacatttcaagcacatgatcgccctttcaataattgtcatgcttccaccattgtagaggttgagaaagaaatttttttggtttcatattttggtggatccatagaaggggctcctgatgtcaaaatctggacacagagatacagtgatggctattggcatcctccagtagtagctgatgaagaaaatgcgacagcaatgtggaatcctgttttatttcagctcccctctcatgagttgcttctcttctacaagattggtgaacaccctcaaaactggagcggtgccatgaaaagatctctcaatggtggtatgtcctggttagagagggagcaattaccacctggtattcttggccctattaagaataaggattcatgaagagaaccacatcgtcggcataaagagaaacccggtgttgtagctgcctagaagaaagaggttgcaataaaccttcatcatctgctttagagaaaagctgaccaagcacatccatgacaagcacaaacaacatcggagaaagagggtccctgtcgcagccctcttttatgtgaaatgaggcttcccagccctttttgcttgatgatggccgtttactatgtgggacatctgttgaaagttggaactcttggggtgcatggcttgaggtaacagaagatgctggccggacatggagcaaatatggtcctatatttatccaaggcgagaaacttggtgtcattcagccagtaccttatcagaccaccaatgggagtatacgtatgttgctgaggtctcaccaaacaatcggttcggtatgcatggctgattcctacgatggaggattaagatggagttttgcgcgcaagagtgtgcttccaaaccctaattcagggatcgatggaatcaagatgaaagatgggagagtggcacttgcctacaacaccgtctccagaggcacgctcaaagtggccgtctccacagacgacggcctctcatggcaagaggtggtgacgctggagaacgcggaaggctgggagttctcgtatcctgcagtgatccaaacccagggccggccctgagggtatgcaggatatacgaccgctcaggaccctcaaggtttatagggcccccgtttattcaacttatatccaaatacatatacattacagataaatctatattctcgttcttttgttgtgtctctttaattttctggcaatcatctcttcgaggtcgcgcaacagtctgcttgatgacgaatactaaatattgattaacgtgggaaggacggatggtgttgtacacttatgcgtgtcgcgttgcttaattctagcctatccgagggtcaaccctaataacctatgttgcttaatcattgtttagtttgttgaactttgttttcaaaaaaaattgctcgaatgtatatagatttggtttactgtgcattttaaggtttaggttagtttgacaaattaaaagtaaaaa

SEQ ID NO: 22495 - DNA, 1621 bp, Zea Mays
gttgtctagaagcttcgatgcttatagcgatgcccaccaccatctgcagtttgagcaagcaacataaatggaagatagcagtctctgtgatgctgttctccgtgctcctaatagcatgtgattcgccattcagggccttttttagcaagtacctcagctccattgtaccatcatctggatcatcacatgacactgcactaacccaggagaatcgacatttatactcagaggtcagagcatgccactaacctgactaacagcaaggcagcgaaacagatcgaacatggcatgtacaacatgaacaccagttcgatcaatgcagcttccagttggagcattatgaaggaggagttcacatttcaagcacatgatcgccctttcaataattgtcatgcttccaccattgtagaggttgagaaagaaatttttttggtttcatattttggtggatccatagaaggggctcctgatgtcaaaatctggacacagagatacagtgatggctattggcatcctccagtagtagctgatgaagaaaatgcgacagcaatgtggaatcctgttttatttcagctcccctctcatgagttgcttctcttctacaagattggtgaacaccctcaaaactggagcggtgccatgaaaagatctctcaatggtggtatgtcctggttagagagggagcaattaccacctggtattcttggccctattaagaataagccctttttgcttgatgatggccgtttactatgtgggacatctgttgaaagttggaactcttggggtgcatggcttgaggtaacagaagatgctggccggacatggagcaaatatggtcctatatttatccaaggcgagaaacttggtgtcattcagccagtaccttatcagaccaccaatgggagtatacgtatgttgctgaggtctcaccaaacaatcggttcggtatgcatggctgattcctacgatggaggattaagatggagttttgcgcgcaagagtgtgcttccaaaccctaattcagggatcgatggaatcaagatgaaagatgggagagtggcacttgcctacaacaccgtctccagaggcacgctcaaagtggccgtctccacagacgacggcctctcatggcaagaggtggtgacgctggagaacgcggaaggctgggagttctcgtatcctgcagtgatccaaacccagggccggccctgagggtatgcaggatatacgaccgctcaggaccctcaaggtttatagggcccccgtttattcaacttatatccaaatacatatacattacagataaatctatattctcgttcttttgttgtgtctctttaattttctggcaatcatctcttcgaggtcgcgcaacagtctgcttgatgacgaatactaaatattgattaacgtgggaaggacggatggtgttgtacacttatgcgtgtcgcgttgcttaattctagcctatccgagggtcaaccctaataacctatgttgcttaatcattgtttagtttgttgaactttgttttcaaaaaaaattgctcgaatgtatatagatttggtttactgtgcattttaaggtttaggttagtttgacaaattaaaagtaaaaa

SEQ ID NO: 22496 - DNA, 2199 bp, Zea Mays
cctctatcacagtctgaaaatgcagttaagctgaataaccattgctcagttttgttcctctctatcggtaatggattagacgttttttttactcgagagagccaaaactgagcagtagggcacggatttaagagtctcctactatttttcattactccaaaatgttgtgtcaaatcgctcactgtcttgactcttcatcgtctccactctccaccatcatctttgattcctgtctccgcagcttgacccacaaacgcgactagggcagtcaccgcggcgtagctgccgcgtcttgccccgaaacacaaccgtcaacgccgtcccggaccgcagcagcgcggcgcaaccccaatcggagccggagctagcgaagcgagcgcctcgcttccacaagtcgctagctgcatctggagcgccgccggcccgaccaacgcccgagccagccgtgggcgttcggccgccgattcctctgggctctgtcttgtaggaacacacttggatgaggttacaatacgcgtggaacgccatacccttcattctgctattttgtgctatctccacaaataaaatcttctccaacaacaaacctttcagcttcaccatagcgtctgctaggtcgttgcttcagattgacccaaattcaggacttgttcaggacaaggtaaaagttggacaaattttggaagaggacacccaaaacattgtcaatatgactatgaatgtgtcgtctggatggagcattgtgaaagaagaactcatacttcctgctagaggtgcccctttcaatagttgccatgcttctactattgtacagattgaggaagacaattttttggtagcatatttcggtggatccagggaaggtgccccggatgttaaaatctggttacagagatatagtgatggtcactggcatcctccagtggtggctgatgaacaagatggggtgcccatgtggaatcctgttttgtttcagcttccctcccgtgagctgcttctcttctacaagattggtcaagaagttcagaagtggagcggtgccatgaaaagatcgttagatggcggtgtaacctggtcacctagagagcagttacctcctggcatccttggtcctattaaaaataagcctttcttgcttgaagatgggcgcctactgtgtggatcatcagttgaaagttggaattcttggggtgcatggcttgaggttacgaaagatgccggatggacctggagaaagtatggccctatatgtataaaaggtcaaccacttggggtgattcagccagttccctacaggactgacgatggaactattcgagtgttgctgcgatcatttgaaacaattggtcatgtctgtatggccgattccattgatgaaggtgtgacatggagttatgtccgtgagactgagcttccaaacccaaattctgggattgatggagttaagatgaaggatggaagagtactgcttgcctacaacaccttctccagaggaacgctcaagcttgcagtatccttaaacgacggtgattcatgggacgaagtaatgacactagaggacacaaaaggtatggagttttcgtatcctgcagtgatccagtctatggatgagctcatacatgttacctatacatacaatcggacacaggttaagcatgttgttcttcgacctagttcgatggtgaaattgtgagcctgcaactgatgaaggcctacggctggcaacttcaggacacccaaatttatcaccaaatgtttggtgtgggggggggggggggggggggggggtcattgcatcggattggctagattatgctcagttgatgtcaaataaaatgctttcaggtgctacttaatggatttttcgaggttcatctaaaaaaagtaaatactgtttaaaatgttctgcttctttctcatctcggttattgttcaaatatacttttcctttggttgtgcgttggctttcacgctttaggactcctttggagcatagtggttttacagaaaccgtgtaacaaatttatatgaatcagttcattttcataaaaaaaagagaggaagaagcaggggaaaaaaactggcattcaaggggacatgggtaatggtaaatgtgtttctaagactgtccgcagaagatcatgtaaaatagacgatttacattgtagataatattatttgtagagtcaagtttgaaat

SEQ ID NO: 22497 - DNA, 2147 bp, Zea Mays
ctctatcggtaatggattagacgttttttttactcgagagagccaaaactgagcagtagggcacggatttaagagtctcctactatttttcattactccaaaatgttgtgtcaaatcgctcactgtcttgactcttcatcgtctccactctccaccatcatctttgattcctgtctccgcagcttgacccacaaacgcgactagggcagtcaccgcggcgtagctgccgcgtcttgccccgaaacacaaccgtcaacgccgtcccggaccgcagcagcgcggcgcaaccccaatcggagccggagctagcgaagcgagcgcctcgcttccacaagtcgctagctgcatctggagcgccgccggcccgaccaacgcccgagccagccgtgggcgttcggccgccgattcctctgggctctggtggatgtcttgtaggaacacacttggatgaggttacaatacgcgtggaacgccatacccttcattctgctattttgtgctatctccacaaataaaatcttctccaacaacaaacctttcagcttcaccatagcgtctgctaggtcgttgcttcagattgacccaaattcaggacttgttcaggacaaggtaaaagttggacaaattttggaagaggacacccaaaacattgtcaatatgactatgaatgtgtcgtctggatggagcattgtgaaagaagaactcatacttcctgctagaggtgcccctttcaatagttgccatgcttctactattgtacagattgaggaagacaattttttggtagcatatttcggtggatccagggaaggtgccccggatgttaaaatctggttacagagatatagtgatggtcactggcatcctccagtggtggctgatgaacaagatggggtgcccatgtggaatcctgttttgtttcagcttccctcccgtgagctgcttctcttctacaagattggtcaagaagttcagaagtggagcggtgccatgaaaagatcgttagatggcggtgtaacctggtcacctagagagcagttacctcctggcatccttggtcctattaaaaataagcctttcttgcttgaagatgggcgcctactgtgtggatcatcagttgaaagttggaattcttggggtgcatggcttgaggttacgaaagatgccggatggacctggagaaagtatggccctatatgtataaaaggtcaaccacttggggtgattcagccagttccctacaggactgacgatggaactattcgagtgttgctgcgatcatttgaaacaattggtcatgtctgtatggccgattccattgatgaaggtgtgacatggagttatgtccgtgagactgagcttccaaacccaaattctgggattgatggagttaagatgaaggatggaagagtactgcttgcctacaacaccttctccagaggaacgctcaagcttgcagtatccttaaacgacggtgattcatgggacgaagtaatgacactagaggacacaaaaggtatggagttttcgtatcctgcagtgatccagtctatggatgagctcatacatgttacctatacatacaatcggacacaggttaagcatgttgttcttcgacctagttcgatggtgaaattgtgagcctgcaactgatgaaggcctacggctggcaacttcaggacacccaaatttatcaccaaatgtttggtgtgggggggggggggggggggggggggtcattgcatcggattggctagattatgctcagttgatgtcaaataaaatgctttcaggtgctacttaatggatttttcgaggttcatctaaaaaaagtaaatactgtttaaaatgttctgcttctttctcatctcggttattgttcaaatatacttttcctttggttgtgcgttggctttcacgctttaggactcctttggagcatagtggttttacagaaaccgtgtaacaaatttatatgaatcagttcattttcataaaaaaaagagaggaagaagcaggggaaaaaaactggcattcaaggggacatgggtaatggtaaatgtgtttctaagactgtccgcagaagatcatgtaaaatagacgatttacattgtagataatattatttgtagagtcaagtttgaaat

SEQ ID NO: 22498 - DNA, 2000 bp, Zea Mays
cacggatttaagagtctcctactatttttcattactccaaaatgttgtgtcaaatcgctcactgtcttgactcttcatcgtctccactctccaccatcatctttgattcctgtctccgcagcttgacccacaaacgcgactagggcagtcaccgcggcgtagctgccgcgtcttgccccgaaacacaaccgtcaacgccgtcccggaccgcagcagcgcggcgcaaccccaatcggagccggagctagcgaagcgagcgcctcgcttccacaagtcgctagctgcatctggagcgccgccggcccgaccaacgcccgagccagccgtgggcgttcggccgccgattcctctgggctctggtggatgtcttgtaggaacacacttggatgaggttacaatacgcgtggaacgccatacccttcattctgctattttgtgctatctccacaaataaaatcttctccaacaacaaacctttcagcttcaccatagcgtctgctaggtcgttgcttcagattgacccaaattcaggacttgttcaggacaaggtaaaagttggacaaattttggaagaggacacccaaaacattgtcaatatgactatgaatgtgtcgtctggatggagcattgtgaaagaagaactcatacttcctgctagaggtgcccctttcaatagttgccatgcttctactattgtacagattgaggaagacaattttttggtagcatatttcggtggatccagggaaggtgccccggatgttaaaatctggttacagagatatagtgatggtcactggcatcctccagtggtggctgatgaacaagatggggtgcccatgtggaatcctgttttgtttcagcttccctcccgtgagctgcttctcttctacaagattggtcaagaagttcagaagtggagcggtgccatgaaaagatcgttagatggcggtgtaacctggtcacctagagagcagttacctcctggcatccttggtcctattaaaaataagcctttcttgcttgaagatgggcgcctactgtgtggatcatcagttgaaagttggaattcttggggtgcatggcttgaggttacgaaagatgccggatggacctggagaaagtatggccctatatgtataaaaggtcaaccacttggggtgattcagccagttccctacaggactgacgatggaactattcgagtgttgctgcgatcatttgaaacaattggtcatgtctgtatggccgattccattgatgaaggtgtgacatggagttatgtccgtgagactgagcttccaaacccaaattctgggattgatggagttaagatgaaggatggaagagtactgcttgcctacaacaccttctccagaggaacgctcaagcttgcagtatccttaaacgacggtgattcatgggacgaagtaatgacactagaggacacaaaagcatgttgttcttcgacctagttcgatggtgaaattgtgagcctgcaactgatgaaggcctacggctggcaacttcaggacacccaaatttatcaccaaatgtttggtgtgggggggggggggggggggggggggtcattgcatcggattggctagattatgctcagttgatgtcaaataaaatgctttcaggtgctacttaatggatttttcgaggttcatctaaaaaaagtaaatactgtttaaaatgttctgcttctttctcatctcggttattgttcaaatatacttttcctttggttgtgcgttggctttcacgctttaggactcctttggagcatagtggttttacagaaaccgtgtaacaaatttatatgaatcagttcattttcataaaaaaaagagaggaagaagcaggggaaaaaaactggcattcaaggggacatgggtaatggtaaatgtgtttctaagactgtccgcagaagatcatgtaaaatagacgatttacattgtagataatattatttgtagagtcaagtttgaaat

SEQ ID NO: 22499 - DNA, 1752 bp, Zea Mays
atttagtgtagtggtacactgcatgtgaagcatcttgtaggaacacacttggatgaggttacaatacgcgtggaacgccatacccttcattctgctattttgtgctatctccacaaataaaatcttctccaacaacaaacctttcagcttcaccatagcgtctgctaggtcgttgcttcagattgacccaaattcaggacttgttcaggacaaggtaaaagttggacaaattttggaagaggacacccaaaacattgtcaatatgactatgaatgtgtcgtctggatggagcattgtgaaagaagaactcatacttcctgctagaggtgcccctttcaatagttgccatgcttctactattgtacagattgaggaagacaattttttggtagcatatttcggtggatccagggaaggtgccccggatgttaaaatctggttacagagatatagtgatggtcactggcatcctccagtggtggctgatgaacaagatggggtgcccatgtggaatcctgttttgtttcagcttccctcccgtgagctgcttctcttctacaagattggtcaagaagttcagaagtggagcggtgccatgaaaagatcgttagatggcggtgtaacctggtcacctagagagcagttacctcctggcatccttggtcctattaaaaataagcctttcttgcttgaagatgggcgcctactgtgtggatcatcagttgaaagttggaattcttggggtgcatggcttgaggttacgaaagatgccggatggacctggagaaagtatggccctatatgtataaaaggtcaaccacttggggtgattcagccagttccctacaggactgacgatggaactattcgagtgttgctgcgatcatttgaaacaattggtcatgtctgtatggccgattccattgatgaaggtgtgacatggagttatgtccgtgagactgagcttccaaacccaaattctgggattgatggagttaagatgaaggatggaagagtactgcttgcctacaacaccttctccagaggaacgctcaagcttgcagtatccttaaacgacggtgattcatgggacgaagtaatgacactagaggacacaaaaggtatggagttttcgtatcctgcagtgatccagtctatggatgagctcatacatgttacctatacatacaatcggacacaggttaagcatgttgttcttcgacctagttcgatggtgaaattgtgagcctgcaactgatgaaggcctacggctggcaacttcaggacacccaaatttatcaccaaatgtttggtgtgggggggggggggggggggggggggtcattgcatcggattggctagattatgctcagttgatgtcaaataaaatgctttcaggtgctacttaatggatttttcgaggttcatctaaaaaaagtaaatactgtttaaaatgttctgcttctttctcatctcggttattgttcaaatatacttttcctttggttgtgcgttggctttcacgctttaggactcctttggagcatagtggttttacagaaaccgtgtaacaaatttatatgaatcagttcattttcataaaaaaaagagaggaagaagcaggggaaaaaaactggcattcaaggggacatgggtaatggtaaatgtgtttctaagactgtccgcagaagatcatgtaaaatagacgatttacattgtagataatattatttgtagagtcaagtttgaaat

SEQ ID NO: 22500 - DNA, 2288 bp, Zea Mays
ccactgttgtcttacatgccaccaccacccgagcacgtgtcagactcaggcatcaccctttgcccgcctctctttggtgggattcttatcacaaccgcacacaccaaaaagcagagacaaacttataagaactttacggcgtgctatacctatcaggctatcactggctctccccgtcaactaaactctagccagtgagtggatgatgggtcggacgggtgacggccgccgccgcgacgtcgacggccggctggaggcgctgctctctggcgccggcggcgaggagccgtggctccggcgcgtggcgctcgcgacggctctggagctgcggctgctggcgcccctggccgcgccggccgtggtggtctacatgctcatcatcgtcatgtcgtcgaccacgcagatcgtgtgcggccagctcggcaacgtccagctcgccgccgcctccctcggcaacaacggcatccaggtcttcgcctacggcatcatgctgggtatgggcagcgcggtggagacgctgtgcgggcaggcgtacggcgccgagaagtacgagatgctgggcgtgtacctgcagcgctcgacggtgctgctcacggccaccggggtgccgctcgccgccgtgtacgcgctgtcggagccgctgctgctgctgctggggcagtcgccggagatcgccggcgccgccgccgagttcgcctacggcctcgtcccgcagatcttcgcgtacgccgccaacttccccatccagaagttcctgcaggcgcagagcatcgtggcgcccagcgcctacatcctggcggccagcttcgcgctccacgtgccgctcagctggctcgccgtctacgggctgggcctcggcctgctcggggcctcgctcacgctcagcctcacgtggtgggtgctggtcctgggccagttcgcgtacatcgtgtggagcccgcgctgccgggccacctggaccgggttcacgtgggctgccttcgccgacctgcccgggttcgccggcctgtccgccgcgtcggctgtcatgctggcgctcgaggtctggtacttccaggtgctcatcctcctcgccggcatgctgccggacccgcagatcgccctggactcgctaacggtctgcacgtcgatccagtcatgggtgttcatgatctctgtgggcttcaatgcagctgccagcgtgagggttgggaatgagctgggcgccggcaaccccaggtccgccgcgttctctgcgtgggtggtcaccgccctgtcggcgttcgtctcagggatagctggcctcgtcactttcctgctcagggacaagctcagctacatcttcaccggtggcgaggccgtctcgcgcgccgtcgccgacttgtgcccgctgctcgttgggaccattgtgctctgcgggatccagcccgtgctgtcagagttcagacctgacactcatccaaattcaagtggtactacagtgttacataagttaattcgctggagaacagacttattcgggctattaatctttgagccgtcgcattacactgcgacgggatccttcaccttcagtgatgcgtttgttctgttcttcttcccactggtactgaactttttgctcactggacgacgacgggtgatgaaaggtgtggccgttggctgcgggtggcaagcgatggttgcctacatcaacgtcgaatgctactacttcatcggcgtacccctcggcgtgctcctcggattcaagttcggtttcgggatcaagggactgtggggaggcatgattgggggtaccctcatccaaacacttgctttgatctggatcacgttaaggactgactggaacaaggaggtcgaagaagcgcggaaaagattggataagtgggacgacacaaggcagcctcttgtcgcaagcaaggagtgatggatgatggtacaggagtggatgaagaagattcagaacataccataccacagtcagtttcggttgatggggccttgcgagccgggcgtccgttcaatcggtatgcgtggacatggcggccgttggctttactcccgtagtacgagcgacagtgccattattttttgtttgctccggtaattttggtggctgccttgcctttttttaaaaaaaaaactcttatgtctccactcacgtcacagtgagttcgttttttgctatcgtttaggtggagattagtatctgatacaaaccaacccttccgtgcaatcgtaaaaaacttctaatatgtaccatataatcttgatcaagtggacacacgggaatgaataattttgcactt

SEQ ID NO: 22501 - DNA, 1920 bp, Zea Mays
ccactgttgtcttacatgccaccaccacccgagcacgtgtcagactcaggcatcaccctttgcccgcctctctttggtgggattcttatcacaaccgcacacaccaaaaagcagagacaaacttataagaactttacggcgtgctatacctatcaggctatcactggctctccccgtcaactaaactctagccagtgagtggatgatgggtcggacgggtgacggccgccgccgcgacgtcgacggccggctggaggcgctgctctctggcgccggcggcgaggagccgtggctccggcgcgtggcgctcgcgacggctctggagctgcggctgctggcgcccctggccgcgccggccgtggtggtctacatgctcatcatcgtcatgtcgtcgaccacgcagatcgtgtgcggccagctcggcaacgtccagctcgccgccgcctccctcggcaacaacggcatccaggtcttcgcctacggcatcatgctgggtatgggcagcgcggtggagacgctgtgcgggcaggcgtacggcgccgagaagtacgagatgctgggcgtgtacctgcagcgctcgacggtgctgctcacggccaccggggtgccgctcgccgccgtgtacgcgctgtcggagccgctgctgctgctgctggggcagtcgccggagatcgccggcgccgccgccgagttcgcctacggcctcgtcccgcagatcttcgcgtacgccgccaacttccccatccagaagttcctgcaggcgcagagcatcgtggcgcccagcgcctacatcctggcggccagcttcgcgctccacgtgccgctcagctggctcgccgtctacgggctgggcctcggcctgctcggggcctcgctcacgctcagcctcacgtggtgggtgctggtcctgggccagttcgcgtacatcgtgtggagcccgcgctgccgggccacctggaccgggttcacgtgggctgccttcgccgacctgcccgggttcgccggcctgtccgccgcgtcggctgtcatgctggcgctcgaggtctggtacttccaggtgctcatcctcctcgccggcatgctgccggacccgcagatcgccctggactcgctaacggtctgcacgtcgatccagtcatgggtgttcatgatctctgtgggcttcaatgcagctgccagcgtgagggttgggaatgagctgggcgccggcaaccccaggtccgccgcgttctctgcgtgggtggtcaccgccctgtcggcgttcgtctcagggatagctggcctcgtcactttcctgctcagggacaagctcagctacatcttcaccggtggcgaggccgtctcgcgcgccgtcgccgacttgtgcccgctgctcgttgggaccattgtgctctgcgggatccagcccgtgctgtcaggtgtggccgttggctgcgggtggcaagcgatggttgcctacatcaacgtcgaatgctactacttcatcggcgtacccctcggcgtgctcctcggattcaagttcggtttcgggatcaagggactgtggggaggcatgattgggggtaccctcatccaaacacttgctttgatctggatcacgttaaggactgactggaacaaggaggtcgaagaagcgcggaaaagattggataagtgggacgacacaaggcagcctcttgtcgcaagcaaggagtgatggatgatggtacaggagtggatgaagaagattcagaacataccataccacagtcagtttcggttgatggggccttgcgagccgggcgtccgttcaatcggtatgcgtggacatggcggccgttggctttactcccgtagtacgagcgacagtgccattattttttgtttgctccgggacacatgcctctgagcttctgaagacgaccttcagcggttcagcac

SEQ ID NO: 22502 - DNA, 2259 bp, Zea Mays
gctccgggctccgcggcctccgcctcgtttttaccgcataaagattcgaaagccctcctctctcgctttcgtctccacgcctagggtttctctgcctcgccggggaagcgatgcagccgctgcaccaaccgccgatgaacgggcaacacggcccgcctcctccgcagggatccggggttcccacggcttcgcagcagcaggcgccaccgccgtcgtactaccagcagcagcagcagcagcagcaggggccaccgcctcagtactaccagcagggtcccccacagccgtgggcgcagcagcaacagtacgctccaccgccgccgcagtacccgcctcagatgcagcagtacgctccaccaccgcagtacgcgcctccgccgcagcagtacgcgcagccgccgcagtacgcgcagccaccgcagtatgggacaacgccgggaagcggtgaggtcaggaccctgtggattggagatcttcagtactggatggacgagaactatctccactacaacgccttcgcgcctgtggcccagcagattgcctctgtgaaaattatacggaacaagcagactgggcactcagaaggttatggttttattgagttttactctcaagccgctgcagaacatactctgatgaacttcaatgggcagatgatgccgaatattgagatggcttttaagctgaattgggcttctgctagcactggggataagcgtggagataatggttctgaccatgcaatatttgttggtgatttggcccctgatgttacggactccatgttggaagatgtgttcagagctaactatccttcagttagaggagctaaagttgttgttgataggatcactggacggcctaaaggatatgggttcgtgcattttggagatctgaatgagcaggcacgtgctatgaccgagatgaatggaatgatgttatctacaaggaaaatgaggattggggctgcagctagcaagaagaatacagatgctcagcagacatatgcaactaatggatgccatgccatctgcatttagggcctggaaatgtcttcagatgtctcctgtaacctgtgactcggttaggtgcataccagagttctcaaggcaattgttcagagaatgatcccaacaatacaacagtctttgtgggtgggttagattccaatgtagacgaggagtatctaaggcaaatttttactccgtacggagaaatttcctatgtgaagattcctgtaggcaagcattgtggatttgttcaatttaccagcaggtcatgtgctgaggaagccatccaaatgctgaatgggagtcagattggtggacagaaagctcggctttcatggggccgtagtactcaaaacagacaggcttctcagcatgatgccaacagccagtataatgggaacaactattatcgataccaacagccgggtaatgaaggttatagctatggtgcacccaatgcacaagacccaagcattcaaaactactatggataccctggttatggtaactatgagcagcagtcaacacaggaacagcagcagcagcagcctccaccagcacaggagcagcctccaccggcaccacagtaacaatcatcgtggtgacgattgcttgggcacttctggaatgctatcagattagagggactacagtcagagcagtgccgtgccgaatgagacgtcctgaagatatggagggcatatagtcgcatgggtgttcttgggccggtgttaatctacgatgacactcctgatgtctcttttgtttgtcattgagatcttgacggctgaagtatgcaccgttgaaattgatgtattcgtcgtcgtcggattgtttatttgctcggaaccattttttgcactttacatctgggacgccaaccacgactcattccgcacctaccgttggcccaccagcccgtagtagatgtacgtaggggtggtggcaatggatcaagatctaaatggttcttcataaaatggttggactataaataaattttagttaaaaataaatagaaatatagcttgattttaatttgatcgtatccttaaattttatagtgtaaaatttagagcttattgtcagttatagctgtatctggttcggttcctttgaaactgtggcatggaatagtttctagcaagattttttgaaactgtgacatggaatggtttctagccagattgtttgtgtattttttgtaagccttgatcagttagaactattcctgagtggaattcaggac

SEQ ID NO: 22503 - DNA, 2038 bp, Zea Mays
ccgcctcgtttttaccgcataaagattcgaaagccctcctctctcgctttcgtctccacgcctagggtttctctgcctcgccggggaagcgatgcagccgctgcaccaaccgccgatgaacgggcaacacggcccgcctcctccgcagggatccggggttcccacggcttcgcagcagcaggcgccaccgccgtcgtactaccagcagcagcagcagcagcagcaggggccaccgcctcagtactaccagcagggtcccccacagccgtgggcgcagcagcaacagtacgctccaccgccgccgcagtacccgcctcagatgcagcagtacgctccaccaccgcagtacgcgcctccgccgcagcagtacgcgcagccgccgcagtacgcgcagccaccgcagtatgggacaacgccgggaagcggtgaggtcaggaccctgtggattggagatcttcagtactggatggacgagaactatctccactacaacgccttcgcgcctgtggcccagcagattgcctctgtgaaaattatacggaacaagcagactgggcactcagaaggttatggttttattgagttttactctcaagccgctgcagaacatactctgatgaacttcaatgggcagatgatgccgaatattgagatggcttttaagctgaattgggcttctgctagcactggggataagcgtggagataatggttctgaccatgcaatatttgttggtgatttggcccctgatgttacggactccatgttggaagatgtgttcagagctaactatccttcagttagaggagctaaagttgttgttgataggatcactggacggcctaaaggatatgggttcgtgcattttggagatctgaatgagcaggcacgtgctatgaccgagatgaatggaatgatgttatctacaaggaaaatgaggattggggctgcagctagcaagaagaatacagatgctcagcagacatatgcaactaatggtgcataccagagttctcaaggcaattgttcagagaatgatcccaacaatacaacagtcatgtgctgaggaagccatccaaatgctgaatgggagtcagattggtggacagaaagctcggctttcatggggccgtagtactcaaaacagacaggcttctcagcatgatgccaacagccagtataatgggaacaactattatcgataccaacagccgggtaatgaaggttatagctatggtgcacccaatgcacaagacccaagcattcaaaactactatggataccctggttatggtaactatgagcagcagtcaacacaggaacagcagcagcagcagcctccaccagcacaggagcagcctccaccggcaccacagtaacaatcatcgtggtgacgattgcttgggcacttctggaatgctatcagattagagggactacagtcagagcagtgccgtgccgaatgagacgtcctgaagatatggagggcatatagtcgcatgggtgttcttgggccggtgttaatctacgatgacactcctgatgtctcttttgtttgtcattgagatcttgacggctgaagtatgcaccgttgaaattgatgtattcgtcgtcgtcggattgtttatttgctcggaaccattttttgcactttacatctgggacgccaaccacgactcattccgcacctaccgttggcccaccagcccgtagtagatgtacgtaggggtggtggcaatggatcaagatctaaatggttcttcataaaatggttggactataaataaattttagttaaaaataaatagaaatatagcttgattttaatttgatcgtatccttaaattttatagtgtaaaatttagagcttattgtcagttatagctgtatctggttcggttcctttgaaactgtggcatggaatagtttctagcaagattttttgaaactgtgacatggaatggtttctagccagattgtttgtgtattttttgtaagccttgatcagttagaactattcctgagtggaattcaggac

SEQ ID NO: 22504 - DNA, 1378 bp, Zea Mays
ccctcctctctcgctttcgtctccacgcctagggtttctctgcctcgccggggaagcgatgcagccgctgcaccaaccgccgatgaacgggcaacacggcccgcctcctccgcagggatccggggttcccacggcttcgcagcagcaggcgccaccgccgtcgtactaccagcagcagcagcagcagcagcaggggccaccgcctcagtactaccagcagggtcccccacagccgtgggcgcagcagcaacagtacgctccaccgccgccgcagtacccgcctcagatgcagcagtacgctccaccaccgcagcagtacgcccctccgccgcagcagcagtacgccgctccgccgcagcagcagtacgccgctccgccgccgcagtacgcgcctccgccgccgcagtacgcgcctccgccgcagcagtacgcgcagccgccgcagtacgcgcagccaccgcagtatgggacaacgccgggaagcggtgaggtcaggaccctgtggattggagatcttcagtactggatggacgagaactatctccactacaacgccttcgcgcctgtggcccagcagattgcctctgtgaaaattatacggaacaagcagactgggcactcagaaggttatggttttattgagttttactctcaagccgctgcagaacatactctgatgaacttcaatgggcagatgatgccgaatattgagatggcttttaagctgaattgggcttctgctagcactggggataagcgtggagataatggttctgaccatgcaatatttgttggtgatttggcccctgatgttacggactccatgttggaagatgtgttcagagctaactatccttcagttagaggagctaaagttgttgttgataggatcactggacggcctaaaggatatgggttcgtgcattttggagatctgaatgagcaggcacgtgctatgaccgagatgaatggaatgatgttatctacaaggaaaatgaggattggggctgcagctagcaagaagaatacagatgctcagcagacatatgcaactaatggtgcataccagagttctcaaggcaattgttcagagaatgatcccaacaatacaacagtctttgtgggtgggttagattccaatgtagacgaggagtatctaaggcaaatttttactccgtacggagaaatttcctatgtgaagattcctgtaggcaagcattgtggatttgttcaatttaccagcaggtcatgtgctgaggaagccatccaaatgctgaatgggagtcagattggtggacagaaagctcggctttcatggggccgtagtactcaaaacagacagcatgatgccaacagccagtataatgggaacaactat

SEQ ID NO: 22505 - DNA, 1746 bp, Zea Mays
aacttataccaaggtttcgtaagattgcctctgtgaaaattatacggaacaagcagactgggcactcagaaggttatggttttattgagttttactctcaagccgctgcagaacatactctgatgaacttcaatgggcagatgatgccgaatattgagatggcttttaagctgaattgggcttctgctagcactggggataagcgtggagataatggttctgaccatgcaatatttgttggtgatttggcccctgatgttacggactccatgttggaagatgtgttcagagctaactatccttcagttagaggagctaaagttgttgttgataggatcactggacggcctaaaggatatgggttcgtgcattttggagatctgaatgagcaggcacgtgctatgaccgagatgaatggaatgatgttatctacaaggaaaatgaggattggggctgcagctagcaagaagaatacagatgctcagcagacatatgcaactaatggatgccatgccatctgcatttagggcctggaaatgtcttcagatgtctcctgtaacctgtgactcggttaggtgcataccagagttctcaaggcaattgttcagagaatgatcccaacaatacaacagtctttgtgggtgggttagattccaatgtagacgaggagtatctaaggcaaatttttactccgtacggagaaatttcctatgtgaagattcctgtaggcaagcattgtggatttgttcaatttaccagcaggtcatgtgctgaggaagccatccaaatgctgaatgggagtcagattggtggacagaaagctcggctttcatggggccgtagtactcaaaacagacaggcttctcagcatgatgccaacagccagtataatgggaacaactattatcgataccaacagccgggtaatgaaggttatagctatggtgcacccaatgcacaagacccaagcattcaaaactactatggataccctggttatggtaactatgagcagcagtcaacacaggaacagcagcagcagcagcctccaccagcacaggagcagcctccaccggcaccacagtaacaatcatcgtggtgacgattgcttgggcacttctggaatgctatcagattagagggactacagtcagagcagtgccgtgccgaatgagacgtcctgaagatatggagggcatatagtcgcatgggtgttcttgggccggtgttaatctacgatgacactcctgatgtctcttttgtttgtcattgagatcttgacggctgaagtatgcaccgttgaaattgatgtattcgtcgtcgtcggattgtttatttgctcggaaccattttttgcactttacatctgggacgccaaccacgactcattccgcacctaccgttggcccaccagcccgtagtagatgtacgtaggggtggtggcaatggatcaagatctaaatggttcttcataaaatggttggactataaataaattttagttaaaaataaatagaaatatagcttgattttaatttgatcgtatccttaaattttatagtgtaaaatttagagcttattgtcagttatagctgtatctggttcggttcctttgaaactgtggcatggaatagtttctagcaagattttttgaaactgtgacatggaatggtttctagccagattgtttgtgtattttttgtaagccttgatcagttagaactattcctgagtggaattcaggac

SEQ ID NO: 22506 - DNA, 1605 bp, Zea Mays
aaggtttcgtaagattgcctctgtgaaaattatacggaacaagcagactgggcactcagaaggttatggttttattgagttttactctcaagccgctgcagaacatactctgatgaacttcaatgggcagatgatgccgaatattgagatggcttttaagctgaattgggcttctgctagcactggggataagcgtggagataatggttctgaccatgcaatatttgttggtgatttggcccctgatgttacggactccatgttggaagatgtgttcagagctaactatccttcagttagaggagctaaagttgttgttgataggatcactggacggcctaaaggatatgggttcgtgcattttggagatctgaatgagcaggcacgtgctatgaccgagatgaatggaatgatgttatctacaaggaaaatgaggattggggctgcagctagcaagaagaatacagatgctcagcagacatatgcaactaatggatgccatgccatctgcatttagggcctggaaatgtcttcagatgtctcctgtaacctgtgactcggttaggtgcataccagagttctcaaggcaattgttcagagaatgatcccaacaatacaacagtcatgtgctgaggaagccatccaaatgctgaatgggagtcagattggtggacagaaagctcggctttcatggggccgtagtactcaaaacagacaggcttctcagcatgatgccaacagccagtataatgggaacaactattatcgataccaacagccgggtaatgaaggttatagctatggtgcacccaatgcacaagacccaagcattcaaaactactatggataccctggttatggtaactatgagcagcagtcaacacaggaacagcagcagcagcagcctccaccagcacaggagcagcctccaccggcaccacagtaacaatcatcgtggtgacgattgcttgggcacttctggaatgctatcagattagagggactacagtcagagcagtgccgtgccgaatgagacgtcctgaagatatggagggcatatagtcgcatgggtgttcttgggccggtgttaatctacgatgacactcctgatgtctcttttgtttgtcattgagatcttgacggctgaagtatgcaccgttgaaattgatgtattcgtcgtcgtcggattgtttatttgctcggaaccattttttgcactttacatctgggacgccaaccacgactcattccgcacctaccgttggcccaccagcccgtagtagatgtacgtaggggtggtggcaatggatcaagatctaaatggttcttcataaaatggttggactataaataaattttagttaaaaataaatagaaatatagcttgattttaatttgatcgtatccttaaattttatagtgtaaaatttagagcttattgtcagttatagctgtatctggttcggttcctttgaaactgtggcatggaatagtttctagcaagattttttgaaactgtgacatggaatggtttctagccagattgtttgtgtattttttgtaagccttgatcagttagaactattcctgagtggaattcaggac

SEQ ID NO: 22507 - DNA, 2593 bp, Zea Mays
cgaatctcgaatcccgctaatccaaatccatcgagcgggagaaccccgaattccaaaaatccccaaaacccaaccctagctcgctagcctcactgttccccttcgactcttccccttcgcacctctgattcctcgcgccctcgtcccccgctcaatttccagaagcttctagaaccgggtttccagccctaatcccgcaaaaagatgctttcttgcgcctagtagcctgggacggaggcatggacagcggcggcggggagggaggctcgactggcgggaggttccctattctgcaggcgaatagggaccccgagtcaaattgggaggtggacgttgccaaaagcctcgagcagtacctgctcaagatctgttcaggggaggtctccggcgaggacgagtcccattctgtcaactttgccgaagcggcgttactactccaaggatcggttcaagtatacagtaggaaggtggagtacttgtactccttggtgcttcacgcgatagagttcctctcacacaagaatggaaacaaggacgtctctggataacaatgttgaccgagatgatttacaaagaaaaattgtgaggccaccagcaaatctactggtgtttgaaggggacgttctggatagtgaagcgagtgagctagactcatatttgttatcaacatgtgatttttatggagatttccttctgctggatccttgtgatgcaccatctgtttttgactttctgcaaggaaaacattctggtaaagaaaatagtgtggctcgccaaggcagtccagcaccttctaaaagccaagccaatgttttcacttccccaaatgcaagatcagcgggcacaggctgtaaagccgcctctggaaaagtcctaggaggtctagattcaactcagaagaatcctgaccaaccttcaactcaagaaaccagtccagatgacaaacattggtctgatcctgttgaacctaactttactgatgatgttgaaaagcctcacccagacgatataggggatcctgttggagattattctgatgacgaggatccgtggaaacctttaaatccacatgaacctggcagcttaaagattcggccttacaggagagtgaaaggttctctacggggggttattggcactttgagaaagaaaactctcacatctatatttcctgtggcaaagatggttggtgtcatcatacctgaacatgctaaatcttttgaagcacagcagtctcagcaggaggaacattatggttcccaatcaccccctcgttttgaaaagtatttggcatcatttgaatttggagaagaaaattccaatgtgtttggagatctgaaagatgacaatggatccgatattggcattaattttgattataatgatccagacatgccaaacgacatagatgttgatcctgacgttccaacatatcctgacgagattattgctgcaactcccaaaggtactcatggtacacaggatgacagagatacacgtgaaagcctcgatgacttgtgtcggtcacatctggtgaggtttttaatggttctatagcctatttgcatctatggggctatagcccatttgcatctatgtcttgtgtggctacaagctacatgcatcttggcgaccataatgctctccttgccagcattgctgaggttgaaaagcagagtgagatggatgctcgagtttcaacatggaaagaaagaatcgagattgccttggaagagcaggataaaaacccaccttttgatatcggttcatacggggagcaaatccttgacgcgctttcatcaagaactgacagcacaggaactgcatcttttagcgagattgtttgtggcagaccgaagtatgaggttgccagaacattctctgcccttctccagctggtaaacagcagaagtgtttatctggacaaaggacaagccacgaatgagttggtgtgttacacagctgagaatccattccatgtaaggctcatcagtcccaaccggaggccagagatggaggcacactttgctcggaagagagtcaagtccccactgcgaaacgctggcaaaggtggtgagtcctccctggcacgacatgagtgccccaagaagccattgcataaaaatggcaagattcaagtcaagacggcgatcaggttgactccagacgggaagcgaaggcgaaggtcagtcactcatctaatgcagccgatcaatctggaatcagcggatgaatgccaatggcagactgactcatgggcatctagagcctgatcgccaatggcagactgactgatgggcatctagagtctgattcttctaattgttgcaacttcagtggcggtttcattggcaggcaacgactgctgtgcaatcagctcccttgacgagacagtgaccatggttcctggttcagatggcgtactgctgacattaggcctagctagcgggtgtacatgtaacatgtacaatagttcattgtgctgttttgtacgtatttgtatcagctctcaagcctaatgctaacagggcaagatttgtctaccgacttgccgttttatacctaatgatattggtagattctttcctggttc

SEQ ID NO: 22508 - DNA, 2438 bp, Zea Mays
cgaatctcgaatcccgctaatccaaatccatcgagcgggagaaccccgaattccaaaaatccccaaaacccaaccctagctcgctagcctcactgttccccttcgactcttccccttcgcacctctgattcctcgcgccctcgtcccccgctcaatttccagaagcttctagaaccgggtttccagccctaatcccgcaaaaagatgctttcttgcgcctagtagcctgggacggaggcatggacagcggcggcggggagggaggctcgactggcgggaggttccctattctgcaggcgaatagggaccccgagtcaaattgggaggtggacgttgccaaaagcctcgagcagtacctgctcaagatctgttcaggggaggtctccggcgaggacgagtcccattctgtcaactttgccgaagcggcgttactactccaaggatcggttcaagtatacagtaggaaggtggagtacttgtactccttggtgcttcacgcgatagagttcctctcacacaagaaacaggatcaacaggaaaatgtaacagctcaatctaatcaaagcgaccctagcacgattcccagtgaagattatatatttatggggttagatgatgtcctaatggaaacaaggacgtctctggataacaatgttgaccgagatgatttacaaagaaaaattgtgaggccaccagcaaatctactggtgtttgaaggggacgttctggatagtgaagcgagtgagctagactcatatttgttatcaacatgtgatttttatggagatttccttctgctggatccttgtgatgcaccatctgtttttgactttctgcaaggaaaacattctggtaaagaaaatagtgtggctcgccaaggcagtccagcaccttctaaaagccaagccaatgttttcacttccccaaatgcaagatcagcgggcacaggctgtaaagccgcctctggaaaagtcctaggaggtctagattcaactcagaagaatcctgaccaaccttcaactcaagaaaccagtccagatgacaaacattggtctgatcctgttgaacctaactttactgatgatgttgaaaagcctcacccagacgatataggggatcctgttggagattattctgatgacgaggatccgtggaaacctttaaatccacatgaacctggcagcttaaagattcggccttacaggagagtgaaaggttctctacggggggttattggcactttgagaaagaaaactctcacatctatatttcctgtggcaaagatggttggtgtcatcatacctgaacatgctaaatcttttgaagcacagcagtctcagcaggaggaacattatggttcccaatcaccccctcgttttgaaaagtatttggcatcatttgaatttggagaagaaaattccaatgtgtttggagatctgaaagatgacaatggatccgatattggcattaattttgattataatgatccagacatgccaaacgacatagatgttgatcctgacgttccaacatatcctgacgagattattgctgcaactcccaaaggtactcatggtacacaggatgacagagatacacgtgaaagcctcgatgacttgtgtcggtcacatctgaatgctctccttgccagcattgctgaggttgaaaagcagagtgagatggatgctcgagtttcaacatggaaagaaagaatcgagattgccttggaagagcaggataaaaacccaccttttgatatcggttcatacggggagcaaatccttgacgcgctttcatcaagaactgacagcacaggaactgcatcttttagcgagattgtttgtggcagaccgaagtatgaggttgccagaacattctctgcccttctccagctggtaaacagcagaagtgtttatctggacaaaggacaagccacgaatgagttggtgtgttacacagctgagaatccattccatgtaaggctcatcagtcccaaccggaggccagagatggaggcacactttgctcggaagagagtcaagtccccactgcgaaacgctggcaaaggtggtgagtcctccctggcacgacatgagtgccccaagaagccattgcataaaaatggcaagattcaagtcaagacggcgatcaggttgactccagacgggaagcgaaggcgaagtggcggtttcattggcaggcaacgactgctgtgcaatcagctcccttgacgagacagtgaccatggttcctggttcagatggcgtactgctgacattaggcctagctagcgggtgtacatgtaacatgtacaatagttcattgtgctgttttgtacgtatttgtatcagctctcaagcctaatgctaacagggcaagatttgtctaccgacttgccgttttatacctaatgatattggtagattctttcctggttc

SEQ ID NO: 22509 - DNA, 2582 bp, Zea Mays
cgaatctcgaatcccgctaatccaaatccatcgagcgggagaaccccgaattccaaaaatccccaaaacccaaccctagctcgctagcctcactgttccccttcgactcttccccttcgcacctctgattcctcgcgccctcgtcccccgctcaatttccagaagcttctagaaccgggtttccagccctaatcccgcaaaaagatgctttcttgcgcctagtagcctgggacggaggcatggacagcggcggcggggagggaggctcgactggcgggaggttccctattctgcaggcgaatagggaccccgagtcaaattgggaggtggacgttgccaaaagcctcgagcagtacctgctcaagatctgttcaggggaggtctccggcgaggacgagtcccattctgtcaactttgccgaagcggcgttactactccaaggatcggttcaagtatacagtaggaaggtggagtacttgtactccttggtgcttcacgcgatagagttcctctcacacaagaaacaggatcaacaggaaaatgtaacagctcaatctaatcaaagcgaccctagcacgattcccagtgaagattatatatttatggggttagatgatgtcctaatggaaacaaggacgtctctggataacaatgttgaccgagatgatttacaaagaaaaattgtgaggccaccagcaaatctactggtgtttgaaggggacgttctggatagtgaagcgagtgagctagactcatatttgttatcaacatgtgatttttatggagatttccttctgctggatccttgtgatgcaccatctgtttttgactttctgcaaggaaaacattctggtaaagaaaatagtgtggctcgccaaggcagtccagcaccttctaaaagccaagccaatgttttcacttccccaaatgcaagatcagcgggcacaggctgtaaagccgcctctggaaaagtcctaggaggtctagattcaactcagaagaatcctgaccaaccttcaactcaagaaaccagtccagatgacaaacattggtctgatcctgttgaacctaactttactgatgatgttgaaaagcctcacccagacgatataggggatcctgttggagattattctgatgacgaggatccgtggaaacctttaaatccacatgaacctggcagcttaaagattcggccttacaggagagtgaaaggttctctacggggggttattggcactttgagaaagaaaactctcacatctatatttcctgtggcaaagatggttggtgtcatcatacctgaacatgctaaatcttttgaagcacagcagtctcagcaggaggaacattatggttcccaatcaccccctcgttttgaaaagtatttggcatcatttgaatttggagaagaaaattccaatgtgtttggagatctgaaagatgacaatggatccgatattggcattaattttgattataatgatccagacatgccaaacgacatagatgttgatcctgacgttccaacatatcctgacgagattattgctgcaactcccaaaggtactcatggtacacaggatgacagagatacacgtgaaagcctcgatgacttgtgtcggtcacatctgaatgctctccttgccagcattgctgaggttgaaaagcagagtgagatggatgctcgagtttcaacatggaaagaaagaatcgagattgccttggaagagcaggataaaaacccaccttttgatatcggttcatacggggagcaaatccttgacgcgctttcatcaagaactgacagcacaggaactgcatcttttagcgagattgtttgtggcagaccgaagtatgaggttgccagaacattctctgcccttctccagctgcagaagtgtttatctggacaaaggacaagccacgaatgagttggtgtgttacacagctgagaatccattccatgtaaggctcatcagtcccaaccggaggccagagatggaggcacactttgctcggaagagagtcaagtccccactgcgaaacgctggcaaaggtggtgagtcctccctggcacgacatgagtgccccaagaagccattgcataaaaatggcaagattcaagtcaagacggcgatcaggttgactccagacgggaagcgaaggcgaaggtcagtcactcatctaatgcagccgatcaatctggaatcagcggatgaatgccaatggcagactgactcatgggcatctagagcctgatcgccaatggcagactgactgatgggcatctagagtctgattcttctaattgttgcaacttcagtggcggtttcattggcaggcaacgactgctgtgcaatcagctcccttgacgagacagtgaccatggttcctggttcagatggcgtactgctgacattaggcctagctagcgggtgtacatgtaacatgtacaatagttcattgtgctgttttgtacgtatttgtatcagctctcaagcctaatgctaacagggcaagatttgtctaccgacttgccgttttatacctaatgatattggtagattctttcctggttc

SEQ ID NO: 22510 - DNA, 1986 bp, Zea Mays
agtttagggtttggagacggccgtcatccctcgcgcagcgcggctaatcgttcgacacggagacgaccgccgccggcagccgagctgatcagtctgtatctattccccacgggagcaaaagcaaggttggcgaatgtcaaggagcttgacaggtagtctgtagctccctcggttgccgattcggtcggaggcgcagggaaccccgatgataaccataacttcctgatgattagcattgtttgcacaaagaacggagatcttaatgcgcatcccgtcgaagcctgcttggtcgcctcagctcgttgccatctctactactccctccgtttcaaaatatataagtagttttctctcgagggaaactacaaccacacacacacacacacatgatgtatacatttatgttagtgtatgtatatcctctgctcctcgtccaccacttggctggccgagcaggctccgggaaatgcgtctgtagatgcaaaagttatgaaggctgtcccagattggaagaatgccctgcctaaggtaatttttaacttgtttatcgagctttgcattgcagcctgggctgcttctgatttgctcagcatcacgttaatgatgtcgctttaatttgactgatatatgagttacaatgatggatatttgagttacatgactgatatttgagttacaaacatgcagtattttaccctatgggcaaaattggcagatgatgagaatcaaagacaattgcgtctgctgtgctccttattcatcggggcacaatgtcatgatgaccatgtctaggggaatctctgatgctaatgtgaattttcttatatactccatctcttccaaatcgttagatgttttggcttttatagatatattgcttttgctatgtatctaaataatactccctccgttcataaatagttcataaatatatgacacctcataaacataaacatatgacacggtgaccacccctcttatttaaaaaatattttaaataatgagttatcatttacttactcttcttattcaaaaaaataatgagttatcattaacttttttgtgatttgttttatcacttaaaggtagtttgtatttggcttaaaattttatatttttgaatacatattttgaataagatgagtggtgaaaattttcgaaaaggtgttatatatttgtgaacggaggtaatatatatctatgtatatctaagtgcatgtcaaatggagtagggtaggttacaagccggataggctgatgtgtgtagaaccatgcgagtgttagacctcttttgaatcagaataatgcattgtaggatttttttatggtcctaaaagttttctgccatctcatctgtgactatgagagaagccattttggttcgtttagtttgtcttggctgcctgtatgccacaccgtggcatctttcttctcagctgtgttggattatgttttctatgttctcaaatgcttcttctgattcacaaatatactatcttaggctctctttgtgtatataagattgtgtatataagattactccctatcccactcttatatctacttaatatttcaaacttcgctcactatttcaaacttcgctctgcgacagtgcaatacttctcaaaacagtacttttacatggcctgctgacttctcttgaggtggatctcatgcagatatgatttagggagagatggtgtctgccaatgggagcatacattagctctgatcctgtgaagcgtgtcagtcaagaccatatagacagcagtagtaagaaccacccgaaaacaggcgagtcaccaagccatattgtatcagcgacgatgaaaatcatgttctcattctggatgttaaatttgagaccaaaagatggtgtattcgttcaagtgattttgtatcctattcatagttcccttaactgaaaaaatatgttccttttgtatgccctatccttatattagcatgaaaccattggcctgcaag

SEQ ID NO: 22511 - DNA, 972 bp, Zea Mays
ccaaactggcgcgggtgttttctccataataccaaactggcgaagcacggctgcggagtaataaagtggcgaagccgcccgacgagaatgttacaaattcaaataactccaccggcaagtcccctccgccgtccttcagtaccggaagaaggcgaggcgcccaaccgagagcaccaggggaaaggaagtgcgcctaggcatcgacatggaggacttctacgtcacgatcctctacggcctgctgctcgtagccggcggcgtagccggctacatgaagcgcggcagcgccgcgtctctggtcgccgggggcggattcggcgctgcgctccttctcgctggtgcgctcagcgcctgggccttcgcgcacggcagaggtggcgctgccgccatctttgccaccgtccttcagatcgtttgtgctgtgctattgactgttgtcatgggaataagatacgtcaaaacacaaaagataatgcctgctggaattgtcgcttctatcagtgcactcgtactgatattttacgtgtacaagatatctaccggtggcaacaaggtttatatgtcggtgagtgccgagtgaatctgctgggcgtgtggtgttccgtgtacatgtttgtacggcagctaaatgtgaagacaacaaaatcatctgtgtatcaattgtattttagtgaggcaaacactgtaccaaacaatgatggcatgagttagttaagatgtggatgtggacacatgttcaatttaagctttttgatagtacttgttaaattgctgcaacttcctccatcaatgatgacacacgacacttcaaaattaaaagaaattgagtttcaaaatctaagaatttaaaacaaatacctgagcctctaaacgaacccatgaatgaatttgcaatggtcaagaagaatattttgtctggctttaaaaattcagggtgtgtgctgttcagtattgaagtttgagagggtcttt

SEQ ID NO: 22512 - DNA, 960 bp, Zea Mays
acaaattcaaataactccaccggcaagtcccctccgccgtccttcagtaccggaagaaggcgaggcgcccaaccgagagcaccaggggaaaggaagtgcgcctaggcatcgacatggaggacttctacgtcacgatcctctacggcctgctgctcgtagccggcggcgtagccggctacatgaagcgcggcagcgccgcgtctctggtcgccgggggcggattcggcgctgcgctccttctcgctggtgcgctcagcgcctgggccttcgcgcacggcagaggtggcgctgccgccatctttgccaccgtccttcagatcggcacgctgctatcactcccgtcttcactgaactgaaaactcttatggaagtaggaattgattgactacttcagtaacgtgtttgtgctgtgctattgactgttgtcatgggaataagatacgtcaaaacacaaaagataatgcctgctggaattgtcgcttctatcagtgcactcgtactgatattttacgtgtacaagatatctaccggtggcaacaaggtttatatgtcggtgagtgccgagtgaatctgctgggcgtgtggtgttccgtgtacatgtttgtacggcagctaaatgtgaagacaacaaaatcatctgtgtatcaattgtattttagtgaggcaaacactgtaccaaacaatgatggcatgagttagttaagatgtggatgtggacacatgttcaatttaagctttttgatagtacttgttaaattgctgcaacttcctccatcaatgatgacacacgacacttcaaaattaaaagaaattgagtttcaaaatctaagaatttaaaacaaatacctgagcctctaaacgaacccatgaatgaatttgcaatggtcaagaagaatattttgtctggctttaaaaattcagggtgtgtgctgttcagtattgaagtttgagagggtcttt

SEQ ID NO: 22513 - DNA, 610 bp, Zea Mays
ctgaactgaaaactcttatggaagtaggaattgattgactacttcagtaactttgtgctgtgctattgactgttgtcatgggaataagatacgtcaaaacacaaaagataatgcctgctggaattgtcgcttctatcagtgcactcgtactgatattttacgtgtacaagatatctaccggtggcaacaaggtttatatgtcggtgagtgccgagtgaatctgctgggcgtgtggtgttccgtgtacatgtttgtacggcagctaaatgtgaagacaacaaaatcatctgtgtatcaattgtattttagtgaggcaaacactgtaccaaacaatgatggcatgagttagttaagatgtggatgtggacacatgttcaatttaagctttttgatagtacttgttaaattgctgcaacttcctccatcaatgatgacacacgacacttcaaaattaaaagaaattgagtttcaaaatctaagaatttaaaacaaatacctgagcctctaaacgaacccatgaatgaatttgcaatggtcaagaagaatattttgtctggctttaaaaattcagggtgtgtgctgttcagtattgaagtttgagagggtcttt

SEQ ID NO: 22514 - DNA, 1768 bp, Zea Mays
gttatcttaaaccactacattgatattatataaacatgtccacaatcatcagtacgatagcactaataatggatcgtcagttttatataatttagatattctttttttagattacgtagtataagtgcataacgcatatgctcgtacactcatttttttctataaacgtacacgctcaaatttcactaatcggtaaattcttaacaaagtcgccacaaaaaaatctcgttattaccaatggctctcgtggctacaaaccctttcgcatttggacagtggttattaaagcaaaaaacaaaaaggaaaagaaggtttgccttatgattgctaacaagacgaagaagaaagataccttcgcagcgacacatgtacgtagaattagaaaaaaaaaatgtaagacggcctttcacaaccttttccaaacagtatatactaagccggcctgttaaataaataaaggcaaaacaaaaaaaacggttcacgcacgatgtgacaggacatctagtgaagacaaatgtggtcagaggaggctccccaaccccgaggaggaagaaggggcagcagcatttacaaggcagaggggggacacgaggagagttgcgctcctcaagtcacggcagcaggccctcacttgacttcaattctgcgcagaagagcagaagtctgcggcccctccgttcctccagctccagtcccagtcccagtcccagaccatgccttgcgccgccaccgagctcgtccatggcgagggaggcacggtcaaggtaggcacaacgggcaccatcggctcgctcatgacaagggagctggactccaccaaggtggcggcgccgcaggcagccgcggccgcggccgcgggcgccccaccgctgaggcgccaaggcggcccggtctcggtgccgtgtggcgccaccactccccggaagctcatgctgaggaagagctcgtccgacgtctccagcagcagcagcagcaacagaaccggccgcgtgggcaccgaagaggcgtgcaagccgaggagggcctcgcggacgaacaccttcgactcaccgatgctgcggcccgacggcggcgcgctggtggaccgggccccgagcgccggcagggcgaagaagaaggggacgagcgtgggcgtgcacggcggcggggtccaggtggtggacgtcaagtgcggcaacccgatgagcatgagcagccggctcaggaagctcggcttctccaagctgtcgcagacgtttgcgtagcttcaattctgtgcagtggagcatggcgaggggccgagggcaaaggaccagcgccagcatcggaattgaagggtctgcttgctgctgccctttccttgagggcgtcttcggctttggaggacatctgccatgtgctggatttagtgcagcaatcattcactaacagtgtgagtgtccattcggtccggccttgtgggctgccactgccatccagttcgcatctagctgtagtcgctttttctagctgtttttttctccactatgtggaaactgctgttgcgctctgtgtatggatgatgtgttcaactgtaggtgcaagagcaccttgattagatcttctattttttttctgctttataatatataaacagttataggagggcaacaactaatgtgtaagcagtacttaaatggagcgagccttagtgttagccgcaaactagcaactgaacgtcaaaagtcagcatagtatttgcgaaacaaaatgcccgttctcacaactacagcaaaaatgcacatgcagt

SEQ ID NO: 22515 - DNA, 4124 bp, Zea Mays
gcatgacggtgcttcggtcggaaaatgcaagacaatacgacgtagtttcttttgtttgtttgactgaatggaccatcagactagactcacacacttttctagagcacacaaaacaactagttccagggaaatggaattggatctcgtttttgctagcctgagctttgggtcacgtgaaaagttgcttgtgaatgtaggaggtctagatggacgtaggcaaaaaaatacaggatctgtcaaacaaacagtgtagttcgagaataccatccacatccaggccgaccctgagggatgtgactccgaccgtctgagcgctcacagttctttgtgatcctttttcacgagagagagagagtagagggaacgaaaaaggtcactttttttctgtagcaggaatccaatcgcaatttgcgagggcacaaagctgctctaccatttccgtgccccacgagtacctgtctttccactctcgcatccgctgcttcctcaaaaagaccccctacgaatccgcgccagcatctggttactcttgtcccccactaggagctggaaccaagaaccccgaatgcggcttcgtggcgctcgcctgtggacgtggattgtctccgtccgcttctcgcttggttctggcttcctagttcgcaccacggcaccgcaaagcagatggtagtcgactagggattaaccccagctctgctcgccattccggtccgtcgagtatttcgtcgaacagttggtaggggacctctagaacggatgggcagaggacaggatgagtcggtttcgtgattctcgaaatctagtcatgccttcagctttctcgcggtcaatcaatccatcgctcatccggttgtaattgccgaatgggtagtcaagaaaccagatgagctcttcgggttcctgtatgcgacctctgtcccccgtttcatgctctgcggactacgtataactgaagaatctgttcggacaccaaattaaggtcgttggcaagacgggtactcttttcttggtcctcgggaagatgggctctgctcactttgctgccctgcttctgtgcgcctgcttgttcgtcagtggaaccgtggcagctgaccagaacggtaacctcacaaggccagctgaggtgcgcatcggtgcactgttcacgtttggttcggttatcggaatggcggtgagacctgctatcgagctcgccgttgcggatgtcaatgctgaccctagcttactctgggggacgaaactgagtgttcttatgcaggacaccaattgcagtggctttgttggcaccatagaagcttctggctaaagatgtagtcgccgtattaggtccacaatcctcggctgttgctcatgtcatttcccatgctgtcaacgaactccatgtcccacttatctctttcgcggccactgatcctaccctttcttcccttgaatacccgtattttgtgagggctactcagagcgattactaccaaatgggtgctatcgctgccatcattagtcaatatgaatggaaacaagtcattgccatatatgttgatgatgactacggtagaggtggcatcactgcactaggtgatgcccttgcaaaaaggaagtgcaagatatcctacaaagctaagttgccacctggtgctgcaaaaactactatcgaggatatcttgatgcaggtaaatgacatggagtctcgcgtctatgttatccacgttaaccctgactctggtcttaacgtgttctcagctgcaaaatctttgggcatgatgagcagtggctatgtatggattgcaacagactggctttctgcagtgatagattcttctgtgcatggtattcctgatgtgatggaacttacacagggtgttcttgtgcttcggcagcatatagctgattctgatatccagcatgcctttttgtccaagtggaataatctaactaggaatggaagctcttactttatgcatgcttatgactctgtatggctagttgctcatgctgttgagcgctttctgagagaagggaatgccatgtctttttctgctgacccaaaattgcaagctaaaaagggaagtagccttcagttagattctctgaggattttcaacagtggagataaactactggagaaagtgtggagtgcaaacttctcaggggtttctggtccagttcaatttactttggaccgagatttggtacacccagcctacgatattctgaatattggtggtacgggattaagaaccattgggtattggtcaaattcttctggtctctcagctgttgctccagaaaacttaagctcatcagcacgggactcttcagccaacaatgtacaactccgtggtgttatatggcctggtcagacttctgagaaacctcgtggttgggtgttttcgcatcacgggatgcctatgaggatcggggtaccactccgaacgagctacaaagaatttgttatgcaagacgatggtcctgacggagtaaaggggttcgcagttgatgtcttcaaagctgcaataagtttgttgccctacccagtctcatgcaagtttgttttgttcggcgatggtttgaagaatcctagctacagtgaacttgttcagaaggtatctgaaaattacttcgacgccgcggtaggggacatagctatagtgacgaatagaacaagacttgttgattttacccaaccatatatagaatcgggtctcatcattgtagctccggcaagggtgattgaatcaaacgcttgggctttcttgaaaccattcacattccagatgtggtgtgttctagttgttatattcctctttgtgggtgcggttgtttggatactcgaacaccgcagtaataccgagttccgtggacctccaagccaacaaatcatgacagtgtgctggtttagtttctccaccatgttctttgcacacagagagaacacagttagcgcgcttggcagatttgtgctgcttatctggctcttcgctgtgctcattattaactcgagctacacggcaaacctgacatcgcttctcacggttcaggagctgacttcagggatacagggcctcgatagcttgatatctagttcgagtgcgattggctaccaagttggatctttctccagaaactacctcgtggacgagctcagtatcgcagagtcccgtctggttgcactaaacagcccatcggattatgcgagagcgctagagctaggttcaggaaacggtggcgtcgccgcaataatcgacgagctcccgtatgtcgagatcttcctgtcgaaatactgcaagttcaagacggttggtcaggttttcacaaaaagcggatggggatttgccttcccaagagactcccctctcgccgaggacttgtcgacggcaatcctggcgctatcggagaacggcaagctccagaagatgcacgacgagtggttgagcgggacggagtgcagtgcagacaacggggctgggccgtcgaactccttgagcctgtcgagcttctggggcctcttcctcatatgcggcctcgcatgcttcctcgccctcgtgattttcttcctccggatattctgccagtacagcagatacagtaaccaggtcgaggcgcagttcgctgagccccgggttctgaacaggccggcgaggctaactaccatcaagtcgctgatctctttcgttgataagaaggaggaggaggtgaagaacgctctcaagaagagacccaatggtaccggtcagcagcatccaagcactcccaacgcggaagaacagcccacattaccaccgtgaggtctacgtaacgtcccgctgcgtaactaatgactgccaaaataatgtggaatcctgctttgaagcgaaagttgtactaacgcacaggcctagttgatgctgctgaaggggtttttcctgtatgtggctttctggctgtggaaacatagcatcggaatcagcttcagactattgtcttcagagaaaatgcaactgcgttaggttaggttgtatttttccaacagcagcgaatctgggcctcctaggccctagcagcaatatctgggagaagtagaattggacttccgtcaatatgtgggcagttgtgcatgtcccttcatattgtctgttaagaagtag

SEQ ID NO: 22516 - DNA, 3701 bp, Zea Mays
gcatgacggtgcttcggtcggaaaatgcaagacaatacgacgtagtttcttttgtttgtttgactgaatggaccatcagactagactcacacacttttctagagcacacaaaacaactagttccagggaaatggaattggatctcgtttttgctagcctgagctttgggtcacgtgaaaagttgcttgtgaatgtaggaggtctagatggacgtaggcaaaaaaatacaggatctgtcaaacaaacagtgtagttcgagaataccatccacatccaggccgaccctgagggatgtgactccgaccgtctgagcgctcacagttctttgtgatcctttttcacgagagagagagagtagagggaacgaaaaaggtcactttttttctgtagcaggaatccaatcgcaatttgcgagggcacaaagctgctctaccatttccgtgccccacgagtacctgtctttccactctcgcatccgctgcttcctcaaaaagaccccctacgaatccgcgccagcatctggttactcttgtcccccactaggagctggaaccaagaaccccgaatgcggcttcgtggcgctcgcctgtggacgtggattgtctccgtccgcttctcgcttggttctggcttcctagttcgcaccacggcaccgcaaagcagatggtagtcgactagggattaaccccagctctgctcgccattccggtccgtcgagtatttcgtcgaacagttggtaggggacctctagaacggatgggcagaggacaggatgagtcggtttcgtgattctcgaaatctagtcatgccttcagctttctcgcggtcaatcaatccatcgctcatccggttgtaattgccgaatgggtagtcaagaaaccagatgagctcttcgggttcctgtatgcgacctctgtcccccgtttcatgctctgcggactacgtataactgaagaatctgttcggacaccaaattaaggtcgttggcaagacgggtactcttttcttggtcctcgggaagatgggctctgctcactttgctgccctgcttctgtgcgcctgcttgttcgtcagtggaaccgtggcagctgaccagaacggtaacctcacaaggccagctgaggtgcgcatcggtgcactgttcacgtttggttcggttatcggaatggcggtgagacctgctatcgagctcgccgttgcggatgtcaatgctgaccctagcttactctgggggacgaaactgagtgttcttatgcaggacaccaattgcagtggctttgttggcaccatagaagcttctggctaaagatgtagtcgccgtattaggtccacaatcctcggctgttgctcatgtcatttcccatgctgtcaacgaactccatgtcccacttatctctttcgcggccactgatcctaccctttcttcccttgaatacccgtattttgtgagggctactcagagcgattactaccaaatgggtgctatcgctgccatcattagtcaatatgaatggaaacaagtcattgccatatatgttgatgatgactacggtagaggtggcatcactgcactaggtgatgcccttgcaaaaaggaagtgcaagatatcctacaaagctaagttgccacctggtgctgcaaaaactactatcgaggatatcttgatgcaggtaaatgacatggagtctcgcgtctatgttatccacgttaaccctgactctggtcttaacgtgttctcagctgcaaaatctttgggcatgatgagcagtggctatgtatggattgcaacagactggctttctgcagtgatagattcttctgtgcatggtattcctgatgtgatggaacttacacagggtgttcttgtgcttcggcagcatatagctgattctgatatccagcatgcctttttgtccaagtggaataatctaactaggaatggaagctcttactttatgcatgcttatgactctgtatggctagttgctcatgctgttgagcgctttctgagagaagggaatgccatgtctttttctgctgacccaaaattgcaagctaaaaagggaagtagccttcagttagattctctgaggattttcaacagtggagataaactactggagaaagtgtggagtgcaaacttctcaggggtttctggtccagttcaatttactttggaccgagatttggtacacccagcctacgatattctgaatattggtggtacgggattaagaaccattgggtattggtcaaattcttctggtctctcagctgttgctccagaaaacttaagctcatcagcacgggactcttcagccaacaatgtacaactccgtggtgttatatggcctggtcagacttctgagaaacctcgtggttgggtgttttcgcatcacgggatgcctatgaggatcggggtaccactccgaacgagctacaaagaatttgttatgcaagacgatggtcctgacggagtaaaggggttcgcagttgatgtcttcaaagctgcaataagtttgttgccctacccagtctcatgcaagtttgttttgttcggcgatggtttgaagaatcctagctacagtgaacttgttcagaaggtatctgaaaatgagctgacttcagggatacagggcctcgatagcttgatatctagttcgagtgcgattggctaccaagttggatctttctccagaaactacctcgtggacgagctcagtatcgcagagtcccgtctggttgcactaaacagcccatcggattatgcgagagcgctagagctaggttcaggaaacggtggcgtcgccgcaataatcgacgagctcccgtatgtcgagatcttcctgtcgaaatactgcaagttcaagacggttggtcaggttttcacaaaaagcggatggggatttgccttcccaagagactcccctctcgccgaggacttgtcgacggcaatcctggcgctatcggagaacggcaagctccagaagatgcacgacgagtggttgagcgggacggagtgcagtgcagacaacggggctgggccgtcgaactccttgagcctgtcgagcttctggggcctcttcctcatatgcggcctcgcatgcttcctcgccctcgtgattttcttcctccggatattctgccagtacagcagatacagtaaccaggtcgaggcgcagttcgctgagccccgggttctgaacaggccggcgaggctaactaccatcaagtcgctgatctctttcgttgataagaaggaggaggaggtgaagaacgctctcaagaagagacccaatggtaccggtcagcagcatccaagcactcccaacgcggaagaacagcccacattaccaccgtgaggtctacgtaacgtcccgctgcgtaactaatgactgccaaaataatgtggaatcctgctttgaagcgaaagttgtactaacgcacaggcctagttgatgctgctgaaggggtttttcctgtatgtggctttctggctgtggaaacatagcatcggaatcagcttcagactattgtcttcagagaaaatgcaactgcgttaggttaggttgtatttttccaacagcagcgaatctgggcctcctaggccctagcagcaatatctgggagaagtagaattggacttccgtcaatatgtgggcagttgtgcatgtcccttcatattgtctgttaagaagtag

SEQ ID NO: 22517 - DNA, 4062 bp, Zea Mays
gcatgacggtgcttcggtcggaaaatgcaagacaatacgacgtagtttcttttgtttgtttgactgaatggaccatcagactagactcacacacttttctagagcacacaaaacaactagttccagggaaatggaattggatctcgtttttgctagcctgagctttgggtcacgtgaaaagttgcttgtgaatgtaggaggtctagatggacgtaggcaaaaaaatacaggatctgtcaaacaaacagtgtagttcgagaataccatccacatccaggccgaccctgagggatgtgactccgaccgtctgagcgctcacagttctttgtgatcctttttcacgagagagagagagtagagggaacgaaaaaggtcactttttttctgtagcaggaatccaatcgcaatttgcgagggcacaaagctgctctaccatttccgtgccccacgagtacctgtctttccactctcgcatccgctgcttcctcaaaaagaccccctacgaatccgcgccagcatctggttactcttgtcccccactaggagctggaaccaagaaccccgaatgcggcttcgtggcgctcgcctgtggacgtggattgtctccgtccgcttctcgcttggttctggcttcctagttcgcaccacggcaccgcaaagcagatggtagtcgactagggattaaccccagctctgctcgccattccggtccgtcgagtatttcgtcgaacagttggtaggggacctctagaacggatgggcagaggacaggatgagtcggtttcgtgattctcgaaatctagtcatgccttcagctttctcgcggtcaatcaatccatcgctcatccggttgtaattgccgaatgggtagtcaagaaaccagatgagctcttcgggttcctgtatgcgacctctgtcccccgtttcatgctctgcggactacgtataactgaagaatctgttcggacaccaaattaaggtcgttggcaagacgggtactcttttcttggtcctcgggaagatgggctctgctcactttgctgccctgcttctgtgcgcctgcttgttcgtcagtggaaccgtggcagctgaccagaacggtaacctcacaaggccagctgaggtgcgcatcggtgcactgttcacgtttggttcggttatcggaatggcggtgagacctgctatcgagctcgccgttgcggatgtcaatgctgaccctagcttactctgggggacgaaactgagtgttcttatgcaggacaccaattgcagtggctttgttggcaccatagaagcattgcagcttctggctaaagatgtagtcgccgtattaggtccacaatcctcggctgttgctcatgtcatttcccatgctgtcaacgaactccatgtcccacttatctctttcgcggccactgatcctaccctttcttcccttgaatacccgtattttgtgagggctactcagagcgattactaccaaatgggtgctatcgctgccatcattagtcaatatgaatggaaacaagtcattgccatatatgttgatgatgactacggtagaggtggcatcactgcactaggtgatgcccttgcaaaaaggaagtgcaagatatcctacaaagctaagttgccacctggtgctgcaaaaactactatcgaggatatcttgatgcagctgcaaaatctttgggcatgatgagcagtggctatgtatggattgcaacagactggctttctgcagtgatagattcttctgtgcatggtattcctgatgtgatggaacttacacagggtgttcttgtgcttcggcagcatatagctgattctgatatccagcatgcctttttgtccaagtggaataatctaactaggaatggaagctcttactttatgcatgcttatgactctgtatggctagttgctcatgctgttgagcgctttctgagagaagggaatgccatgtctttttctgctgacccaaaattgcaagctaaaaagggaagtagccttcagttagattctctgaggattttcaacagtggagataaactactggagaaagtgtggagtgcaaacttctcaggggtttctggtccagttcaatttactttggaccgagatttggtacacccagcctacgatattctgaatattggtggtacgggattaagaaccattgggtattggtcaaattcttctggtctctcagctgttgctccagaaaacttaagctcatcagcacgggactcttcagccaacaatgtacaactccgtggtgttatatggcctggtcagacttctgagaaacctcgtggttgggtgttttcgcatcacgggatgcctatgaggatcggggtaccactccgaacgagctacaaagaatttgttatgcaagacgatggtcctgacggagtaaaggggttcgcagttgatgtcttcaaagctgcaataagtttgttgccctacccagtctcatgcaagtttgttttgttcggcgatggtttgaagaatcctagctacagtgaacttgttcagaaggtatctgaaaattacttcgacgccgcggtaggggacatagctatagtgacgaatagaacaagacttgttgattttacccaaccatatatagaatcgggtctcatcattgtagctccggcaagggtgattgaatcaaacgcttgggctttcttgaaaccattcacattccagatgtggtgtgttctagttgttatattcctctttgtgggtgcggttgtttggatactcgaacaccgcagtaataccgagttccgtggacctccaagccaacaaatcatgacagtgtgctggtttagtttctccaccatgttctttgcacacagagagaacacagttagcgcgcttggcagatttgtgctgcttatctggctcttcgctgtgctcattattaactcgagctacacggcaaacctgacatcgcttctcacggttcaggagctgacttcagggatacagggcctcgatagcttgatatctagttcgagtgcgattggctaccaagttggatctttctccagaaactacctcgtggacgagctcagtatcgcagagtcccgtctggttgcactaaacagcccatcggattatgcgagagcgctagagctaggttcaggaaacggtggcgtcgccgcaataatcgacgagctcccgtatgtcgagatcttcctgtcgaaatactgcaagttcaagacggttggtcaggttttcacaaaaagcggatggggatttgccttcccaagagactcccctctcgccgaggacttgtcgacggcaatcctggcgctatcggagaacggcaagctccagaagatgcacgacgagtggttgagcgggacggagtgcagtgcagacaacggggctgggccgtcgaactccttgagcctgtcgagcttctggggcctcttcctcatatgcggcctcgcatgcttcctcgccctcgtgattttcttcctccggatattctgccagtacagcagatacagtaaccaggtcgaggcgcagttcgctgagccccgggttctgaacaggccggcgaggctaactaccatcaagtcgctgatctctttcgttgataagaaggaggaggaggtgaagaacgctctcaagaagagacccaatggtaccggtcagcagcatccaagcactcccaacgcggaagaacagcccacattaccaccgtgaggtctacgtaacgtcccgctgcgtaactaatgactgccaaaataatgtggaatcctgctttgaagcgaaagttgtactaacgcacaggcctagttgatgctgctgaaggggtttttcctgtatgtggctttctggctgtggaaacatagcatcggaatcagcttcagactattgtcttcagagaaaatgcaactgcgttaggttaggttgtatttttccaacagcagcgaatctgggcctcctaggccctagcagcaatatctgggagaagtagaattggacttccgtcaatatgtgggcagttgtgcatgtcccttcatattgtctgttaagaagtag

SEQ ID NO: 22518 - DNA, 4051 bp, Zea Mays
gcatgacggtgcttcggtcggaaaatgcaagacaatacgacgtagtttcttttgtttgtttgactgaatggaccatcagactagactcacacacttttctagagcacacaaaacaactagttccagggaaatggaattggatctcgtttttgctagcctgagctttgggtcacgtgaaaagttgcttgtgaatgtaggaggtctagatggacgtaggcaaaaaaatacaggatctgtcaaacaaacagtgtagttcgagaataccatccacatccaggccgaccctgagggatgtgactccgaccgtctgagcgctcacagttctttgtgatcctttttcacgagagagagagagtagagggaacgaaaaaggtcactttttttctgtagcaggaatccaatcgcaatttgcgagggcacaaagctgctctaccatttccgtgccccacgagtacctgtctttccactctcgcatccgctgcttcctcaaaaagaccccctacgaatccgcgccagcatctggttactcttgtcccccactaggagctggaaccaagaaccccgaatgcggcttcgtggcgctcgcctgtggacgtggattgtctccgtccgcttctcgcttggttctggcttcctagttcgcaccacggcaccgcaaagcagatggtagtcgactagggattaaccccagctctgctcgccattccggtccgtcgagtatttcgtcgaacagttggtaggggacctctagaacggatgggcagaggacaggatgagtcggtttcgtgattctcgaaatctagtcatgccttcagctttctcgcggtcaatcaatccatcgctcatccggttgtaattgccgaatgggtagtcaagaaaccagatgagctcttcgggttcctgtatgcgacctctgtcccccgtttcatgctctgcggactacgtataactgaagaatctgttcggacaccaaattaaggtcgttggcaagacgggtactcttttcttggtcctcgggaagatgggctctgctcactttgctgccctgcttctgtgcgcctgcttgttcgtcagtggaaccgtggcagctgaccagaacggtaacctcacaaggccagctgaggtgcgcatcggtgcactgttcacgtttggttcggttatcggaatggcggtgagacctgctatcgagctcgccgttgcggatgtcaatgctgaccctagcttactctgggggacgaaactgagtgttcttatgcaggacaccaattgcagtggctttgttggcaccatagaagcattgcagcttctggctaaagatgtagtcgccgtattaggtccacaatcctcggctgttgctcatgtcatttcccatgctgtcaacgaactccatgtcccacttatctctttcgcggccactgatcctaccctttcttcccttgaatacccgtattttgtgagggctactcagagcgattactaccaaatgggtgctatcgctgccatcattagtcaatatgaatggaaacaagtcattgccatatatgttgatgatgactacggtagaggtggcatcactgcactaggtgatgcccttgcaaaaaggaagtgcaagatatcctacaaagctaagttgccacctggtgctgcaaaaactactatcgaggatatcttgatgcagctgcaaaatctttgggcatgatgagcagtggctatgtatggattgcaacagactggctttctgcagtgatagattcttctgtgcatggtattcctgatgtgatggaacttacacagggtgttcttgtgcttcggcagcatatagctgattctgatatccagcatgcctttttgtccaagtggaataatctaactaggaatggaagctcttactttatgcatgcttatgactctgtatggctagttgctcatgctgttgagcgctttctgagagaagggaatgccatgtctttttctgctgacccaaaattgcaagctaaaaagggaagtagccttcagttagattctctgaggattttcaacagtggagataaactactggagaaagtgtggagtgcaaacttctcaggggtttctggtccagttcaatttactttggaccgagatttggtacacccagcctacgatattctgaatattggtggtacgggattaagaaccattgggtattggtcaaattcttctggtctctcagctgttgctccagaaaacttaagctcatcagcacgggactcttcagccaacaatgtacaactccgtggtgttatatggcctggtcagacttctgagaaacctcgtggttgggtgttttcgcatcacgggatgcctatgaggatcggggtaccactccgaacgagctacaaagaatttgttatgcaagacgatggtcctgacggagtaaaggggttcgcagttgatgtcttcaaagctgcaataagtttgttgccctacccagtctcatgcaagtttgttttgttcggcgatggtttgaagaatcctagctacagtgaacttgttcagaaggtatctgaaaattacttcgacgccgcggtaggggacatagctatagtgacgaatagaacaagacttgttgattttacccaaccatatatagaatcgggtctcatcattgtagctccggcaagggtgattgaatcaaacgcttgggctttcttgaaaccattcacattccagatgtggtgtgttctagttgttatattcctctttgtgggtgcggttgtttggatactcgaacaccgcagtaataccgagttccgtggacctccaagccaacaaatcatgacagtgtgctggtttagtttctccaccatgttctttgcacacagagagaacacagttagcgcgcttggcagatttgtgctgcttatctggctcttcgctgtgctcattattaactcgagctacacggcaaacctgacatcgcttctcacggttcaggagctgacttcagggatacagggcctcgatagcttgatatctagttcgagtgcgattggctaccaagttggatctttctccagaaactacctcgtggacgagctcagtatcgcagagtcccgtctggttgcactaaacagcccatcggattatgcgagagcgctagagctaggttcaggaaacggtggcgtcgccgcaataatcgacgagctcccgtatgtcgagatcttcctgtcgaaatactgcaagttcaagacggttggtcaggttttcacaaaaagcggatggggatttagactcccctctcgccgaggacttgtcgacggcaatcctggcgctatcggagaacggcaagctccagaagatgcacgacgagtggttgagcgggacggagtgcagtgcagacaacggggctgggccgtcgaactccttgagcctgtcgagcttctggggcctcttcctcatatgcggcctcgcatgcttcctcgccctcgtgattttcttcctccggatattctgccagtacagcagatacagtaaccaggtcgaggcgcagttcgctgagccccgggttctgaacaggccggcgaggctaactaccatcaagtcgctgatctctttcgttgataagaaggaggaggaggtgaagaacgctctcaagaagagacccaatggtaccggtcagcagcatccaagcactcccaacgcggaagaacagcccacattaccaccgtgaggtctacgtaacgtcccgctgcgtaactaatgactgccaaaataatgtggaatcctgctttgaagcgaaagttgtactaacgcacaggcctagttgatgctgctgaaggggtttttcctgtatgtggctttctggctgtggaaacatagcatcggaatcagcttcagactattgtcttcagagaaaatgcaactgcgttaggttaggttgtatttttccaacagcagcgaatctgggcctcctaggccctagcagcaatatctgggagaagtagaattggacttccgtcaatatgtgggcagttgtgcatgtcccttcatattgtctgttaagaagtag

SEQ ID NO: 22519 - DNA, 1881 bp, Zea Mays
cccgactgcatccatcccgttcctaccgcggccggtgtaggtagccacgcccgccacgcccgtccgcggccacgaccagttcgagaaaggcgtgcgcatgccgtctatggcgcctccgctataaggaggagaagcaagcgcgcaaggccagcaaaaagcgtcgcggagccacgaccacgacccctattttggcacgcccgtcccccgcttatacgccgcgccggcgaggtcgctgctccgaatcaccttcccttcctattccctctctctctctctctctctctctctctctctctctctctctctctctctcccgcccgctccgcggcctcctcctctacccgccccacaaaccaaggccctccgctgtctgcacggcgacggcggtgcatgggcggcgggcgcgccgggacgacgacgacgacgaccgcgccgccatgaccaccaccaccacggccgcggccgcggtcgcgcagctctgcgccgggccacggcggcgcaagcaggcagcaggggctcggctcgacctgcgctgggcgcgcctgctccgcctcgccgtcgtcaccagggtgctccgcctcgcgcgcgaccagctgctcgcctgctcctcctgcgggggcggcaccgccgcccgccgccggtaccgccgcctcggcccgcccaccagcgccagcgccggtcccgtgctgtcacccgtcgacagggacgacgactgcgccgcggacgccgaggccgcggcccctcgcgacgcggccgacgacgaagacaacgttgtcagcctcaaggttaagtatgtgggagatgacggggaggagcagaacggcttgcagatgacgggcctgaatctcatggacaagacgatgcccgtcaggggagcaaggattgcctacagcatctgggatgtggcaggagaccaccagtccgtcgaccacgtcccaatcgcgtgcaaggacgccgtggcgatcctgtacatgttcgatctcacgagccgctgcacgcttaataacattgtagattggtacgggagggcgaggaaatggaataagacggctattccaatcctaatcgggacaaagtttgatgactttgctcagcttcctcttgagatgcaatgggccatcgttaaccaggccagagcatacgcaagagcgatgaaggcgaccctcttcttctcgagcgcgacgcacaacatcaacgtgaacaagatcttcaagttcatcacggccaagctcttcaacctcccgtggacggtggagcgcaacctcaccatcggcgagcccatcatagacttctgacgaccccttcctctaactagtaactcggcagcacacgcacgacgacccttggtatatatcatgggttgacagggtcgtgtctttcgatcctcttgccctgtgcgagccgccggagccatgaagtgaccgagcatgcccgtcgtcctcttcctcctggtggccggctgcagcaggcaagatgccctttgtaaatatagccataggtgacggtcccgcgtgcgtgcggccgtgcgggagcgtcgtcaaatgggaagaaaaccgcgaggtgtgactgtgatgtaacaccccgtctgtaacattcgccagagtatataggaaatccatgttaatataccctccattccaactgacaaaggcatgcgctggcgcgtggcggcttgctgccggtgcagaacctcttctttctcctcacccgggcctatttggttcagcttttttctgaccagtttttctgagaatctagctgtggaaagaatctggctgtgagagaatctgagtattgtgtggattacgtgcggaggaagatgaagtggtccaaagggttcaggatctagaaagcaataaattcctactatcatgacgattc

SEQ ID NO: 22520 - DNA, 590 bp, Zea Mays
accgagtgtgcagcccaatagcatcctgggcgtacggcccatgagaagaacacggcattgattcccggagaaaaccctagactgcggcgggcgccttcccataaaagcacagctcttgtgtccccgccgccgccacctgctgcagcttctcaaccggataggtagcaccggagcaggtagaacgctgcacaatccccttcgccgccgccaagatggtgaacgttcctaagaccaagaagacgtactgcaagaacaaagagtgcaagaagcacacactccacaaggtgactcagtataagaagggcaaggatagcctgtctgcccagggaaagcgccgttatgaccgcaagcagtcaggatatggtggtcagaccaagcctgtcttccacaagaaggccaagaccaccaagaagattgttctgaagctgcagtgccagagctgcaagcactactcacagcacgccatcaagagatgcaagcattttgagattggtggagacaagaagggcaagggcacatctcttttctaagcttctcgtccacctgtctggttgttgagttgaagctcgcatgggaagtagagaaagatg

SEQ ID NO: 22521 - DNA, 1550 bp, Zea Mays
atttattttagtgaaaaaatttaatttcaaatgttatttaattgagtagtcctacctgtactaatcccctttgcatttttgtacatctacaaagtttatttgtgccacaacacattcccttgaaatttctccacacgattttcttattcacaaatcacaacaatgagggactgcgtttttttttgctttgtttgtgatgtcgacttaaattgtgacaagtctgaaaatagcttaccgagaatttctgcaaggctagaaattgacaaaagaatcttcctggaaatattctcatcacaggatgccgtcttgtgaccaagagagacgtatatgtaatgtaggctgcatcctgtgttcctgcaagacttgtaagttgtactgtagctaaaagtttctttttttctctcaattctgaacatgaacatgtgttagactttcttcctttgtagggcatgaacatgtgttagactcatacgagtatatgatcagttgctctagctagctttgaataattcaacaataaaacgaagtctatacaaacatattgcccaaatctaaaaacaaataaatccacagccgattgctgcggttaaacacaatgtataagatcatctctaacaaaatgacctataaaagtgctctataatttaaaatgagtatattttatagaatttaggtcaccaacaaaacattcagtttcaatattaaaacctcacatctagattataggacagatcactgcggtgtagtatatttgagttacttgagagaacgccctataaaattttaaccaaattttataaaatgatgcactgttggagtagtttttagtatcatattttagtttaaggcattgttggagatactccaaaagatacttttccttgatgtctaaaatgcggagcctgaaatgtatgtgtaaataaaccagtcgtttgaagggaaaaagaaggaaacgtatacaacagattttcaaaggaaaaggacgatgcctacaagagtaggaagctccctccttacctccggaaactggacggccctcgcgtgccgcggcctgccggccatactcgtcaacagcgattgcccggggacgagaggcgcgatcaaaacgcggtgcctcgtgttctctagccaagctgtcgccgtttcaccgccggcggcaaggcaagctctggcctggctatctcgccgaacggccgggccgacgacagatcgatcgaacggacgacgcgcgcacccccgcgtgtccccgtcagcggtcagccccaccacctgacgcgcgccgtcccctgtcgtctgtcgacctcctctctcctctagcgaccgtcgatcagctctctcgtcccggcgcgggaggggtccccggtggtggcgcgatacgcgttttcacggctgggagcgcccgcggcccggcgtggcagggcgtcgcgacgcgcgcgggcccgcggcacgggagcgctgcccaccgttggtgcggtccgcgggacaccagacgcctgctgggccagttggttgttgcgttccggcgagatttttttgccccggtggtctag

SEQ ID NO: 22522 - DNA, 2179 bp, Zea Mays
aggtctagagaggtccaggccttcgcccgagccccgccagccactaccaacttgggacgggcaggccggcccgtgttacatacaggcccaggcccagaagccgtcagaagacatccagccctaggctaggcgcacggcggcacgggaggcagacgaggcgagaagtggcaactggcaactggtacctttggggaggcgaggaaggacacgaggtcggtgcgttcgtgcgtgcccttctcactgcacgccagtgagaattgagatcccagcaccgagacgacgacacaagtctcacctccatcctcctttactcctcatcctagatccctctctccgaaccccgccgcccgccgcagatccgaaggtcattggcagccatgatctcgtccagcaagctcaagtccgtcgacttctacaggaaaatacctagggatttgaccgaggcatcactatctggcgctggattatccattgtagcagcattagcaatggtttttttgtttggaatggagttgagcagttacttagcagtcaatactaccacatctgtgatcgttgataggagttcagatggggagtttttacggatagatttcaatatgagctttcctgcgctttcatgtgaatttgcatcagttgatgttagtgacgtgctgggaacaattgaacataacgaaaactgttcgaaagtattcaattgatcggaatttagtaccaactggatcagaattccaccctggccctatccccattctcaataagcatggagatgatgttgaagaggatcacgtggatggtgcattttcattgtcatctcgcaattttgatagcttttcacaccaatatcctgttttggttgtcaacttctatgctccctggtgttactggagcaatcgactgaaaccttcatgggagaagacagcaaaaataatgagggagagatatgaccctgaaatggatggtagaatccttctaggcaaggttgactgcactgaggaagttgaattgtgtaggagaaaccacatacaaggatacccatccattcgtgttttccgtaaagggtctgatataaaggagaatcagggtcaccatgatcatgaatcatactatggtgaacgtgatactgagagtttagtcgcggcaatggaaacatatgttgcaaacatcccaaaagaggctcatgctttggaagacaaatccaataagactgttgatcctgcaaagcgccctgctccaatggccagtgggtgcagaatagaaggctttgtgcgtgtcaaaagggttccagggagtgttgttatctcagctcgatctggatctcactcgtttgatccatcccagataaatgtttcgcactatgtgacacagttctcatttggcaaaagactttccccaaggatgctgcatgaattcataagacttactccctatcttcgtggataccatgatagactagctggccagtcttatactgttaagcatggtgaggttaacgccaatgttactattgagcactacctacaagttgtaaagactgagcttgtaacacagaggtcctcaaaggaactgaaagtgcttgaggaatacgaatacacagcacacagcagcttggtgcacagcttctatgttcctgttgtgaaattccattttgagccttctcccatgcaggtcttggtaactgaagtcccgaaatccttctcccatttcatcacaaatgtctgcgctatcatcggtggggtcttcacggttgctggaatactggattccatctttcacaacacactcaggatggtgaagaagattgagctaggaaagaacatttaaatttcgacgccgctgcaagtttaggcggatgcactaggtagccattgttttgttataactaggtaatgactcatgaaaatcggtatatgaaagatggcgtgctgaattgacggttgaaattcggggggtcatgaaatcatcatataataactagggatctcactgtttcgctaaaccactcacaataagacagtggattgctgctagtgtgccactgtgataagtaaccgagttggataatatattcagtatattatcttgccgtgcttgaattgcgcgtagttcgggttacacagcgtcacctcgatggccacctcagctccggtgggaggacgacggaggtggatagcctccg

SEQ ID NO: 22523 - DNA, 2073 bp, Zea Mays
aggtctagagaggtccaggccttcgcccgagccccgccagccactaccaacttgggacgggcaggccggcccgtgttacatacaggcccaggcccagaagccgtcagaagacatccagccctaggctaggcgcacggcggcacgggaggcagacgaggcgagaagtggcaactggcaactggtacctttggggaggcgaggaaggacacgagatccctctctccgaaccccgccgcccgccgcagatccgaaggtcattggcagccatgatctcgtccagcaagctcaagtccgtcgacttctacaggaaaatacctagggatttgaccgaggcatcactatctggcgctggattatccattgtagcagcattagcaatggtttttttgtttggaatggagttgagcagttacttagcagtcaatactaccacatctgtgatcgttgataggagttcagatggggagtttttacggatagatttcaatatgagctttcctgcgctttcatgtgaatttgcatcagttgatgttagtgacgtgctgggaacaaacagattgaacataacgaaaactgttcgaaagtattcaattgatcggaatttagtaccaactggatcagaattccaccctggccctatccccattctcaataagcatggagatgatgttgaagaggatcacgtggatggtgcattttcattgtcatctcgcaattttgatagcttttcacaccaatatcctgttttggttgtcaacttctatgctccctggtgttactggagcaatcgactgaaaccttcatgggagaagacagcaaaaataatgagggagagatatgaccctgaaatggatggtagaatccttctaggcaaggttgactgcactgaggaagttgaattgtgtaggagaaaccacatacaaggatacccatccattcgtgttttccgtaaagggtctgatataaaggagaatcagggtcaccatgatcatgaatcatactatggtgaacgtgatactgagagtttagtcgcggcaatggaaacatatgttgcaaacatcccaaaagaggctcatgctttggaagacaaatccaataagactgttgatcctgcaaagcgccctgctccaatggccagtgggtgcagaatagaaggctttgtgcgtgtcaaaagggttccagggagtgttgttatctcagctcgatctggatctcactcgtttgatccatcccagataaatgtttcgcactatgtgacacagttctcatttggcaaaagactttccccaaggatgctgcatgaattcataagacttactccctatcttcgtggataccatgatagactagctggccagtcttatactgttaagcatggtgaggttaacgccaatgttactattgagcactacctacaagttgtaaagactgagcttgtaacacagaggtcctcaaaggaactgaaagtgcttgaggaatacgaatacacagcacacagcagcttggtgcacagcttctatgttcctgttgtgaaattccattttgagccttctcccatgcaggtcttggtaactgaagtcccgaaatccttctcccatttcatcacaaatgtctgcgctatcatcggtggggtcttcacggttgctggaatactggattccatctttcacaacacactcaggatggtgaagaagattgagctaggaaagaacatttaaatttcgacgccgctgcaagtttaggcggatgcactaggtagccattgttttgttataactaggtaatgactcatgaaaatcggtatatgaaagatggcgtgctgaattgacggttgaaattcggggggtcatgaaatcatcatataataactagggatctcactgtttcgctaaaccactcacaataagacagtggattgctgctagtgtgccactgtgataagtaaccgagttggataatatattcagtatattatcttgccgtgcttgaattgcgcgtagttcgggttacacagcgtcacctcgatggccacctcagctccggtgggaggacgacggaggtggatagcctccg

SEQ ID NO: 22524 - DNA, 2158 bp, Zea Mays
aggtctagagaggtccaggccttcgcccgagccccgccagccactaccaacttgggacgggcaggccggcccgtgttacatacaggcccaggcccagaagccgtcagaagacatccagccctaggctaggcgcacggcggcacgggaggcagacgaggcgagaagtggcaactggcaactggtacctttggggaggcgaggaaggacacgaggtcggtgcgttcgtgcgtgcccttctcactgcacgccagtgagaattgagatcccagcaccgagacgacgacacaagtctcacctccatcctcctttactcctcatcctagatccctctctccgaaccccgccgcccgccgcagatccgaaggtcattggcagccatgatctcgtccagcaagctcaagtccgtcgacttctacaggaaaatacctagggatttgaccgaggcatcactatctggcgctggattatccattgtagcagcattagcaatggtttttttgtttggaatggagttgagcagttacttagcagtcaatactaccacatctgtgatcgttgataggagttcagatggggagtttttacggatagatttcaatatgagctttcctgcgctttcatgtgaatttgcatcagttgatattgaacataacgaaaactgttcgaaagtattcaattgatcggaatttagtaccaactggatcagaattccaccctggccctatccccattctcaataagcatggagatgatgttgaagaggatcacgtggatggtgcattttcattgtcatctcgcaattttgatagcttttcacaccaatatcctgttttggttgtcaacttctatgctccctggtgttactggagcaatcgactgaaaccttcatgggagaagacagcaaaaataatgagggagagatatgaccctgaaatggatggtagaatccttctaggcaaggttgactgcactgaggaagttgaattgtgtaggagaaaccacatacaaggatacccatccattcgtgttttccgtaaagggtctgatataaaggagaatcagggtcaccatgatcatgaatcatactatggtgaacgtgatactgagagtttagtcgcggcaatggaaacatatgttgcaaacatcccaaaagaggctcatgctttggaagacaaatccaataagactgttgatcctgcaaagcgccctgctccaatggccagtgggtgcagaatagaaggctttgtgcgtgtcaaaagggttccagggagtgttgttatctcagctcgatctggatctcactcgtttgatccatcccagataaatgtttcgcactatgtgacacagttctcatttggcaaaagactttccccaaggatgctgcatgaattcataagacttactccctatcttcgtggataccatgatagactagctggccagtcttatactgttaagcatggtgaggttaacgccaatgttactattgagcactacctacaagttgtaaagactgagcttgtaacacagaggtcctcaaaggaactgaaagtgcttgaggaatacgaatacacagcacacagcagcttggtgcacagcttctatgttcctgttgtgaaattccattttgagccttctcccatgcaggtcttggtaactgaagtcccgaaatccttctcccatttcatcacaaatgtctgcgctatcatcggtggggtcttcacggttgctggaatactggattccatctttcacaacacactcaggatggtgaagaagattgagctaggaaagaacatttaaatttcgacgccgctgcaagtttaggcggatgcactaggtagccattgttttgttataactaggtaatgactcatgaaaatcggtatatgaaagatggcgtgctgaattgacggttgaaattcggggggtcatgaaatcatcatataataactagggatctcactgtttcgctaaaccactcacaataagacagtggattgctgctagtgtgccactgtgataagtaaccgagttggataatatattcagtatattatcttgccgtgcttgaattgcgcgtagttcgggttacacagcgtcacctcgatggccacctcagctccggtgggaggacgacggaggtggatagcctccg

SEQ ID NO: 22525 - DNA, 388 bp, Zea Mays
aattattgccttgagatgcgcctaaaactcaattaataagaggattatggttgctttggtcagccacagagacatctccttcaaagtggttgaagtgtttttgtgagcgcaaacgtcttgtcgcgggagatgcacgtcatatttctcaggtgtcatattatgctgtgatcagcagttaatgtcaggcaccaaaccactatcccatcttcagtcatattaagccacaatatgcatcttggtgttcctacaacagcatggcatgcaaggaattatgagcttggttaaactatttctgtttctatgttcacttttagttgcagggctattgcagtccgttacttaattggtgcatgattcccttgtttattataaaaggatgtttttggat

SEQ ID NO: 22526 - DNA, 520 bp, Zea Mays
gaacaacattcatgtttttagagtgtctgcaagcgacacgcttgctcgtttcatcctctccttccttgtgttgatggacgctccggcctctcctttctcgtatgggcggtgattgtcacggcaacctatctgcactgcatcgagcacgagcaggatgaccgcatcggttgagcactatgcctgccagtcggtcagccacagagacatctccttcaaagtggttgaagtgtttttgtgagcgcaaacgtcttgtcgcgggagatgcacgtcatatttctcaggtgtcatattatgctgtgatcagcagttaatgtcaggcaccaaaccactatcccatcttcagtcatattaagccacaatatgcatcttggtgttcctacaacagcatggcatgcaaggaattatgagcttggttaaactatttctgtttctatgttcacttttagttgcagggctattgcagtccgttacttaattggtgcatgattcccttgtttattataaaaggatgtttttggat

SEQ ID NO: 22527 - DNA, 2176 bp, Zea Mays
gttggagacttggagtgaagctgtccattttcgaccaaccctactcgtctcgtaccgtccaagacggggcaaagaatgcccggggaagccggcgagctggagcctggcggcagcttggcaccgatcgtcctccattcccgtcgctcccgacctcctcctaatttatcccacccggcctccccggttcgccccgaccacatcccccccttaacctcccctcctcctcctcctgcggtcccaactcccatccttcggttcaggagggaggcaggcaggcaggaaggcaggttcgaggagggattggctccgctcctgctccattgcgcgtgatccggctcgttcttttgattgatctaggcgtttcttggattagtcctggaaggtcaaacggttgttggaagcctcgctgggtgcttcaacgaacgcgaaggtgttgctgtcatttagagcgtcttgattggatttgacctgttggcctggtggcgtgccgtcgttgattgagctcgaggatgatcaagtgggggctcagcagcggcacgcccgcggattcctactacgaggtccggtcagattgcacggacggtgtgcccaagagcaagttcaagattaaggctggcaaaacattaagtgctcggaaatggcaggctgcatttagtcctgatggctgtcttgatattgcctcagtcctaagcaggatacagagaggaggtgtccatccaacagtcagaggagaggtttgggaattcttacttggctgttttgatcccagaagtacctttgatgaaagggaagagatcaggcaaatacggaggatacagtatgccagatggaaggaagattgtcgacagatggattctcatgttggtagtggtaaagttatcacagcaccacttatcactgaggatggcagacctattaaggatcctctggttttacttgaggctacttctgacacgaacacttcaggagatgctccaactaccagcataaatggaaatgaagttgatgaatctgcagaacgcattaccgataagcaaattatcgagtggaagctgacattacatcaaattgggcttgacgtcctacggactgatcgcaccatggtattctatgagaacaaagaaaacctttccaaattatgggatattctagccgtgtatgcatggattgacaaagatgttggttactgccaaggaatgagtgatttgtgctcaccaatgatagttctactaaacgatgaagcagatgcattttggtgctttgagaaattgatgcgtagattgcgaggaaatttcagatgcacagatcaatctgtgggagttgccaaccaacttcaacaccttgcgtctattattcaggttcttgaccccaagctacatgaccacctaggcgtgaagtatcatttggagactccttatacctctgggagatgatgtgggctctggaatacgaccctgacattttcttcgcagcgtgtgaagaacaaggtgcagtaaataaaaacaaagtttctaaatccaaactgaaaggactgcgccattttggcaagtgggataataaggataaggacaaggataaggaagatgctaaaaatggggctgaggatggtgaagacggtcctgttccaatttcagttttcatggttgcaagtgtccttaaggaaaagagagaaaagctgttacaagaagctagaggactggacgatcttatcaggatattgaacgatgtaaatgggaacttagatgccaagaaagcttgtgctggagcattgaaacttcacaagaaatacctgaaaaaggtacaagaaaagaaaccttaaacgtgccatggaacacacctacccaatgggttattcttaccatttgaacatacacgaccattttctacacaccacttttgagtgaagatttacaggacaaaggtggtagacgactgacatgttctcagatatggtaccaggctagtgggttgagtacaggatgagtgcaaccggtagtttgtattgtattgtatctcacgttctttgtactcaagaattttgttggctgtacaggcagaaggcggtgcgggtagcatgccttgcgtacataattatttgaatacaagttgaattgaacaccatcttacgactaggagtgttaatgactttaaattttacactataaaatttaaggac

SEQ ID NO: 22528 - DNA, 2261 bp, Zea Mays
gttggagacttggagtgaagctgtccattttcgaccaaccctactcgtctcgtaccgtccaagacggggcaaagaatgcccggggaagccggcgagctggagcctggcggcagcttggcaccgatcgtcctccattcccgtcgctcccgacctcctcctaatttatcccacccggcctccccggttcgccccgaccacatcccccccttaacctcccctcctcctcctcctgcggtcccaactcccatccttcggttcaggagggaggcaggcaggcaggaaggcaggttcgaggagggattggctccgctcctgctccattgcgcgtgatccggctcgttcttttgattgatctaggcgtttcttggattagtcctggaaggtcaaacggttgttggaagcctcgctgggtgcttcaacgaacgcgaaggtgttgctgtcatttagagcgtcttgattggatttgacctgttggcctggtggcgtgccgtcgttgattgagctcgaggatgatcaagtgggggctcagcagcggcacgcccgcggattcctactacgaggtccggtcagattgcacggacggtgtgcccaagagcaagttcaagattaaggctggcaaaacattaagtgctcggaaatggcaggctgcatttagtcctgatggctgtcttgatattgcctcagtcctaagcaggatacagagaggaggtgtccatccaacagtcagaggagaggtttgggaattcttacttggctgttttgatcccagaagtacctttgatgaaagggaagagatcaggcaaatacggaggatacagtatgccagatggaaggaagattgtcgacagatggattctcatgttggtagtggtaaagttatcacagcaccacttatcactgaggatggcagacctattaaggatcctctggttttacttgaggctacttctgacacgaacacttcaggagatgctccaactaccagcataaatggaaatgaagttgatgaatctgcagaacgcattaccgataagcaaattatcgagtggaagctgacattacatcaaattgggcttgacgtcctacggactgatcgcaccatggtattctatgagaacaaagaaaacctttccaaattatgggatattctagccgtgtatgcatggattgacaaagatgttggttactgccaaggaatgagtgatttgtgctcaccaatgatagttctactaaacgatgaagcagatgcattttggtgctttgagaaattgatgcgtagattgcgaggaaatttcagatgcacagatcaatctgtgggagttgccaaccaacttcaacaccttgcgtctattattcaggttcttgaccccaagctacatgaccacctagaaactcttggtggaggtgactacctttttgcgttccgtatgttcatggtgctttttaggcgtgaagtatcatttggagactccttatacctctgggaggtatgaagctaccataatacgatgaatatgatgtgggctctggaatacgaccctgacattttcttcgcagcgtgtgaagaacaaggtgcagtaaataaaaacaaagtttctaaatccaaactgaaaggactgcgccattttggcaagtgggataataaggataaggacaaggataaggaagatgctaaaaatggggctgaggatggtgaagacggtcctgttccaatttcagttttcatggttgcaagtgtccttaaggaaaagagagaaaagctgttacaagaagctagaggactggacgatcttatcaggatattgaacgatgtaaatgggaacttagatgccaagaaagcttgtgctggagcattgaaacttcacaagaaatacctgaaaaaggtacaagaaaagaaaccttaaacgtgccatggaacacacctacccaatgggttattcttaccatttgaacatacacgaccattttctacacaccacttttgagtgaagatttacaggacaaaggtggtagacgactgacatgttctcagatatggtaccaggctagtgggttgagtacaggatgagtgcaaccggtagtttgtattgtattgtatctcacgttctttgtactcaagaattttgttggctgtacaggcagaaggcggtgcgggtagcatgccttgcgtacataattatttgaatacaagttgaattgaacaccatcttacgactaggagtgttaatgactttaaattttacactataaaatttaaggac

SEQ ID NO: 22529 - DNA, 2469 bp, Zea Mays
gttggagacttggagtgaagctgtccattttcgaccaaccctactcgtctcgtaccgtccaagacggggcaaagaatgcccggggaagccggcgagctggagcctggcggcagcttggcaccgatcgtcctccattcccgtcgctcccgacctcctcctaatttatcccacccggcctccccggttcgccccgaccacatcccccccttaacctcccctcctcctcctcctgcggtcccaactcccatccttcggttcaggagggaggcaggcaggcaggaaggcaggttcgaggagggattggctccgctcctgctccattgcgcgtgatccggctcgttcttttgattgatctaggcgtttcttggattagtcctggaaggtcaaacggttgttggaagcctcgctgggtgcttcaacgaacgcgaaggtgttgctgtcatttagagcgtcttgattggatttgacctgttggcctggtggcgtgccgtcgttgattgagctcgaggatgatcaagtgggggctcagcagcggcacgcccgcggattcctactacgaggtccggtcagattgcacggacggtgtgcccaagagcaagttcaagattaaggctggcaaaacattaagtgctcggaaatggcaggctgcatttagtcctgatggctgtcttgatattgcctcagtcctaagcaggatacagagaggaggtgtccatccaacagtcagaggagaggtttgggaattcttacttggctgttttgatcccagaagtacctttgatgaaagggaagagatcaggcaaatacggaggatacagtatgccagatggaaggaagattgtcgacagatggattctcatgttggtagtggtaaagttatcacagcaccacttatcactgaggatggcagacctattaaggatcctctggttttacttgaggctacttctgacacgaacacttcaggagatgctccaactaccagcataaatggaaatgaagttgatgaatctgcagaacgcattaccgataagcaaattatcgagtggaagctgacattacatcaaattgggcttgacgtcctacggactgatcgcaccatggtattctatgagaacaaagaaaacctttccaaattatgggatattctagccgtgtatgcatggattgacaaagatgttggttactgccaaggaatgagtgatttgtgctcaccaatgatagttctactaaacgatgaagcagatgcattttggtgctttgagaaattgatgcgtagattgcgaggaaatttcagatgcacagatcaatctgtgggagttgccaaccaacttcaacaccttgcgtctattattcaggttcttgaccccaagctacatgaccacctagaaactcttggtggaggtgactacctttttgcgttccgtatgttcatggtgctttttaggcgtgaagtatcatttggagactccttatacctctgggaggtatgaagctaccataatacgatgaatgtatgcagaatgaaaccattggttgtcttttggttcttctcattgacgtttgctcatgatcttgaggcatactctttacggaaataacatttttctgataccttaagagctttaagcgcagcttctgtgtattttactagaattactattttttaatgagtcttatgttaatctgaactcatcttatgtctttcaaacctctgaacagatgatgtgggctctggaatacgaccctgacattttcttcgcagcgtgtgaagaacaaggtgcagtaaataaaaacaaagtttctaaatccaaactgaaaggactgcgccattttggcaagtgggataataaggataaggacaaggataaggaagatgctaaaaatggggctgaggatggtgaagacggtcctgttccaatttcagttttcatggttgcaagtgtccttaaggaaaagagagaaaagctgttacaagaagctagaggactggacgatcttatcaggatattgaacgatgtaaatgggaacttagatgccaagaaagcttgtgctggagcattgaaacttcacaagaaatacctgaaaaaggtacaagaaaagaaaccttaaacgtgccatggaacacacctacccaatgggttattcttaccatttgaacatacacgaccattttctacacaccacttttgagtgaagatttacaggacaaaggtggtagacgactgacatgttctcagatatggtaccaggctagtgggttgagtacaggatgagtgcaaccggtagtttgtattgtattgtatctcacgttctttgtactcaagaattttgttggctgtacaggcagaaggcggtgcgggtagcatgccttgcgtacataattatttgaatacaagttgaattgaacaccatcttacgactaggagtgttaatgactttaaattttacactataaaatttaaggac

SEQ ID NO: 22530 - DNA, 2136 bp, Zea Mays
gttggagacttggagtgaagctgtccattttcgaccaaccctactcgtctcgtaccgtccaagacggggcaaagaatgcccggggaagccggcgagctggagcctggcggcagcttggcaccgatcgtcctccattcccgtcgctcccgacctcctcctaatttatcccacccggcctccccggttcgccccgaccacatcccccccttaacctcccctcctcctcctcctgcggtcccaactcccatccttcggttcaggagggaggcaggcaggcaggaaggcaggttcgaggagggattggctccgctcctgctccattgcgcgtgatccggctcgttcttttgattgatctaggcgtttcttggattagtcctggaaggtcaaacggttgttggaagcctcgctgggtgcttcaacgaacgcgaaggtgttgctgtcatttagagcgtcttgattggatttgacctgttggcctggtggcgtgccgtcgttgattgagctcgaggatgatcaagtgggggctcagcagcggcacgcccgcggattcctactacgaggtccggtcagattgcacggacggtgtgcccaagagcaagttcaagattaaggctggcaaaacattaagtgctcggaaatggcaggctgcatttagtcctgatggctgtcttgatattgcctcagtcctaagcaggatacagagaggaggtgtccatccaacagtcagaggagaggtttgggaattcttacttggctgttttgatcccagaagtacctttgatgaaagggaagagatcaggcaaatacggaggatacagtatgccagatggaaggaagattgtcgacagatggattctcatgttggtagtggtaaagttatcacagcaccacttatcactgaggatggcagacctattaaggatcctctggttttacttgaggctacttctgacacgaacacttcaggagatgctccaactaccagcataaatggaaatgaagttgatgaatctgcagaacgcattaccgataagcaaattatcgagtggaagctgacattacatcaaattgggcttgacgtcctacggactgatcgcaccatggtattctatgagaacaaagaaaacctttccaaattatgggatattctagccgtgtatgcatggattgacaaagatgttggttactgccaaggaatgagtgatttgtgctcaccaatgatagttctactaaacgatgaagcagatgcattttggtgctttgagaaattgatgcgtagattgcgaggaaatttcagatgcacagatcaatctgtgggagttgccaaccaacttcaacaccttgcgtctattattcaggttcttgaccccaagctacatgaccacctagatgatgtgggctctggaatacgaccctgacattttcttcgcagcgtgtgaagaacaaggtgcagtaaataaaaacaaagtttctaaatccaaactgaaaggactgcgccattttggcaagtgggataataaggataaggacaaggataaggaagatgctaaaaatggggctgaggatggtgaagacggtcctgttccaatttcagttttcatggttgcaagtgtccttaaggaaaagagagaaaagctgttacaagaagctagaggactggacgatcttatcaggatattgaacgatgtaaatgggaacttagatgccaagaaagcttgtgctggagcattgaaacttcacaagaaatacctgaaaaaggtacaagaaaagaaaccttaaacgtgccatggaacacacctacccaatgggttattcttaccatttgaacatacacgaccattttctacacaccacttttgagtgaagatttacaggacaaaggtggtagacgactgacatgttctcagatatggtaccaggctagtgggttgagtacaggatgagtgcaaccggtagtttgtattgtattgtatctcacgttctttgtactcaagaattttgttggctgtacaggcagaaggcggtgcgggtagcatgccttgcgtacataattatttgaatacaagttgaattgaacaccatcttacgactaggagtgttaatgactttaaattttacactataaaatttaaggac

SEQ ID NO: 22531 - DNA, 1964 bp, Zea Mays
gttggagacttggagtgaagctgtccattttcgaccaaccctactcgtctcgtaccgtccaagacggggcaaagaatgcccggggaagccggcgagctggagcctggcggcagcttggcaccgatcgtcctccattcccgtcgctcccgacctcctcctaatttatcccacccggcctccccggcgtttcttggattagtcctggaaggtcaaacggttgttggaagcctcgctgggtgcttcaacgaacgcgaaggtgttgctgtcatttagagcgtcttgattggatttgacctgttggcctggtggcgtgccgtcgttgattgagctcgaggatgatcaagtgggggctcagcagcggcacgcccgcggattcctactacgaggtccggtcagattgcacggacggtgtgcccaagagcaagttcaagattaaggctggcaaaacattaagtgctcggaaatggcaggctgcatttagtcctgatggctgtcttgatattgcctcagtcctaagcaggatacagagaggaggtgtccatccaacagtcagaggagaggtttgggaattcttacttggctgttttgatcccagaagtacctttgatgaaagggaagagatcaggcaaatacggaggatacagtatgccagatggaaggaagattgtcgacagatggattctcatgttggtagtggagatgctccaactaccagcataaatggaaatgaagttgatgaatctgcagaacgcattaccgataagcaaattatcgagtggaagctgacattacatcaaattgggcttgacgtcctacggactgatcgcaccatggtattctatgagaacaaagaaaacctttccaaattatgggatattctagccgtgtatgcatggattgacaaagatgttggttactgccaaggaatgagtgatttgtgctcaccaatgatagttctactaaacgatgaagcagatgcattttggtgctttgagaaattgatgcgtagattgcgaggaaatttcagatgcacagatcaatctgtgggagttgccaaccaacttcaacaccttgcgtctattattcaggttcttgaccccaagctacatgaccacctagaaactcttggtggaggtgactacctttttgcgttccgtatgttcatggtgctttttaggcgtgaagtatcatttggagactccttatacctctgggagatgatgtgggctctggaatacgaccctgacattttcttcgcagcgtgtgaagaacaaggtgcagtaaataaaaacaaagtttctaaatccaaactgaaaggactgcgccattttggcaagtgggataataaggataaggacaaggataaggaagatgctaaaaatggggctgaggatggtgaagacggtcctgttccaatttcagttttcatggttgcaagtgtccttaaggaaaagagagaaaagctgttacaagaagctagaggactggacgatcttatcaggatattgaacgatgtaaatgggaacttagatgccaagaaagcttgtgctggagcattgaaacttcacaagaaatacctgaaaaaggtacaagaaaagaaaccttaaacgtgccatggaacacacctacccaatgggttattcttaccatttgaacatacacgaccattttctacacaccacttttgagtgaagatttacaggacaaaggtggtagacgactgacatgttctcagatatggtaccaggctagtgggttgagtacaggatgagtgcaaccggtagtttgtattgtattgtatctcacgttctttgtactcaagaattttgttggctgtacaggcagaaggcggtgcgggtagcatgccttgcgtacataattatttgaatacaagttgaattgaacaccatcttacgactaggagtgttaatgactttaaattttacactataaaatttaaggac

SEQ ID NO: 22532 - DNA, 1446 bp, Zea Mays
caccaagtctgtcgctttggaaaccgttggtgacaccataaccactcctgttcgtcgtgcacccacgcgggcgaacagtgaaaggcatcgtctcgacgtctcgtgaccgctggactcgccgccgccccaggctagctcgatgattgggtgcgccaagccgctcgcggcgccgctgcaggcatgggctcgcccgccgtctcccgccggtcgccgcctccccccctcgttctgcgcccctgacacctccccagctctcacccgcgccgtcgagagcccaggccagtctcagtctgacgacgccccgccaccacgctcgggtgaggccgagagggacgccgcggccgggaaggccatctacatagtgtcagacgggaccgggtggaccgcggagcactcggtgaacgccgcgctcggacagttcgagaactgcctcgccgaccgcggctgcgctgtcaacacccacctcttctccttgattgacgacatggatcgacttattgaggtaataaagcaagcagcaaaggaaggggcactggttctctacacccttgccgatccttcaatggccgaggcgactaagaaggcctgcgatttctggggtgttccatgcaccgatgttcttcggcctactgtcgaagccattgcctctcacatcggtgttgctccatctggaattccacgaagctctccgagtcgaaatggtcggctatcagaggattacttccaacggatcgatgctatcgatttcaccatcaaacaagacgacggggctctgccacagaacctctaccgcgcagacatcgtgcttgccggcgtttcgcgtacagggaagacgccactgtcgatatacctagctcaaaagggatacaaggtggcaaatgtcccaatcgtgatgggagtggaccttccaaagtccctttttgagatcaaccaggacaaggtttttggactgacaataaacccagcgatccttcaggcgattagaaagaccagggccaagactctaggttttgatgggcgtcagagcaattacgctgagatggaccatgtgaggcaggaactggtccatgcgaatcaaatctttgctcagaatccatcgtggccagtcattgcggtcactggaaaagctatcgaggaaacagctgctgtcatcttggggatcctccatgacaggaagcagaagtgctccatgccacgcatatcaaaacgatactagcgctgtgttctatcccttctctactacaccttgtaacgtgtgcatgttttgaataagctttgtgtcaagcaccatagccttcatgtaatttttttttgttggaccaccttctaggtggtggcgtttgtatcataaacataacttgaagtttagtgcagcagaaacacatgtatattgcgttgcgtttacgaccttctattggcgttaaagcctcacgttatttggtcatt

SEQ ID NO: 22533 - DNA, 925 bp, Zea Mays
cacaagtttctctgcaactgacaccactgcaccaagattacacatcatgattcttgctgccctcctcctacttctctctttcccgaagcagctagctggaagtcagtccgtctgcagcagtgctaacatcgtgtacatgcaaagcagtacctacatgtccaacctgaatgcccttgccggagcactattcgccaaggtgacaagttcaaactcacactcagcccatggcacagctgggacaggttccgacatgatctatggagcagtgctttgccgaggagacatgatccccggcgctgcctgtgcaaaacgtctcaaggaggtccttgatgcagcaatggacaacccagctaatagttcttgctcttcccagaaggacataaccttgttcgacgatgggtacctggtccagctaagattctctgaccaggatttcatctccaacttccgcgactctcaggaatgcgtagtaagggctaatttgaaccctccgctgttgggcgatgtttcagagcagttccatagtcttgtttccaagctcatgaccaagctcacagatgctgcagtgaagaatatgggcaggtatgagacaggccaaggctggctcactgagaagagccagactgtatatggacttgtgcagtgtcaagaggacatgctgaagggcacttgccaggattgcttgagtagtgccatggcaaagagggagcagatggttgaccagatgggtggtgcaatcctcggcgtgggatgcagcttgtggtaccaaacagaagttcagttctttgctggcacaccagcgttgtcgttaaatatgcccacaccaagcaagttttggatctgggtcatgcttggatcgttctctgtcgtggtttcaatttcatggttgcttgttcatatttggatcaaaacagagagaaaaaga

SEQ ID NO: 22534 - DNA, 3419 bp, Zea Mays
gcttttatttccatgtaccacccttagttagcactattttcatataaaaccaccatttttaagagtagagaagaaaacactggaccgccttcaccctgcttttcgtcttcctttcaccccgcttgcgctctctctccctctccccacctctctcctgcgccaactgggcgaccgccgccgccggctgccgggccgccgcacgcctccaggtgcccaggtcttcgtaggtcccttagctcggccttcgtcagggttcggggtccttcgctggcgacgatcacccatcaggtctcctttgaaagaagaattaggcagcacatctttacgaatcgaggatgtcagtttctatgaaggacctggacccagctttccgtggctctggacaaaaggacggcttggaaatatggcgtattgagaatttcaagccgatccctgcccctgcatcttcgtatggaaagttcttcatgggtgattcttacattatcttgaagacaacagccttgaaaaatggttctcttcgccatgatatccattactggattggtaaagatactagtcaggacgaagctggaactgctgcgattttaacagtagagcttgatgctgctcttggcgggcgtgctgttcagtaccgagaaatacaaggcaatgaaacagaaaaattcctgtcctattttagaccatgcatcatgccacagccaggaggagtggcatctggattcaaccatgttgaggtcaatgagcaggattacaagacccacttatatgtctgccatgggaagcatgttgttcatgttaacgaggttccctttgctcgatcatcccttaatcatgatgacatatttattttggatacgaagtccaaaattttccagttcagtggctcaaactcatccattcaagagcgagcaaaagctcttgaagttgtgcagtacatcaaagatacatttcatgagggcaagtgtgaaattgcatctgttgaggatggtagaatgatggctgatgcggaagctggtgaattctggggtttttttggcggctttgcccctcttcctaggagggcacctgcagaaggcaatgagaaacatgatgaaactgctttcaaattgctatgttttgaccaaggaaagctggagcctgtcgactgccaatctttagcacatgaattacttgagacaaacaagtgttacttcttagactgtggtgctgaattgtatgtttggatgggtagaattacatccctgatggagagaaagggtgctagtgaagctgctgagaaattgctctctgattcaaaccgaacaagaacacatataatcaaagtgattgaagggtttgagactgttacgttcaagtcaaaatttaaggagtggccacagacacctgagttgaagttgtcatcggaggatggaagaggcaaagttgcagctcttctcaaacgccagggcttaaatgttaagggtttgatgaaagctgctcctacacaagaagaacctcaatcctatattgattccactggcaatctgcaggtttggcgtgtaaatgataaagacaaggttcaactctcaccctctgaccaatccaaattttacaccggcgattgctacatatttcagtatacttatcctggagatgataaggaggaatgtcttattggaacctggtttgggaaaaagagtattgaggaggatagggtaatagcagtttcacttgcaagtaagatggttgaatctgctaagtttcaggctgtccaggcgcgcttttatgaggggaaagaaccgatccagttctttgtgatatttcaaagcttccaagtgtttaagggtggtcttagttctggatacaagagatttatcgctgaaaatggcatcgatgatgaaagttattctgaagatgggcttgcactctttcgtattcaaggttcaggaccagaaaacatgcaggcgattcaagttgaacctgtggcctcatcattgaattcatcatattgttacattctacataatggaaacactgtgttcacttgggctggaaatctgaccactgcattggaccaagagttaatggaaaggcagcttgatgttattaagccaaacacacagtctaggtcacaaaaggaagggtcagaaacggaccagttttggagtttactggggggcaaatctgagtactcaggccaaaaaatggtgcgagaactcgaaagtgacccccatcttttctcatgcatcctgtcgaaaggcaatttgaaggtcaaagaaatacaccactttactcaagatgatctaatgacagaagatgttttcattctggactgtcacacgagcatatttgtttgggttggtcagcaggtggatgttaaaggcaggttacaagctctggatgctggggagaaatttattgtgcttgattttcttatggaaaaccttgcccgtgaaacaccagttttcaccgttatggaggggaatgagcctccctttttcactagattcttcacctgggactccgcaaaatcactgatgcatggcaattcataccagaggaagctcgccattgtaaaaggtggaggtgctccagcattggataaaccgaaacgacgaacaaccgtctattcaggaaggagtactacacaagataaatcccaacgctccagaagcatgtccttcagccctgaacgtgtgcgtgttaggggaagatctccagcattcactgcattggctgctaattttgaaagttcaagcaacagaaatctttccactcctccacctgtagttaagaaactttacccgaaatctgttacacctgatccgtcgaatactgcttctaagtcacctgcaattgctgctctggctggttctttggatcacccttctcaaactcctgctctagaattcatgaaaggtggctccgagtcagagaagccaaaacaggagggagatggtaaagaaggtgttgatactgtggccacaagagttgaatctctgactataaatgaagatgtaaaagaaaacgagccagaagatgacgagggccttccgatttacctgtatgaacgtctgaagaccacagctgctgatcctgttactgaaattgatgtcacgaggcgagagacctacttatcttcaactgagttcaaagagaagtttgggataaattgctcttcaacttttttagcctgatcatcaacacttccaatgtttgattctgaggcttgatttttttgtgtatcaactctgcctgctgtgttctttttttgtttttgagatgagttgcggtttgagggagcgataagtatgtacagcagagtgccggcactgtaacatcacaataccgttatctttgatcaatataattattttttgtgtgtaacttaatattgtttttccagaggatttaagggaaatagtagatatgcattagat

SEQ ID NO: 22535 - DNA, 3651 bp, Zea Mays
ccaccatttttaagagtagagaagaaaacactggaccgccttcaccctgcttttcgtcttcctttcaccccgcttgcgctctctctccctctccccacctctctcctgcgccaactgggcgaccgccgccgccggctgccgggccgccgcacgcctccaggtgcccaggtcttcgtaggtcccttagctcggccttcgtcagggttcggggtccttcgctggcgacgatcacccatcaggtctcctttgaaagaagaattaggcagcacatctttacgaatcgaggatgtcagtttctatgaaggacctggacccagctttccgtggctctggacaaaaggacggcttggaaatatggcgtattgagaatttcaagccgatccctgcccctgcatcttcgtatggaaagttcttcatgggtgattcttacattatcttgaagacaacagccttgaaaaatggttctcttcgccatgatatccattactggattggtaaagatactagtcaggacgaagctggaactgctgcgattttaacagtagagcttgatgctgctcttggcgggcgtgctgttcagtaccgagaaatacaaggcaatgaaacagaaaaattcctgtcctattttagaccatgcatcatgccacagccaggaggagtggcatctggattcaaccatgttgaggtcaatgagcaggattacaagacccacttatatgtctgccatgggaagcatgttgttcatgttaacgaggttccctttgctcgatcatcccttaatcatgatgacatatttattttggatacgaagtccaaaattttccagttcagtggctcaaactcatccattcaagagcgagcaaaagctcttgaagttgtgcagtacatcaaagatacatttcatgagggcaagtgtgaaattgcatctgttgaggatggtagaatgatggctgatgcggaagctggtgaattctggggtttttttggcggctttgcccctcttcctaggagggcacctgcagaaggcaatgagaaacatgatgaaactgctttcaaattgctatgttttgaccaaggaaagctggagcctgtcgactgccaatctttagcacatgaattacttgagacaaacaagtgttacttcttagactgtggtgctgaattgtatgtttggatgggtagaattacatccctgatggagagaaagggtgctagtgaagctgctgagaaattgctctctgattcaaaccgaacaagaacacatataatcaaagtgattgaagggtttgagactgttacgttcaagtcaaaatttaaggagtggccacagacacctgagttgaagttgtcatcggaggatggaagaggcaaagttgcagggcttaaatgttaagggtttgatgaaagctgctcctacacaagaagaacctcaatcctatattgattccactggcaatctgcaggtttggcgtgtaaatgataaagacaaggttcaactctcaccctctgaccaatccaaattttacaccggcgattgctacatatttcagtatacttatcctggagatgataaggaggaatgtcttattggaacctggtttgggaaaaagagtattgaggaggatagggtaatagcagtttcacttgcaagtaagatggttgaatctgctaagtttcaggctgtccaggcgcgcttttatgaggggaaagaaccgatccagttctttgtgatatttcaaagcttccaagtgtttaagggtggtcttagttctggatacaagagatttatcgctgaaaatggcatcgatgatgaaagttattctgaagatgggcttgcactctttcgtattcaaggttcaggaccagaaaacatgcaggcgattcaagttgaacctgtggcctcatcattgaattcatcatattgttacattctacataatggaaacactgtgttcacttgggctggaaatctgaccactgcattggaccaagagttaatggaaaggcagcttgatgttattaagccaaacacacagtctaggtcacaaaaggaagggtcagaaacggaccagttttggagtttactggggggcaaatctgagtactcaggccaaaaaatggtgcgagaactcgaaagtgacccccatcttttctcatgcatcctgtcgaaaggtaattaagaatgtagattttgtagttttgggaaagttatccacattaacagttcaaatacatactgatctcgtactgctgttctccctattaatgttcctaatctgtcgggtccatgaaggcaatttgaaggtcaaagaaatacaccactttactcaagatgatctaatgacagaagatgttttcattctggactgtcacacgagcatatttgtttgggttggtcagcaggtggatgttaaaggcaggttacaagctctggatgctggggagaaatttattgtgcttgattttcttatggaaaaccttgcccgtgaaacaccagttttcaccgttatggaggggaatgagcctccctttttcactagattcttcacctgggactccgcaaaatcactgatgcatggcaattcataccagaggaagctcgccattgtaaaaggtggaggtgctccagcattggataaaccgaaacgacgaacaaccgtctattcaggaaggagtactacacaagataaatcccaacgctccagaagcatgtccttcagccctgaacgtgtgcgtgttaggggaagatctccagcattcactgcattggctgctaattttgaaagttcaagcaacagaaatctttccactcctccacctgtagttaagaaactttacccgaaatctgttacacctgatccgtcgaatactgcttctaagtcacctgcaattgctgctctggctggttctttggatcacccttctcaaactcctgctctagaattcatgaaaggtggctccgagtcagagaagccaaaacaggagggagatggtaaagaaggtgttgatactgtggccacaagagttgaatctctgactataaatgaagatgtaaaagaaaacgagccagaagatgacgagggccttccgatttacctgtatgaacgtctgaagaccacagctgctgatcctgttactgaaattgatgtcacgaggcgagagacctacttatcttcaactgagttcaaagagaagtttgggataaattgctcttcaacttttttagcctgatcatcaacacttccaatgtaatcaccatctgcaatgccacatcaattttcacattgtcctggatcggtctcctttttcctagtttggatttgttttgctagctaagtagctctcttattcttccagttcataggtgtgctattccctttttcctttttttgtcaagtgctcttcattgattcaaggtcacacaggtttgattctgaggcttgatttttttgtgtatcaactctgcctgctgtgttctttttttgtttttgagatgagttgcggtttgagggagcgataagtatgtacagcagagtgccggcactgtaacatcacaataccgttatctttgatcaatataattattttttgtgtgtaacttaatattgtttttccagaggatttaagggaaatagtagatatgcattagat

SEQ ID NO: 22536 - DNA, 3614 bp, Zea Mays
ccaccatttttaagagtagagaagaaaacactggaccgccttcaccctgcttttcgtcttcctttcaccccgcttgcgctctctctccctctccccacctctctcctgcgccaactgggcgaccgccgccgccggctgccgggccgccgcacgcctccaggtgcccaggtcttcgtaggtcccttagctcggccttcgtcagggttcggggtccttcgctggcgacgatcacccatcaggtctcctttgaaagaagaattaggcagcacatctttacgaatcgaggatgtcagtttctatgaaggacctggacccagctttccgtggctctggacaaaaggacggcttggaaatatggcgtattgagaatttcaagccgatccctgcccctgcatcttcgtatggaaagttcttcatgggtgattcttacattatcttgaagacaacagccttgaaaaatggttctcttcgccatgatatccattactggattggtaaagatactagtcaggacgaagctggaactgctgcgattttaacagtagagcttgatgctgctcttggcgggcgtgctgttcagtaccgagaaatacaaggcaatgaaacagaaaaattcctgtcctattttagaccatgcatcatgccacagccaggaggagtggcatctggattcaaccatgttgaggtcaatgagcaggattacaagacccacttatatgtctgccatgggaagcatgttgttcatgttaacgaggttccctttgctcgatcatcccttaatcatgatgacatatttattttggatacgaagtccaaaattttccagttcagtggctcaaactcatccattcaagagcgagcaaaagctcttgaagttgtgcagtacatcaaagatacatttcatgagggcaagtgtgaaattgcatctgttggatggtagaatgatggctgatgcggaagctggtgaattctggggtttttttggcggctttgcccctcttcctaggagggcacctgcagaaggcaatgagaaacatgatgaaactgctttcaaattgctatgttttgaccaaggaaagctggagcctgtcgactgccaatctttagcacatgaattacttgagacaaacaagtgttacttcttagactgtggtgctgaattgtatgtttggatgggtagaattacatccctgatggagagaaagggtgctagtgaagctgctgagaaattgctctctgattcaaaccgaacaagaacacatataatcaaagtgattgaagggtttgagactgttacgttcaagtcaaaatttaaggagtggccacagacacctgagttgaagttgtcatcggaggatggaagaggcaaagttgcagctcttctcaaacgccagggcttaaatgttaagggtttgatgaaagctgctcctacacaagaagaacctcaatcctatattgattccactggcaatctgcaggtttggcgtgtaaatgataaagacaaggttcaactctcaccctctgaccaatccaaattttacaccggcgattgctacatatttcagtatacttatcctggagatgataaggaggaatgtcttattggaacctggtttgggaaaaagagtattgaggaggatagggtaatagcagtttcacttgcaagtaagatggttgaatctgctaagtttcaggctgtccaggcgcgcttttatgaggggaaagaaccgatccagttctttgtgatatttcaaagcttccaagtgtttaagggtggtcttagttctggatacaagagatttatcgctgaaaatggcatcgatgatgaaagttattctgaagatgggcttgcactctttcgtattcaaggttcaggaccagaaaacatgcaggcgattcaagttgaacctgtggcctcatcattgaattcatcatattgttacattctacataatggaaacactgtgttcacttgggctggaaatctgaccactgcattggaccaagagttaatggaaaggcagcttgatgttattaagccaaacacacagtctaggtcacaaaaggaagggtcagaaacggaccagttttggagtttactggggggcaaatctgagtactcaggccaaaaaatggtgcgagaactcgaaagtgacccccatcttttctcatgcatcctgtcgaaaggtaattaagaatgtagattttgtagttttgggaaagttatccacattaacagttcaaatacatactgatctcgtactgctgttctccctattaatgttcctaatctgtcgggtccatgaaggcaatttgaaggtcaaagaaatacaccactttactcaagatgatctaatgacagaagatgttttcattctggactgtcacacgagcatatttgtttgggttggtcagcaggtggatgttaaaggcaggttacaagctctggatgctggggagttttcaccgttatggaggggaatgagcctccctttttcactagattcttcacctgggactccgcaaaatcactgatgcatggcaattcataccagaggaagctcgccattgtaaaaggtggaggtgctccagcattggataaaccgaaacgacgaacaaccgtctattcaggaaggagtactacacaagataaatcccaacgctccagaagcatgtccttcagccctgaacgtgtgcgtgttaggggaagatctccagcattcactgcattggctgctaattttgaaagttcaagcaacagaaatctttccactcctccacctgtagttaagaaactttacccgaaatctgttacacctgatccgtcgaatactgcttctaagtcacctgcaattgctgctctggctggttctttggatcacccttctcaaactcctgctctagaattcatgaaaggtggctccgagtcagagaagccaaaacaggagggagatggtaaagaaggtgttgatactgtggccacaagagttgaatctctgactataaatgaagatgtaaaagaaaacgagccagaagatgacgagggccttccgatttacctgtatgaacgtctgaagaccacagctgctgatcctgttactgaaattgatgtcacgaggcgagagacctacttatcttcaactgagttcaaagagaagtttgggataaattgctcttcaacttttttagcctgatcatcaacacttccaatgtaatcaccatctgcaatgccacatcaattttcacattgtcctggatcggtctcctttttcctagtttggatttgttttgctagctaagtagctctcttattcttccagttcataggtgtgctattccctttttcctttttttgtcaagtgctcttcattgattcaaggtcacacaggtttgattctgaggcttgatttttttgtgtatcaactctgcctgctgtgttctttttttgtttttgagatgagttgcggtttgagggagcgataagtatgtacagcagagtgccggcactgtaacatcacaataccgttatctttgatcaatataattattttttgtgtgtaacttaatattgtttttccagaggatttaagggaaatagtagatatgcattagat

SEQ ID NO: 22537 - DNA, 3883 bp, Zea Mays
ccaccatttttaagagtagagaagaaaacactggaccgccttcaccctgcttttcgtcttcctttcaccccgcttgcgctctctctccctctccccacctctctcctgcgccaactgggcgaccgccgccgccggctgccgggccgccgcacgcctccaggtgcccaggtcttcgtaggtcccttagctcggccttcgtcagggttcggggtccttcgctggcgacgatcacccatcaggtctcctttgaaagaagaattaggcagcacatctttacgaatcgaggatgtcagtttctatgaaggacctggacccagctttccgtggctctggacaaaaggacggcttggaaatatggcgtattgagaatttcaagccgatccctgcccctgcatcttcgtatggaaagttcttcatgggtgattcttacattatcttgaagacaacagccttgaaaaatggttctcttcgccatgatatccattactggattggtaaagatactagtcaggacgaagctggaactgctgcgattttaacagtagagcttgatgctgctcttggcgggcgtgctgttcagtaccgagaaatacaaggcaatgaaacagaaaaattcctgtcctattttagaccatgcatcatgccacagccaggaggagtggcatctggattcaaccatgttgaggtcaatgagcaggattacaagacccacttatatgtctgccatgggaagcatgttgttcatgttaacgaggttccctttgctcgatcatcccttaatcatgatgacatatttattttggatacgaagtccaaaattttccagttcagtggctcaaactcatccattcaagagcgagcaaaagctcttgaagttgtgcagtacatcaaagatacatttcatgagggcaagtgtgaaattgcatctgttgaggatggtagaatgatggctgatgcggaagctggtgaattctggggtttttttggcggctttgcccctcttcctaggagggcacctgcagaaggcaatgagaaacatgatgaaactgctttcaaattgctatgttttgaccaaggaaagctggagcctgtcgactgccaatctttagcacatgaattacttgagacaaacaagtgttacttcttagactgtggtgctgaattgtatgtttggatgggtagaattacatccctgatggagagaaagggtgctagtgaagctgctgagaaattgctctctgattcaaaccgaacaagaacacatataatcaaagtgattgaagggtttgagactgttacgttcaagtcaaaatttaaggagtggccacagacacctgagttgaagttgtcatcggaggatggaagaggcaaagttgcagctcttctcaaacgccagggcttaaatgttaagggtttgatgaaagctgctcctacacaagaagaacctcaatcctatattgattccactggcaatctgcaggtttggcgtgtaaatgataaagacaaggttcaactctcaccctctgaccaatccaaattttacaccggcgattgctacatatttcagtatacttatcctggagatgataaggaggaatgtcttattggaacctggtttgggaaaaagagtattgaggaggatagggtaatagcagtttcacttgcaagtaagatggttgaatctgctaagtttcaggctgtccaggcgcgcttttatgaggggaaagaaccgatccagttctttgtgatatttcaaagcttccaagtgtttaagggtggtcttagttctggatacaagagatttatcgctgaaaatggcatcgatgatgaaagttattctgaagatgggcttgcactctttcgtattcaaggttcaggaccagaaaacatgcaggcgattcaagttgaacctgtaagttttttcccttgaatatgcaggagacttatcatcattatattatgaagaaacaatgagtaagaacccttataacatacaccaagacaatctcagtaaaaaattatagaggtcgtccttgattgaaaattagaactacctcgacctatataaaggggataaaaaccttaatcccctcatgtggaaggcatttttattaccggagtccggaggtggcctcatcattgaattcatcatattgttacattctacataatggaaacactgtgttcacttgggctggaaatctgaccactgcattggaccaagagttaatggaaaggcagcttgatgttattaagccaaacacacagtctaggtcacaaaaggaagggtcagaaacggaccagttttggagtttactggggggcaaatctgagtactcaggccaaaaaatggtgcgagaactcgaaagtgacccccatcttttctcatgcatcctgtcgaaaggtaattaagaatgtagattttgtagttttgggaaagttatccacattaacagttcaaatacatactgatctcgtactgctgttctccctattaatgttcctaatctgtcgggtccatgaaggcaatttgaaggtcaaagaaatacaccactttactcaagatgatctaatgacagaagatgttttcattctggactgtcacacgagcatatttgtttgggttggtcagcaggtggatgttaaaggcaggttacaagctctggatgctggggagaaatttattgtgcttgattttcttatggaaaaccttgcccgtgaaacaccagttttcaccgttatggaggggaatgagcctccctttttcactagattcttcacctgggactccgcaaaatcactgatgcatggcaattcataccagaggaagctcgccattgtaaaaggtggaggtgctccagcattggataaaccgaaacgacgaacaaccgtctattcaggaaggagtactacacaagataaatcccaacgctccagaagcatgtccttcagccctgaacgtgtgcgtgttaggggaagatctccagcattcactgcattggctgctaattttgaaagttcaagcaacagaaatctttccactcctccacctgtagttaagaaactttacccgaaatctgttacacctgatccgtcgaatactgcttctaagtcacctgcaattgctgctctggctggttctttggatcacccttctcaaactcctgctctagaattcatgaaaggtggctccgagtcagagaagccaaaacaggagggagatggtaaagaaggtgttgatactgtggccacaagagttgaatctctgactataaatgaagatgtaaaagaaaacgagccagaagatgacgagggccttccgatttacctgtatgaacgtctgaagaccacagctgctgatcctgttactgaaattgatgtcacgaggcgagagacctacttatcttcaactgagttcaaagagaagtttgggataaattgctcttcaacttttttagcctgatcatcaacacttccaatgtaatcaccatctgcaatgccacatcaattttcacattgtcctggatcggtctcctttttcctagtttggatttgttttgctagctaagtagctctcttattcttccagttcataggtgtgctattccctttttcctttttttgtcaagtgctcttcattgattcaaggtcacacaggtttgattctgaggcttgatttttttgtgtatcaactctgcctgctgtgttctttttttgtttttgagatgagttgcggtttgagggagcgataagtatgtacagcagagtgccggcactgtaacatcacaataccgttatctttgatcaatataattattttttgtgtgtaacttaatattgtttttccagaggatttaagggaaatagtagatatgcattagat

SEQ ID NO: 22538 - DNA, 3536 bp, Zea Mays
ccaccatttttaagagtagagaagaaaacactggaccgccttcaccctgcttttcgtcttcctttcaccccgcttgcgctctctctccctctccccacctctctcctgcgccaactgggcgaccgccgccgccggctgccgggccgccgcacgcctccaggtgcccaggtcttcgtaggtcccttagctcggccttcgtcagggttcggggtccttcgctggcgacgatcacccatcaggtctcctttgaaagaagaattaggcagcacatctttacgaatcgaggatgtcagtttctatgaaggacctggacccagctttccgtggctctggacaaaaggacggcttggaaatatggcgtattgagaatttcaagccgatccctgcccctgcatcttcgtatggaaagttcttcatgggtgattcttacattatcttgaagacaacagccttgaaaaatggttctcttcgccatgatatccattactggattggtaaagatactagtcaggacgaagctggaactgctgcgattttaacagtagagcttgatgctgctcttggcgggcgtgctgttcagtaccgagaaatacaaggcaatgaaacagaaaaattcctgtcctattttagaccatgcatcatgccacagccaggaggagtggcatctggattcaaccatgttgaggtcaatgagcaggattacaagacccacttatatgtctgccatgggaagcatgttgttcatgttaacgaggttccctttgctcgatcatcccttaatcatgatgacatatttattttggatacgaagtccaaaattttccagttcagtggctcaaactcatccattcaagagcgagcaaaagctcttgaagttgtgcagtacatcaaagatacatttcatgagggcaagtgtgaaattgcatctgttgaggatggtagaatgatggctgatgcggaagctggtgaattctggggtttttttggcggctttgcccctcttcctaggagggcacctgcagaaggcaatgagaaacatgatgaaactgctttcaaattgctatgttttgaccaaggaaagctggagcctgtcgactgccaatctttagcacatgaattacttgagacaaacaagtgttacttcttagactgtggtgctgaattgtatgtttggatgggtagaattacatccctgatggagagaaagggtgctagtgaagctgctgagaaattgctctctgattcaaaccgaacaagaacacatataatcaaagtgattgaagggtttgagactgttacgttcaagtcaaaatttaaggagtggccacagacacctgagttgaagttgtcatcggaggatggaagaggcaaagttgcagctcttctcaaacgccagggcttaaatgttaagggtttgatgaaagctgctcctacacaagaagaacctcaatcctatattgattccactggcaatctgcaggtttggcgtgtaaatgataaagacaaggttcaactctcaccctctgaccaatccaaattttacaccggcgattgctacatatttcagtatacttatcctggagatgataaggaggaatgtcttattggaacctggtttgggaaaaagagtattgaggaggatagggtaatagcagtttcacttgcaagtaagatggttgaatctgctaagtttcaggctgtccaggcgcgcttttatgaggggaaagaaccgatccagttctttgtgatatttcaaagcttccaagtgtttaagggtggtcttagttctggatacaagagatttatcgctgaaaatggcatcgatgatgaaagttattctgaagatgggcttgcactctttcgtattcaaggttcaggaccagaaaacatgcaggcgattcaagttgaacctgtggcctcatcattgaattcatcatattgttacattctacataatggaaacactgtgttcacttgggctggaaatctgaccactgcattggaccaagagttaatggaaaggcagcttgatgttattaagccaaacacacagtctaggtcacaaaaggaagggtcagaaacggaccagttttggagtttactggggggcaaatctgagtactcaggccaaaaaatggtgcgagaactcgaaagtgacccccatcttttctcatgcatcctgtcgaaaggtcaaagaaatacaccactttactcaagatgatctaatgacagaagatgttttcattctggactgtcacacgagcatatttgtttgggttggtcagcaggtggatgttaaaggcaggttacaagctctggatgctggggagaaatttattgtgcttgattttcttatggaaaaccttgcccgtgaaacaccagttttcaccgttatggaggggaatgagcctccctttttcactagattcttcacctgggactccgcaaaatcactgatgcatggcaattcataccagaggaagctcgccattgtaaaaggtggaggtgctccagcattggataaaccgaaacgacgaacaaccgtctattcaggaaggagtactacacaagataaatcccaacgctccagaagcatgtccttcagccctgaacgtgtgcgtgttaggggaagatctccagcattcactgcattggctgctaattttgaaagttcaagcaacagaaatctttccactcctccacctgtagttaagaaactttacccgaaatctgttacacctgatccgtcgaatactgcttctaagtcacctgcaattgctgctctggctggttctttggatcacccttctcaaactcctgctctagaattcatgaaaggtggctccgagtcagagaagccaaaacaggagggagatggtaaagaaggtgttgatactgtggccacaagagttgaatctctgactataaatgaagatgtaaaagaaaacgagccagaagatgacgagggccttccgatttacctgtatgaacgtctgaagaccacagctgctgatcctgttactgaaattgatgtcacgaggcgagagacctacttatcttcaactgagttcaaagagaagtttgggataaattgctcttcaacttttttagcctgatcatcaacacttccaatgtaatcaccatctgcaatgccacatcaattttcacattgtcctggatcggtctcctttttcctagtttggatttgttttgctagctaagtagctctcttattcttccagttcataggtgtgctattccctttttcctttttttgtcaagtgctcttcattgattcaaggtcacacaggtttgattctgaggcttgatttttttgtgtatcaactctgcctgctgtgttctttttttgtttttgagatgagttgcggtttgagggagcgataagtatgtacagcagagtgccggcactgtaacatcacaataccgttatctttgatcaatataattattttttgtgtgtaacttaatattgtttttccagaggatttaagggaaatagtagatatgcattagat

SEQ ID NO: 22539 - DNA, 3744 bp, Zea Mays
cgccttcaccctgcttttcgtcttcctttcaccccgcttgcgctctctctccctctccccacctctctcctgcgccaactgggcgaccgccgccgccggctgccgggccgccgcacgcctccaggtgcccaggtcttcgtaggtcccttagctcggccttcgtcagggttcggggtccttcgctggcgacgatcacccatcagcggcttggaaatatggcgtattgagaatttcaagccgatccctgcccctgcatcttcgtatggaaagttcttcatgggtgattcttacattatcttgaagacaacagccttgaaaaatggttctcttcgccatgatatccattactggattggtaaagatactagtcaggacgaagctggaactgctgcgattttaacagtagagcttgatgctgctcttggcgggcgtgctgttcagtaccgagaaatacaaggcaatgaaacagaaaaattcctgtcctattttagaccatgcatcatgccacagccaggaggagtggcatctggattcaaccatgttgaggtcaatgagcaggattacaagacccacttatatgtctgccatgggaagcatgttgttcatgttaacgaggttccctttgctcgatcatcccttaatcatgatgacatatttattttggatacgaagtccaaaattttccagttcagtggctcaaactcatccattcaagagcgagcaaaagctcttgaagttgtgcagtacatcaaagatacatttcatgagggcaagtgtgaaattgcatctgttgaggatggtagaatgatggctgatgcggaagctggtgaattctggggtttttttggcggctttgcccctcttcctaggagggcacctgcagaaggcaatgagaaacatgatgaaactgctttcaaattgctatgttttgaccaaggaaagctggagcctgtcgactgccaatctttagcacatgaattacttgagacaaacaagtgttacttcttagactgtggtgctgaattgtatgtttggatgggtagaattacatccctgatggagagaaagggtgctagtgaagctgctgagaaattgctctctgattcaaaccgaacaagaacacatataatcaaagtgattgaagggtttgagactgttacgttcaagtcaaaatttaaggagtggccacagacacctgagttgaagttgtcatcggaggatggaagaggcaaagttgcagctcttctcaaacgccagggcttaaatgttaagggtttgatgaaagctgctcctacacaagaagaacctcaatcctatattgattccactggcaatctgcaggtttggcgtgtaaatgataaagacaaggttcaactctcaccctctgaccaatccaaattttacaccggcgattgctacatatttcagtatacttatcctggagatgataaggaggaatgtcttattggaacctggtttgggaaaaagagtattgaggaggatagggtaatagcagtttcacttgcaagtaagatggttgaatctgctaagtttcaggctgtccaggcgcgcttttatgaggggaaagaaccgatccagttctttgtgatatttcaaagcttccaagtgtttaagggtggtcttagttctggatacaagagatttatcgctgaaaatggcatcgatgatgaaagttattctgaagatgggcttgcactctttcgtattcaaggttcaggaccagaaaacatgcaggcgattcaagttgaacctgtaagttttttcccttgaatatgcaggagacttatcatcattatattatgaagaaacaatgagtaagaacccttataacatacaccaagacaatctcagtaaaaaattatagaggtcgtccttgattgaaaattagaactacctcgacctatataaaggggataaaaaccttaatcccctcatgtggaaggcatttttattaccggagtccggaggtggcctcatcattgaattcatcatattgttacattctacataatggaaacactgtgttcacttgggctggaaatctgaccactgcattggaccaagagttaatggaaaggcagcttgatgttattaagccaaacacacagtctaggtcacaaaaggaagggtcagaaacggaccagttttggagtttactggggggcaaatctgagtactcaggccaaaaaatggtgcgagaactcgaaagtgacccccatcttttctcatgcatcctgtcgaaaggtaattaagaatgtagattttgtagttttgggaaagttatccacattaacagttcaaatacatactgatctcgtactgctgttctccctattaatgttcctaatctgtcgggtccatgaaggcaatttgaaggtcaaagaaatacaccactttactcaagatgatctaatgacagaagatgttttcattctggactgtcacacgagcatatttgtttgggttggtcagcaggtggatgttaaaggcaggttacaagctctggatgctggggagaaatttattgtgcttgattttcttatggaaaaccttgcccgtgaaacaccagttttcaccgttatggaggggaatgagcctccctttttcactagattcttcacctgggactccgcaaaatcactgatgcatggcaattcataccagaggaagctcgccattgtaaaaggtggaggtgctccagcattggataaaccgaaacgacgaacaaccgtctattcaggaaggagtactacacaagataaatcccaacgctccagaagcatgtccttcagccctgaacgtgtgcgtgttaggggaagatctccagcattcactgcattggctgctaattttgaaagttcaagcaacagaaatctttccactcctccacctgtagttaagaaactttacccgaaatctgttacacctgatccgtcgaatactgcttctaagtcacctgcaattgctgctctggctggttctttggatcacccttctcaaactcctgctctagaattcatgaaaggtggctccgagtcagagaagccaaaacaggagggagatggtaaagaaggtgttgatactgtggccacaagagttgaatctctgactataaatgaagatgtaaaagaaaacgagccagaagatgacgagggccttccgatttacctgtatgaacgtctgaagaccacagctgctgatcctgttactgaaattgatgtcacgaggcgagagacctacttatcttcaactgagttcaaagagaagtttgggataaattgctcttcaacttttttagcctgatcatcaacacttccaatgtaatcaccatctgcaatgccacatcaattttcacattgtcctggatcggtctcctttttcctagtttggatttgttttgctagctaagtagctctcttattcttccagttcataggtgtgctattccctttttcctttttttgtcaagtgctcttcattgattcaaggtcacacaggtttgattctgaggcttgatttttttgtgtatcaactctgcctgctgtgttctttttttgtttttgagatgagttgcggtttgagggagcgataagtatgtacagcagagtgccggcactgtaacatcacaataccgttatctttgatcaatataattattttttgtgtgtaacttaatattgtttttccagaggatttaagggaaatagtagatatgcattagat

SEQ ID NO: 22540 - DNA, 822 bp, Zea Mays
ggactccaggtctaggcgtctagctctagctgtagttggaagttggaacagctcggtgccgggcggtcgcctgtccagtgcatcggcgacggcgtctacgctgctaacagcacctaccaagccaacctccgccgcgtcgccgccctcctcctagccgaggtgtccgcctcccccggccagttttactacacgacccatgccgtcgggtactggcctaaccggttgctcgccagctccttatgccggcgccgcgacgtcaacggcacccacgttggctacccctgcgccgactgcatcgccggggccttcctcgaaatggagagagcgtgcccgtaccgcagggaggccttctatatcgatcgcaactgcagtgtcgaacttgccgagattcgcatcttcgggactggcggcatcttccaacggaacatactgatacaagccatggcttcgggattggtacttcaagcaattggatttgcttggcttttcttcttgctatttcaagaatggcgcagccggaaaagaggcaacttgatgtaaaaacacaagagttgatcccatatctcattctaaattgacctacttcctagttgatacacgatccatataaaatttctcgaatataagtcttattcttctagaagtagccaagtaagtaaaggtggtctactaatacaaatgccaaatatttcaacctcagtcttatagaggcaaatgatttgattttttttcatcaaaatgtcacaccaccaccatcatttctctgaatttggagtacacggacaaatatatatttactctgtttcctcttgcaccatgcag

SEQ ID NO: 22541 - DNA, 1071 bp, Zea Mays
ggactccaggtctaggcgtctagctctagctgtagttggaagttggaacagctcggtgccggtgggcattttcaaccatcgtttgctttacttcacagttcacactcgccctgttctagggttattatcaacccagttcatccatcaccgaccggcgtcaccacttgccagtcacctcaccaccatgaagaatccttggctcctattcctcgcccccttcctcttagccgtgtcgtcatcgctgcctcataccgccgccgtgccgctgcgtttccctgccgcagggcggtcgcctgtccagtgcatcggcgacggcgtctacgctgctaacagcacctaccaagccaacctccgccgcgtcgccgccctcctcctagccgaggtgtccgcctcccccggccagttttactacacgacccatgccgtcgggtactggcctaaccggttgctcgccagctccttatgccggcgccgcgacgtcaacggcacccacgttggctacccctgcgccgactgcatcgccggggccttcctcgaaatggagagagcgtgcccgtaccgcagggaggccttctatatcgatcgcaactgcagtgtcgaacttgccgagattcgcatcttcgggactggcggcatcttccgcattccacccctcttttatctggagatgagaatgttggcaacatgtctaccaaggcgtaacggcaaatgttgcatacttgcatgaagggatcggattttctctcatcaagggaataaagattaaagaatgaatacttgctctccaaattgcaggccttcaattcggtcgtttaatttcaagccagctgaaatgttcattgttttcacacattcttatgttttcattggaatttcattcccacttgtcctgttcctagcttgaaatgtacatgtgaatacaaaaaaaaaaccaaaacttgccacgattgggcagtcggcactgaaacagcagtgtaccatattataatgtatatacgtaagaacgtaacctactaaaatgactacttgttctcaattgcaagatcaaaacagaattacaacctttatttt

SEQ ID NO: 22542 - DNA, 1438 bp, Zea Mays
cagcagcactcaccttgctctgccctctgcgccccttagctgctgcaggagagcatggcgctcgctcgcctcctcgggacagcatttctgctgctcctgttttctcatgcagaggccgctggcgaggtaggcgtgaactatgggacggtggcgaacgacctgccgaacccggcgtcggtggtgcagctgctgaagcagaacggcatcaccatggtgaagatatacgacgccaacgcaaacgcgctgacgtcgctggcgaacacgggcatcaaggcgatggtgatgatgcccaacgcgaacctggcccgcgcggcctcggacccaacctacgcggcgcagtgggtgcaggacaacgtgatgccctactacccggccacgcagatcaacgccgtcgccgtggggaacgaggtgttcgacgaccccagcgtcgacaagatggacctcgtcccggccatgaccaacgtgcaggcggggctggcggggctgggcgtcgccggcgacatcaaggtgtcctcgccgatcaagttcgacgcgctccaggtgtcgtggccgccgtcctcgggcaggttccgcgacgacatcgcgcagccggtgatgaagcccatgctggacctcctgcagaggaccggctcctacctcaccatcaacgcgtacccgttcttctcctactacagcgatcctcgcagcatctcccttgactacgccctggggaactccaaccctggcgtctccgacgacaaagccaacctcaggtacgacaacctcctggacgcccaggtcgacgccacgcactacgcgatggaggctctgggggtgagcaccgtggacgcgtatgttggggagagcgggtggccgaccaaaggagttgttggagggaagataccgccggccgcaaggcgattgttgggcgccgccgaaggctcggcgaggcggcttctggacacgggtgacgacgccggctcgccggcctccattcccaacgctcgagcatacaacaacaacctcatcaaccgcatgctgtccggccggacgggcaccccgcaccgccctaatgccaacatggacgtgtacatcttcgccctcttcaacgagaacgacaagggcagcaacggtgcggacgacgtcgagcagaacttcggcctcttctacccgaacgagacgaaggtgtacgagttcagctttcagggcggcggcggcccgccaggcccgtccagtgacagctggtgcgtggggaacgcggcggccgggggcaaggcgctgcaggacgcgctggactacgcgtgcggccacggcgccgactgcagcgccatccagcccaccgggtcgtgctacgaacccaacaccgtcctcgcgcacgcctcctacgcgttcaacagctactacaagaaaaacaaccgggccgccgggacgtgcgacttcaacggcgccgcctccgtcg

SEQ ID NO: 22543 - DNA, 595 bp, Zea Mays
cgcacgcgtcatacgcgttcaatgactactaccagcgcaacggccgggccgacgggacgtgcgacttctccggcgccgccgccgtcgtcaaccaggatcccggcctctgcgccgcgacggcgagctggtgcgtggcgaaacaaggggtcggggacgaccagctgaagcaggcgctggactacgcctgcggccacggcgcggactgcagcgccatccagcaaggaggggcgtgcttccagccggacaacatgccgtcccacgcctcctacgcgttcaacagctactaccagcgcaacggccgggctagcgtggcgtgcgacttctccggcgccggcgtcgttgtttaccagcaacccacggtcggaaactgtgtgctgccatcgaacggctgatcaaccggacaaacaaagctacaacagtgacgtcttgaggcgatggatgatgcatgctacgtgctaacatctcgatcacgatcagtatacaggatatcttattggggtgggcataaaatgtacagcattctgtacggcaaaactctaataaaatccggcacctgcaaagaaaaaaaaccgcgggtgcttcttacttcctctca

SEQ ID NO: 22544 - DNA, 2723 bp, Zea Mays
tgcgaaaaatgtacgggaagcgcggggaagacctctcatgagaaagcagaggcacacacgcacactgcacatgcggctcacacgaaccacacccttgcgaaatgcgaaggtcggagtcaccaacatatcgccggcctctcgtctcttccccgatagcatatcgatcgccgaaacggaacaaatttgtgtgacagagagtgggtgagtgagtaagtgtgtgtgtgtgtgtgtgtgtgtgtgagagagagagagagagagagagagagagagagagagagagagagagagagagagagagagagagagagagagtaatagagtatcagttccaaactcgccaaagtcacaaggcatccatttcgaactacgctgaatttggcagttgaacatttcaaggacgagacacaatttctcagtacaccatgctaacggcctcgccgtcgtctcaggtgaagccgcaacaatggggtacatgcggggtcagcgtggcatcgacgccggcgcttcttccgccaccggccgccggacggcttgtcgccgtcgataccaggaggaggacgaggacggttgcctccgccgcgcttggtcctgtggccaccgagcccgcagaaaggtctcccgtgccacagcccccgccactgtccagcgacgaggagacggtgctccggctcggcaactacgtcccggtcttcgtcatgctcccacttgaagtggtgaccaccgagaacgacctggaggacgcggggaagctgcgggagcagctgcggcggctgcggggggccggcgtcgacggcgtgatggtggacgtgtggtggggcgccgtggagggcgccgggccggcgctgtacgagtggcgcgcgtaccgggacctgttccgggtcgtgcagggcgaggggctcaagctgcaggccatcatgtcgttccacgcgtgcggcggcaacgtcggcgacgacgccgtcagcatcccgctcccgcggtgggtgcgggaggtcggcgaggccgaccccgacgtgttctacacgagctccagcggggcgcggaaccaggagtgcctctccattggcgtcgacgacgagccgctgttccatggcaggactgccatccagttgtatgccgatttcatgaagagcttcagggagaacatggcggacttcctggactccggcctgatcgtggacatcgaagtcgggcttggccctgcgggggagctgaggtacccgtcgtatccggagacgcaggggtgggtgttccccggcatcggacagttccagtacctggaggcggatttcaaggcggcggcggcggaggccgggcacccagactgggagctaccagacgacgccggggagatcaacgacacgccggaggacactgggttcttcgcggcggagcgagggacctacctcaccgagcaggggaggttcttcctgacatggtactcccgcaagctgatccagcacggagacagggtcttggacgaagccaacaaggccttcctggggtgcaaggtcaagctcgccgcaaaagtgtccgggatacactggtggtacaggcacccgagccacgccgcggagctgacctcggggtactacaacctcggcggccgggacgggtacgcgccgatcgcgcgcatgctggcgcggcacgacggcgccgtcctcaacttcacctgcgcggagatgcggaactcggagcaggccgaggaggccctgagcgccccggagcagctcgtccagcaggtgctgagcgccgggtggagggagggggtcgaggtggcgtgcgagaacgcgctgagccggtacgaccgccgcgggtacaaccagatgctgctcaacgcgcggcccaacggcgtgggtctctccggcgccggcgccggcgccgcgcggcgcagggtcgcggcggtgacgttcctccggctctcggacgagctcctggcgagcaacaacttccggatcttccggaccttcgtccggaaaatgcacgccgacctggattactgccctgatgcggaccggtacggtcggcccctcaagcccctagagcggtccgcgccagagatgcccatggagcggctgctggaagccaccgcgccggcgccggcgttcccgtttgatccggagaccgacatgagcgtcggcggcgggctcgcagaggctgtcgactgggtgctcgacaagatcgcgtggctatttggataggatcagaatcagatcacactcaggcgatcagcatttccgttggacacgaaccattgatccgcaacaggaatggcatggccagtgatacatgcagttgcgctagcagcaccatgtcatgacaccgacattgtacctgtacacgcttctgcttcgtcctccttttagcggaaggctatttatgatatactgatgaaatttacagcatcttgggtaagatgttttagatgttgtttgaattttcacgtattcatgttaatgtacgtgtattaggggtggtttcgtgtagagtttagtttaaatttcacgtaaatttggctaccatatagattgaggtggatacatgtcctgagccaggcttaccgaagaaatcgatggtctgtcctacgaatttttttcccagaagctttatgtaaaaggaattagttaaatatatttaagagttgtgtcgtcattttagtgttgcgggcattaccgacacccatttgcactaacataacccacacatgcatcaacatgcacaaattt

SEQ ID NO: 22545 - DNA, 874 bp, Zea Mays
ttttgccacgctgccactcgggcacgagcacgagactgctcggccgacgaaataataaagcgcgcgcgcgcacgcggagaggctcggagagctgagtgagatggcacaagccatggcgtccatgaccggcctctcgcagggcgttctgcccagcaggcgcgccgccaacagggccaggacggccgccgtcgtcagggcgtccgccgaggcgcaggcgcaggcgcaggcgggccgccgcgccgtgctcgggctggtggccactggcatcgtcggcggcgccttgtcgcaggcggtgcacgccgagaccgtcaagaccatcaagatcggagccccgccgccgccctccggtggactccccgggactctgaactctgaccaggcgagggacttcgacctccccttgaaggagcggttctacctgcagccgctgccgccggcggaggcggtggcgagggtgaagacgtcggcgcaggacatcatcaacctcaagccactcatcgacaagaaggcgtggccgtacgtccagaacgacctccgcctccgggcctcctacctgcgctacgacctcaagaccgtcatcgcttccaagcccaaggaggagaagcagagcctcaaggagctcaccggcaagctcttcagcaccatcgacgatcttgaccatgccgcaaagatcaagagcaccccggaggccgagaaatacttcgcagcaaccaaagatgcgctcggcgacgtcctcgccaagctagcctagatggaagctaatagatgggttaacgatggccacgtaatttcggacttgtgtttgttcatatggagccggcaaatgtaccgtttcctgttcatattatatcccaagttcttgacaaggaaaaac

SEQ ID NO: 22546 - DNA, 438 bp, Zea Mays
agcggtagcggccagccgggtggaatcttctctccgtccctggtctagcaatcaagcgccctgccgctctaggcaccaaaacctcgcgaggcaaccgcccgccggcgccgccgacgtagcaagagggtgagctgaggactagaggagagggaagatgtcgttccgcgcgcgggagatgtacaagaaggtggtgcggcgcttgggtggcgaggggaagctgccggctgagctgatgaagtcggtgaaggacatactgccggacagcaacgtcgtcatggggcgggccaagcgcggcatcttcgcggggcgacacatccggttcgggaacaaggtctccgaggacggcggcaacaattcaattttgttgcttcggtatttcgagagatggctgagcttcaccgctgcgagatcatgctggagcatatgaagtgtggcact

SEQ ID NO: 22547 - DNA, 2321 bp, Zea Mays
cttcaagatatataattattattcgcagcaaagaggggcacaagcaagagaaggattaggacacaaacgctagagagagagagagagaggtggtggccggtgggacgtccgtggtggtggtggagttagatcggctgtgcttgttcctcgctcctcgctggttcagaggagagaacaacttagcaaacactccttggccagctagtccactgaagtctgagttcagcagctcatcatacactcctctttcatcccagcttgagtgtgataatttgtctgcactcagcaatactccagataaccagagctccacagaaaccatttcagcacaatcaatatcaccactggaagtagacagctcatacaaacaggcagctatccttcgggagaacacccaagtgagacctgatccattgtacacaacatcaaggcataatatgcaacacgctttacgagaaatagagactgttctgatggcacctgatgctgatgatgcagctactagcaccaagcatgaatttgaggaacataaacctgctcagctgatgaggcagcggtcaaggacatggagtcatgaatctaggcagccatcaccaggagttgtacggacacaacttgcatctggataccccacagcaagctatgagttccgcccagagaaacggctaagggagttaagggaggatccgcagagcatggtgaagcagctattaaccaagtgtgctgaagcattaagtgaggagaggatagaggagttccttaaccttgttcagcaagctcgtggagttgtatcaattactggggagccaatccagcggttaggtgcttacctccttgagggtttggttgctagacatgcaaactcaggtacaaacatatatcgtgccctgaagtgccgtgagccagagagtaatgaactcttgtcttacatgaagattttgtataacatctgtccgtacttgaagtttggctatatggctgccaatggggcaattgcagaggcattaagaaatgaggacaggatccatattattgatttccagattgcccaagggacacagtggataacactgatacaagcgctagctgcaaggcctgggggtccaccacacgtgcggatcactggaatagatgacccagtgtcagagtatgcccgtggtgaaggtctggaccttgtagggaagatgttgaaaagcatgtctgaggaattcaggatacctttggagtttacccctctgcccggtatttatgcaactcaagttacaaaagaaatgctggacattaggtcaggcgaagcacttgctgtcaacttcactctgcagctgcaccacaccccggatgagagcgtggacgtgaacaacccacgggacgggctactccggatggtgaaaggcctgtctccgaaggtgaccacgcttgtggagcaggagtcgcacaccaacacgaccccgttcttgatgcggttcaccgagaccttggactactattcggccatgttcgagtcaatcgacacgaacctgccacgggacaacaaggagcggatcaacgtggagcagcactgtcttgccaaggacatcgtgaacatcatcgcctgcgaggggaaggaccgggtggagcgtcacgagctcctgggcaaatggcggtcgaggctgaccatggccgggttcagaccatacccgctgagctcgtacgtgaactcggtgatcaggaagctccttgcctgctactcggacaagtacaccctggaagagaaggatggcgcgatgctgctcggctggaagaacaggaagttgatatctgcttctgcttggcactgacagtaacgttttcagaagaccggaagtacacgtcaactcttacatatatatatgtatgtatgcataatgaattacctggtctgctttccgcaaaaaaggacgccctttgttgtacatgtacatgatgctgtacccttagttttcctgaagtgcagaccagagaagagaacattgacattagattgtagctgctaagctgtatggtaattacagttttcttttgctctcatgtattcacccctgtcatggacttctccaagcgtattcttagctaatcagcatgcatacatgctgagatgcttcttagtctttctttcatgctcttgagcgtgcaatgatgtcaacaagttaacatgccctgatgcccctccgagggaagatggatctcaagtcttccatctgcgagatccaagtttgggcaggcaaagtgtgctgatttttatcatctgactgtgaaccatcatcatcgttgaaaaggtggagcgcataggcaccattccattc

SEQ ID NO: 22548 - DNA, 2315 bp, Zea Mays
aagatatataattattattcgcagcaaagaggggcacaagcaagagaaggattaggacacaaacgctagagagagagagagagaggtggtggccggtgggacgtccgtggtggtggtggagttagatcggctgtgcttgttcctcgctcctcgctggttcagaggaggtcatgatcaactaatgcctattcatttattatggacttgcaccagttgttaaagtacagattaactggtgctaacgtctactacgaatttcctacagagaacaacttagcaaacactccttggccagctagtccactgaagtctgagttcagcagctcatcatacactcctctttcatcccagcttgagtgtgataatttgtctgcactcagcaatactccagataaccagagctccacagaaaccatttcagcacaatcaatatcaccactggaagtagacagctcatacaaacaggcagctatccttcgggagaacacccaactactagcaccaagcatgaatttgaggaacataaacctgctcagctgatgaggcagcggtcaaggacatggagtcatgaatctaggcagccatcaccaggagttgtacggacacaacttgcatctggataccccacagcaagctatgagttccgcccagagaaacggctaagggagttaagggaggatccgcagagcatggtgaagcagctattaaccaagtgtgctgaagcattaagtgaggagaggatagaggagttccttaaccttgttcagcaagctcgtggagttgtatcaattactggggagccaatccagcggttaggtgcttacctccttgagggtttggttgctagacatgcaaactcaggtacaaacatatatcgtgccctgaagtgccgtgagccagagagtaatgaactcttgtcttacatgaagattttgtataacatctgtccgtacttgaagtttggctatatggctgccaatggggcaattgcagaggcattaagaaatgaggacaggatccatattattgatttccagattgcccaagggacacagtggataacactgatacaagcgctagctgcaaggcctgggggtccaccacacgtgcggatcactggaatagatgacccagtgtcagagtatgcccgtggtgaaggtctggaccttgtagggaagatgttgaaaagcatgtctgaggaattcaggatacctttggagtttacccctctgcccggtatttatgcaactcaagttacaaaagaaatgctggacattaggtcaggcgaagcacttgctgtcaacttcactctgcagctgcaccacaccccggatgagagcgtggacgtgaacaacccacgggacgggctactccggatggtgaaaggcctgtctccgaaggtgaccacgcttgtggagcaggagtcgcacaccaacacgaccccgttcttgatgcggttcaccgagaccttggactactattcggccatgttcgagtcaatcgacacgaacctgccacgggacaacaaggagcggatcaacgtggagcagcactgtcttgccaaggacatcgtgaacatcatcgcctgcgaggggaaggaccgggtggagcgtcacgagctcctgggcaaatggcggtcgaggctgaccatggccgggttcagaccatacccgctgagctcgtacgtgaactcggtgatcaggaagctccttgcctgctactcggacaagtacaccctggaagagaaggatggcgcgatgctgctcggctggaagaacaggaagttgatatctgcttctgcttggcactgacagtaacgttttcagaagaccggaagtacacgtcaactcttacatatatatatgtatgtatgcataatgaattacctggtctgctttccgcaaaaaaggacgccctttgttgtacatgtacatgatgctgtacccttagttttcctgaagtgcagaccagagaagagaacattgacattagattgtagctgctaagctgtatggtaattacagttttcttttgctctcatgtattcacccctgtcatggacttctccaagcgtattcttagctaatcagcatgcatacatgctgagatgcttcttagtctttctttcatgctcttgagcgtgcaatgatgtcaacaagttaacatgccctgatgcccctccgagggaagatggatctcaagtcttccatctgcgagatccaagtttgggcaggcaaagtgtgctgatttttatcatctgactgtgaaccatcatcatcgttgaaaaggtggagcgcataggcaccattccattc

SEQ ID NO: 22549 - DNA, 2738 bp, Zea Mays
cgcgtactgatcgcaatcgaagaagggccgcgtcgtaaaagctcccacgcaagtacacaacacagtacttcagaaacaggacgcgggctcgacgacacaccgatcaggcgcgccgaagcagcgtccgcagccgacggtcatctcccggcgccggtcgcggccatgtcgaagaagaaggcggtcacgacgatgacgctcaaagacttccacggcggctccatcccctccgagctcccgctcccctccgcccccggcgtcaccccgcgccccgcggatcgcaccgtcgcctccgcatcccccgtcgcagccgcggtcgcacggccacgcgtaccggtcgcttcgcctgccgccgctgcggcggcagccgcgatgccttccttcctcacaaacccgtcccgaatcggccgtcacttcgacgaggacgagcgcacccccttcgagcccaccacgccacgccgtcccgcgccgtccccaacgtcgttcgcacccgctcccgtggtggcgcccaccagatcaggtccggggaacgcatggggcccgaagaaggaggcctcttcggcgccttcccctgtgggtcatgctcctgcctccgccggcgaccagatctggtccgcgacacgcatcgcccaggcgagcgcagtggagaaggtaatctccggaagatggcacccgccgaagcccacgtctccgccggcgccggtgtcagttccggtgttggagactcccgtggccccgccagagattgagaggcctaggtccgttggggtgagagagctggatagtggggtggagaggggcgccgcaccagtgagacccgcgtcacatgaaggaaggattggggaagggagagctggggaggtgccagagagacccaagttgaagctgcttcctcggtccaagccaattgaggatcctgaacagcgtcctacctatgtcgaagcgaagcaggtgcaccaggtccaggttactgctggcctcatgaaggctgaggataaccatgatctgcaccagaatgcaagggctactgaaacaggagttttgggagcagatgctgagagcagggtagcagagcgaccacggctgaatctgaagcctcgttcctatgtaacaggacagtctgatgaaattgctgtcaaggaaagtttcatgaccctgaatgcatctgttacgcaatttagcatgcttgctgcattgctttggagtctggaaccatatatgttcaaagataaaaacaacaccaactatgccctccaggtcaccaaccatacatggaaaagttttagtgaagtctatggagcaaacaatttaatatttcattctatcaattaaaaaagtatggttttgcttcggatgagatctccataaacaatggacaagtgtaaaggagaatattgatggttggaatgagtggtggtagcagaatgatgtctacattcattgaatgccatctctctttggtggtgctcgccccagggaacaagttctcaaagaacgtggagtggatgttttggccagtgatctcgagaagacttcaccagttggcaggcctaaaggcgaatttgcaaaggttgagcagaaggttgaagctatgtccattaacccttctgttgaaagacatgagagttttgcagctggtcatagaggcccaaggaatggtgataagaaagatcataagtggaatactgacagggctgatgcatataggcttactcgtcgagaggacaacaggagggttgctagagatatggagaagccacaggagcaaccacgcccagagcctgagacctggcgtaagccggtggagcctccaaagctagaggttgcaacacctcgttttgggaaagcagcaaccgcgttggagctcgcccaggccttctcaacgtctatgtctgatactgcaccacagagccggttgaccagtgctcccagtccaagagttcctcctagcccaggggctagtagggatcagtctggcttttcaaggctcactgacagcaggacgttacactcgggcccttcccagcgaaagataaatggctactgatcgcttggcacacatattacatgtgccacgatgatagcccaggcatcatggcctcgatgaagcgcccagctgtatcttcatactcaactgtccctgcgtggagaagtccagttgttgctctgtccaatggtggtacgcgagggtctctaatctcattgctggcaagcaaaaggctcctctcccataagtttctggtcagtgatttataactgacggttcgtttcctctcttgataacgagagatgtgaatttgtgaactgtttctgcttatgttcgccagccactatttattgctggggaataattgcagctgcctgcgcaccgtagttggttgcacttgcagacgccgcaaaattgggattttatcgtgctagttttgttttttttttttgccagaagaaactattgatactttgtagtcttgtttactttacggtgatattatgattagaggataggaccttcgttcttggttgtctatttggtacaatcctcgattggatcactgaaatttcgctggattacgactggaacagagaaattatgtttgaaaatcctgtgcaattggtgccatccaaatgggactctgaagacttgtttttcggttttttgtttggtatcgcgtaggcctgtaatgggttcagttcgacctgtttgtgaatacgctccgcccctcaaatctagtgacaggtag

SEQ ID NO: 22550 - DNA, 2550 bp, Zea Mays
cgcgtactgatcgcaatcgaagaagggccgcgtcgtaaaagctcccacgcaagtacacaacacagtacttcagaaacaggacgcgggctcgacgacacaccgatcaggcgcgccgaagcagcgtccgcagccgacggtcatctcccggcgccggtcgcggccatgtcgaagaagaaggcggtcacgacgatgacgctcaaagacttccacggcggctccatcccctccgagctcccgctcccctccgcccccggcgtcaccccgcgccccgcggatcgcaccgtcgcctccgcatcccccgtcgcagccgcggtcgcacggccacgcgtaccggtcgcttcgcctgccgccgctgcggcggcagccgcgatgccttccttcctcacaaacccgtcccgaatcggccgtcacttcgacgaggacgagcgcacccccttcgagcccaccacgccacgccgtcccgcgccgtccccaacgtcgttcgcacccgctcccgtggtggcgcccaccagatcaggtccggggaacgcatggggcccgaagaaggaggcctcttcggcgccttcccctgtgggtcatgctcctgcctccgccggcgaccagatctggtccgcgacacgcatcgcccaggcgagcgcagtggagaaggtaatctccggaagatggcacccgccgaagcccacgtctccgccggcgccggtgtcagttccggtgttggagactcccgtggccccgccagagattgagaggcctaggtccgttggggtgagagagctggatagtggggtggagaggggcgccgcaccagtgagacccgcgtcacatgaaggaaggattggggaagggagagctggggaggtgccagagagacccaagttgaagctgcttcctcggtccaagccaattgaggatcctgaacagcgtcctacctatgtcgaagcgaagcaggtgcaccaggtccaggttactgctggcctcatgaaggctgaggataaccatgatctgcaccagaatgcaagggctactgaaacaggagttttgggagcagatgctgagagcagggtagcagagcgaccacggctgaatctgaagcctcgttcctatgtaacaggacagtctgatgaaattgctgtcaaggaaagtttcatgaccctgaatgcatctgttacgcaatttagcatgcttgctgcattgctttggagtctggaaccatatatgttcaaagataaaaacaacaccaactatgccctccagggccatctctctttggtggtgctcgccccagggaacaagttctcaaagaacgtggagtggatgttttggccagtgatctcgagaagacttcaccagttggcaggcctaaaggcgaatttgcaaaggttgagcagaaggttgaagctatgtccattaacccttctgttgaaagacatgagagttttgcagctggtcatagaggcccaaggaatggtgataagaaagatcataagtggaatactgacagggctgatgcatataggcttactcgtcgagaggacaacaggagggttgctagagatatggagaagccacaggagcaaccacgcccagagcctgagacctggcgtaagccggtggagcctccaaagctagaggttgcaacacctcgttttgggaaagcagcaaccgcgttggagctcgcccaggccttctcaacgtctatgtctgatactgcaccacagagccggttgaccagtgctcccagtccaagagttcctcctagcccaggggctagtagggatcagtctggcttttcaaggctcactgacagcaggacgttacactcgggcccttcccagcgaaagataaatggctactgatcgcttggcacacatattacatgtgccacgatgatagcccaggcatcatggcctcgatgaagcgcccagctgtatcttcatactcaactgtccctgcgtggagaagtccagttgttgctctgtccaatggtggtacgcgagggtctctaatctcattgctggcaagcaaaaggctcctctcccataagtttctggtcagtgatttataactgacggttcgtttcctctcttgataacgagagatgtgaatttgtgaactgtttctgcttatgttcgccagccactatttattgctggggaataattgcagctgcctgcgcaccgtagttggttgcacttgcagacgccgcaaaattgggattttatcgtgctagttttgttttttttttttgccagaagaaactattgatactttgtagtcttgtttactttacggtgatattatgattagaggataggaccttcgttcttggttgtctatttggtacaatcctcgattggatcactgaaatttcgctggattacgactggaacagagaaattatgtttgaaaatcctgtgcaattggtgccatccaaatgggactctgaagacttgtttttcggttttttgtttggtatcgcgtaggcctgtaatgggttcagttcgacctgtttgtgaatacgctccgcccctcaaatctagtgacaggtag

SEQ ID NO: 22551 - DNA, 3247 bp, Zea Mays
cgcgtactgatcgcaatcgaagaagggccgcgtcgtaaaagctcccacgcaagtacacaacacagtacttcagaaacaggacgcgggctcgacgacacaccgatcaggcgcgccgaagcagcgtccgcagccgacggtcatctcccggcgccggtcgcggccatgtcgaagaagaaggcggtcacgacgatgacgctcaaagacttccacggcggctccatcccctccgagctcccgctcccctccgcccccggcgtcaccccgcgccccgcggatcgcaccgtcgcctccgcatcccccgtcgcagccgcggtcgcacggccacgcgtaccggtcgcttcgcctgccgccgctgcggcggcagccgcgatgccttccttcctcacaaacccgtcccgaatcggccgtcacttcgacgaggacgagcgcacccccttcgagcccaccacgccacgccgtcccgcgccgtccccaacgtcgttcgcacccgctcccgtggtggcgcccaccagatcaggtccggggaacgcatggggcccgaagaaggaggcctcttcggcgccttcccctgtgggtcatgctcctgcctccgccggcgaccagatctggtccgcgacacgcatcgcccaggcgagcgcagtggagaaggtaatctccggaagatggcacccgccgaagcccacgtctccgccggcgccggtgtcagttccggtgttggagactcccgtggccccgccagagattgagaggcctaggtccgttggggtgagagagctggatagtggggtggagaggggcgccgcaccagtgagacccgcgtcacatgaaggaaggattggggaagggagagctggggaggtgccagagagacccaagttgaagctgcttcctcggtccaagccaattgaggatcctgaacagcgtcctacctatgtcgaagcgaagcaggtgcaccaggtccaggttactgctggcctcatgaaggctgaggataaccatgatctgcaccagaatgcaagggctactgaaacaggagttttgggagcagatgctgagagcagggtagcagagcgaccacggctgaatctgaagcctcgttcctatgtaacaggacagtctgatgaaattgctgtcaaggaaaggtatgtgctgtaatctactgaccgtcgtatgtacatttcatgaccctgaatgcatctgttacgcaatttagcatgcttgctgcattgctttggagtctggaaccatatatgttcaaagataaaaacaacaccaactatgccctccagggtcagtgtttctgcatacctttttccttatgcttctacataggtaacatttaattgactgttgtaggggtggttttgttgtctttatgattagatggtgctgttcaccttaaattttgtcaaatgttgcatcactgcagtcaccaaccatacatggaaaagttttagtgaagtctatggagcaaacaatttaatatttcattctatcaattaaaaaagtatggttttgcttcggatgagatctccataaacaatggacaagtgtaaaggagaatattgatggttggaatgagtggtggtagcagaatgatgtctacattcattgaatgtaggtaacggcacctcaatttttttttgaatatgcgggaacttggatctttgtttccacaatttattagtgatgcttatgtttgacaagaattaggtttgggaccgatatatttaagtattgtgtatgatatatgtagtgtcaaataaaatttactattattttgacttctttttgttacttcaaatgccctaggccatctctctttggtggtgctcgccccagggaacaagttctcaaagaacgtggagtggatgttttggccagtgatctcgagaagacttcaccagttggcaggttgttatatgttgtgatgcatcatgttaacattgatagatgcatttcagttgtggcagggcataagttctgatttatttattggatcttgatatcaaagggtgttagagcatcttcaagagttcctaaaaagacaattggcctaaaggcgaatttgcaaaggttgagcagaaggttgaagctatgtccattaacccttctgttgaaagacatgagagttttgcagctggtcatagaggcccaaggaatggtgataagaaagatcataagtggaatactgacagggctgatgcatataggcttactcgtcgagaggacaacaggagggttgctagagatatggagaagccacaggagcaaccacgcccagagcctgagacctggcgtaagccggtggagcctccaaagctagaggttgcaacacctcgttttgggaaagcagcaaccgcgttggagctcgcccaggccttctcaacgtctatgtctgatactgcaccacagagccggttgaccagtgctcccagtccaagagttcctcctagcccaggggctagtagggatcagtctggcttttcaaggctcactgacagcaggacgttacactcgggcccttcccagcgaaagataaatggctactgatcgcttggcacacatattacatgtgccacgatgatagcccaggcatcatggcctcgatgaagcgcccagctgtatcttcatactcaactgtccctgcgtggagaagtccagttgttgctctgtccaatggtggtacgcgagggtctctaatctcattgctggcaagcaaaaggctcctctcccataagtttctggtcagtgatttataactgacggttcgtttcctctcttgataacgagagatgtgaatttgtgaactgtttctgcttatgttcgccagccactatttattgctggggaataattgcagctgcctgcgcaccgtagttggttgcacttgcagacgccgcaaaattgggattttatcgtgctagttttgttttttttttttgccagaagaaactattgatactttgtagtcttgtttactttacggtgatattatgattagaggataggaccttcgttcttggttgtctatttggtacaatcctcgattggatcactgaaatttcgctggattacgactggaacagagaaattatgtttgaaaatcctgtgcaattggtgccatccaaatgggactctgaagacttgtttttcggttttttgtttggtatcgcgtaggcctgtaatgggttcagttcgacctgtttgtgaatacgctccgcccctcaaatctagtgacaggtag

SEQ ID NO: 22552 - DNA, 2322 bp, Zea Mays
cgcgtactgatcgcaatcgaagaagggccgcgtcgtaaaagctcccacgcaagtacacaacacagtacttcagaaacaggacgcgggctcgacgacacaccgatcaggcgcgccgaagcagcgtccgcagccgacggtcatctcccggcgccggtcgcggccatgtcgaagaagaaggcggtcacgacgatgacgctcaaagacttccacggcggctccatcccctccgagctcccgctcccctccgcccccggcgtgtgcaccaggtccaggttactgctggcctcatgaaggctgaggataaccatgatctgcaccagaatgcaagggctactgaaacaggagttttgggagcagatgctgagagcagggtagcagagcgaccacggctgaatctgaagcctcgttcctatgtaacaggacagtctgatgaaattgctgtcaaggaaaggtatgtgctgtaatctactgaccgtcgtatgtacagtaagtgcaaacatgtccaaactcatattgcctgacattctaatcccaacttgtgtataagtctctggtatgtgacctttggttactccatgctcattcagtttcatgaccctgaatgcatctgttacgcaatttagcatgcttgctgcattgctttggagtctggaaccatatatgttcaaagataaaaacaacaccaactatgccctccagggtcagtgtttctgcatacctttttccttatgcttctacataggtaacatttaattgactgttgtaggggtggttttgttgtctttatgattagatggtgctgttcaccttaaattttgtcaaatgttgcatcactgcagtcaccaaccatacatggaaaagttttagtgaagtctatggagcaaacaatttaatatttcattctatcaattaaaaaagtatggttttgcttcggatgagatctccataaacaatggacaagtgtaaaggagaatattgatggttggaatgagtggtggtagcagaatgatgtctacattcattgaatgccatctctctttggtggtgctcgccccagggaacaagttctcaaagaacgtggagtggatgttttggccagtgatctcgagaagacttcaccagttggcaggcctaaaggcgaatttgcaaaggttgagcagaaggttgaagctatgtccattaacccttctgttgaaagacatgagagttttgcagctggtcatagaggcccaaggaatggtgataagaaagatcataagtggaatactgacagggctgatgcatataggcttactcgtcgagaggacaacaggagggttgctagagatatggagaagccacaggagcaaccacgcccagagcctgagacctggcgtaagccggtggagcctccaaagctagaggttgcaacacctcgttttgggaaagcagcaaccgcgttggagctcgcccaggccttctcaacgtctatgtctgatactgcaccacagagccggttgaccagtgctcccagtccaagagttcctcctagcccaggggctagtagggatcagtctggcttttcaaggctcactgacagcaggacgttacactcgggcccttcccagcgaaagataaatggctactgatcgcttggcacacatattacatgtgccacgatgatagcccaggcatcatggcctcgatgaagcgcccagctgtatcttcatactcaactgtccctgcgtggagaagtccagttgttgctctgtccaatggtggtacgcgagggtctctaatctcattgctggcaagcaaaaggctcctctcccataagtttctggtcagtgatttataactgacggttcgtttcctctcttgataacgagagatgtgaatttgtgaactgtttctgcttatgttcgccagccactatttattgctggggaataattgcagctgcctgcgcaccgtagttggttgcacttgcagacgccgcaaaattgggattttatcgtgctagttttgttttttttttttgccagaagaaactattgatactttgtagtcttgtttactttacggtgatattatgattagaggataggaccttcgttcttggttgtctatttggtacaatcctcgattggatcactgaaatttcgctggattacgactggaacagagaaattatgtttgaaaatcctgtgcaattggtgccatccaaatgggactctgaagacttgtttttcggttttttgtttggtatcgcgtaggcctgtaatgggttcagttcgacctgtttgtgaatacgctccgcccctcaaatctagtgacaggtag

SEQ ID NO: 22553 - DNA, 1249 bp, Zea Mays
gggcgcctagttccgcctagccgccttttaaaccatggataactcatctctattaggcctaaaggcgaatttgcaaaggttgagcagaaggttgaagctatgtccattaacccttctgttgaaagacatgagagttttgcagctggtcatagaggcccaaggaatggtgataagaaagatcataagtggaatactgacagggctgatgcatataggcttactcgtcgagaggacaacaggagggttgctagagatatggagaagccacaggagcaaccacgcccagagcctgagacctggcgtaagccggtggagcctccaaagctagaggttgcaacacctcgttttgggaaagcagcaaccgcgttggagctcgcccaggccttctcaacgtctatgtctgatactgcaccacagagccggttgaccagtgctcccagtccaagagttcctcctagcccaggggctagtagggatcagtctggcttttcaaggctcactgacagcaggacgttacactcgggcccttcccagcgaaagataaatggctactgatcgcttggcacacatattacatgtgccacgatgatagcccaggcatcatggcctcgatgaagcgcccagctgtatcttcatactcaactgtccctgcgtggagaagtccagttgttgctctgtccaatggtggtacgcgagggtctctaatctcattgctggcaagcaaaaggctcctctcccataagtttctggtcagtgatttataactgacggttcgtttcctctcttgataacgagagatgtgaatttgtgaactgtttctgcttatgttcgccagccactatttattgctggggaataattgcagctgcctgcgcaccgtagttggttgcacttgcagacgccgcaaaattgggattttatcgtgctagttttgttttttttttttgccagaagaaactattgatactttgtagtcttgtttactttacggtgatattatgattagaggataggaccttcgttcttggttgtctatttggtacaatcctcgattggatcactgaaatttcgctggattacgactggaacagagaaattatgtttgaaaatcctgtgcaattggtgccatccaaatgggactctgaagacttgtttttcggttttttgtttggtatcgcgtaggcctgtaatgggttcagttcgacctgtttgtgaatacgctccgcccctcaaatctagtgacaggtag

SEQ ID NO: 22554 - DNA, 1003 bp, Zea Mays
tgggagggggagctggaaagattgaaatttgatggcgtctggagttggaagcttgtggaggagtaggggatccattaaagacttcagttacagctgaacttttgggcattaactccgcaggaaactcgttcatttgtctgcggaatcaaaccatggctctggcagcggaattctgagcacctcaggtgttattactggtctgaggttgaggcgagaggtagcagcagacagcgacgagcatcaggagcagaggtgagggagggagacaatgcaacaccccgagacgacgccgaattccggtttcccgctttgtaaaatcctgtggtgagtgagagagagagagagagtgctgccgcaacaaaaaaaaacaacaactgcaacttcctgcagaggttggaatgtgctacgtatctactaagatatgggtacctttttgcggttctttttttttttatttcttctcccccttttttttggcctgagctcctctcctgttcatgcacctgtgtgatattaagtttgtcagtcaattgttagtataagcaagcacgcagaaaaaaaagaaaaggaaaaaaaggaaaagggttaagctgagaagccaatcgtcggggctgtggtctggctggccgcctatgatagattcttgttctcctcctcagggaggaaattcttctggtgagatgagagtaggttgttgttggtgcatgctccagctcagctgaggagtgagctgggcacagcacatccttcattcatgtggagctttgtgttggctggtggttggttcacttctccttgtggattgatgagtgtatatgtatataataaaaccatacaatatacttatatatgctactgcgattattcttcctgctagattaggttgggctacagggcgaccgctatacatagagagcatttataaagaataatgtaaaaagttgtagttcctcccatgtcttgtggtgtgcaagtcttgatgaagggtatgatctatctgcac

SEQ ID NO: 22555 - DNA, 2806 bp, Zea Mays
gctccatctgcccagagatcttgctgctccatctgcccagatcccagcacgttcgatatcttcatgaccctcccatgatcttttttacccccactgaagaattcccatgacccaaccacgcctcgagcctcggcatctttcggttactaccattaccagacggccataagctggggcctgggggggccaagaacccgcaccagtgactgtcatcagtccacagccagcgtaactaaccaagcgcctccaaccaactcgccccggggaacaaggaccatcgccacccccagttgcgttcgagattcctcagccgccccgccctttataagccaccgcaaccgcgaaccccggacgcaaccgcagcagggcgttgggcgagtgagtgagtcagtgaggctgggatagcagcagcagtgcgccgcactcaacttctcttcttgccgtgcggaatgccgcgccggcggaggacgcgcagcagcgaggagctcaaggcggaggacttcgtcgactcggtgctcaacttcggcggcgaggaggatggggaagaggagaagcaggaggccggcggggacggccagccggcggcggagttcaagtccaagaacctggaggccgagcggaagcggcgcggcaagctcaaccgcaacatcctcgcgctcagggccgtggtgccgaacatcaccaagatgagcaaggagtccaccctctcggacgctatcgacctcatcaagaggctccagaaccaggtccttgagctgcagcgccagctcgccgacccgcccggagaggcctgggagaagcagggcagcgcgtcgtgctctgagtccttcactgccacggaaaacatgccgtatcagggtcagatcgagctggttcctctggggccatgcaagtaccacctcaggatcttctgcaagaaggccggcgtcttcaccaaggtgctggaagcactctgcagctacaacgcgcaggtcaccagcctgaacacgataacgttctacggctacgctgagagcgtcttcaccatcgaggtgaaaggcgagcaggatgttgtgatggtggagctaaggagcctcttatccaacatcgtggagggccggcacgcggacggtgcttggactgcccttgtcatggatcgcgccgagctcaccacggagcaggttctcaagcgagatattccatgggagcattacatgtcaactaagcttatctccggaacgtgccttcagcttttacggcgatatgaccacaaaccggagagccagcgagctcctttacttgaggaggatggaccagcatatgtccgagttttcctgaatatcctgtggagcatctccaaggaagagactgttgaatacgtgcttgccctcattgatgaaatgcttgcgacaaatcctaaacgtgcagcactgttttacgatcaatctctgtctggtgaagatatttatgagcctttcttaaggttgttatggaaaggcaactggtttgtacaagaaaaaagttgtaagatattgactgctataatcagtgcacgaccaaagcttcggaatggcacacttccaaatggagatgcttcgaattcgaagagcaagcttacttcaacacatgatgtattgagaggtttggtcaattggctctgttcacagctgaggaatcctacacacccgagctgctctattcctacttccatccattgcctctccacttcgctaagagaaccatatgttaggacattatttgttcaagctgatggcatcaagctgctcattccattaatttccccagctgccacacaacagtcaattcagctcctttatgaaacttgcctctgcatctggcttttatcattttatgatgctgcagttgattatttgtccaccacaagagttatgccaagacttgttgaggttgtcaagggatctactaaagagaaggtggtcagagttgctgtgttgtctttctgtaatttgctggcaaagggtgcatttgctgcccagatgatcgatcttggattgccgcaaatagtacaaaacttgaaagctcaagcatggactgatgaggatctgttagatgctttgaatcaactagaggtgggactcaaagaaaacctcaagaagttgagttcctttgataagtacaaacagcaagttcttcttggtcatcttgactggtctccaatgcacaaagatccaagtttctggcgtgagaacattaacaattttgaagagaatgatttccagattctacgagttctcatgacaatcattgacacatcaagtgacaccaccgctcttgccgtggcctgctacgacctctcacagttcctccagtaccatccatctggccgaatcgtggtggcagacctcaaggccaaggaccgagtcatgaagctcatgaatcatgaaaacactgaagtgcagaaaaatgcgctgctctgtgtgcagaggctcttccttggcgcaaagtatgccagttttctgcgggcttgagagaaaccgagtcttttttgtatttagatccagagaactcctggccatttttaaaaatggctgttaagaaaaccttgaaaattcttgtccattatatcctattgttatttgatttctgagaccgatgtataataaataattagagccataccatgctcgatgtaataaagtgtccatgggcttgttgattcatttatgtaaattctgatctccaactttagcaatccttttttttctgtacacctgacttgtgtgaatatggacgtacatgtttgcaattgttccacaggtttttatgttagttcattctcctgaaa

SEQ ID NO: 22556 - DNA, 1642 bp, Zea Mays
cgtggccacgtaaacgtgggccccatccacaccggtgcggactgcggagggactcggccacgggccgatcgtctcgcgctcatctctaatccgccccctgtccctctcctctcagatcgcttccttgttctcgcctcgtcttccccgatcgtcgccgggagcctcccgatccttcttccaccttgcacggtcgtgccagggccggcacgcggacggtgcttggactgcccttgtcatggatcgcgccgagctcaccacggagcaggttctcaagcgagatattccatgggagcattacatgtcaactaagcttatctccggaacgtgccttcagcttttacggcgatatgaccacaaaccggagagccagcgagctcctttacttgaggaggtcttactttactttgactatagtgcacgaccaaagcttcggaatggcacacttccaaatggagatgcttcgaattcgaagagcaagcttacttcaacacatgatgtattgagaggtttggtcaattggctctgttcacagctgaggaatcctacacacccgagctgctctattcctacttccatccattgcctctccacttcgctaagagaaccatatgttaggacattatttgttcaagctgatggcatcaagctgctcattccattaatttccccagctgccacacaacagtcaattcagctcctttatgaaacttgcctctgcatctggcttttatcattttatgatgctgcagttgattatttgtccaccacaagagttatgccaagacttgttgaggttgtcaagggatctactaaagagaaggtggtcagagttgctgtgttgtctttctgtaatttgctggcaaagggtgcatttgctgcccagatgatcgatcttggattgccgcaaatagtacaaaacttgaaagctcaagcatggactgatgaggatctgttagatgctttgaatcaactagaggtgggactcaaagaaaacctcaagaagttgagttcctttgataagtacaaacagcaagttcttcttggtcatcttgactggtctccaatgcacaaagatccaagtttctggcgtgagaacattaacaattttgaagagaatgatttccagattctacgagttctcatgacaatcattgacacatcaagtgacaccaccgctcttgccgtggcctgctacgacctctcacagttcctccagtaccatccatctggccgaatcgtggtggcagacctcaaggccaaggaccgagtcatgaagctcatgaatcatgaaaacactgaagtgcagaaaaatgcgctgctctgtgtgcagaggctcttccttggcgatttagatccagagaactcctggccatttttaaaaatggctgttaagaaaaccttgaaaattcttgtccattatatcctattgttatttgatttctgagaccgatgtataataaataattagagccataccatgctcgatgtaataaagtgtccatgggcttgttgattcatttatgtaaattctgatctccaactttagcaatccttttttttctgtacacctgacttgtgtgaatatggacgtacatgtttgcaattgttccacaggtttttatgttagttcattctcctgaaa

SEQ ID NO: 22557 - DNA, 1788 bp, Zea Mays
cgtggccacgtaaacgtgggccccatccacaccggtgcggactgcggagggactcggccacgggccgatcgtctcgcgctcatctctaatccgccccctgtccctctcctctcagatcgcttccttgttctcgcctcgtcttccccgatcgtcgccgggagcctcccgatccttcttccaccttgcacggtcgtgccagggccggcacgcggacggtgcttggactgcccttgtcatggatcgcgccgagctcaccacggagcaggttctcaagcgagatattccatgggagcattacatgtcaactaagcttatctccggaacgtgccttcagcttttacggcgatatgaccacaaaccggagagccagcgagctcctttacttgaggaggatggaccagcatatgtccgagttttcctgaatatcctgtggagcatctccaaggaagagactgttgaatacgtgcttgccctcattgatgaaatgcttgcgagttgttatggaaaggcaactggtttgtacaagaaaaaagttgtaagatattgactgctataatcagtgcacgaccaaagcttcggaatggcacacttccaaatggagatgcttcgaattcgaagagcaagcttacttcaacacatgatgtattgagaggtttggtcaattggctctgttcacagctgaggaatcctacacacccgagctgctctattcctacttccatccattgcctctccacttcgctaagagaaccatatgttaggacattatttgttcaagctgatggcatcaagctgctcattccattaatttccccagctgccacacaacagtcaattcagctcctttatgaaacttgcctctgcatctggcttttatcattttatgatgctgcagttgattatttgtccaccacaagagttatgccaagacttgttgaggttgtcaagggatctactaaagagaaggtggtcagagttgctgtgttgtctttctgtaatttgctggcaaagggtgcatttgctgcccagatgatcgatcttggattgccgcaaatagtacaaaacttgaaagctcaagcatggactgatgaggatctgttagatgctttgaatcaactagaggtgggactcaaagaaaacctcaagaagttgagttcctttgataagtacaaacagcaagttcttcttggtcatcttgactggtctccaatgcacaaagatccaagtttctggcgtgagaacattaacaattttgaagagaatgatttccagattctacgagttctcatgacaatcattgacacatcaagtgacaccaccgctcttgccgtggcctgctacgacctctcacagttcctccagtaccatccatctggccgaatcgtggtggcagacctcaaggccaaggaccgagtcatgaagctcatgaatcatgaaaacactgaagtgcagaaaaatgcgctgctctgtgtgcagaggctcttccttggcgatttagatccagagaactcctggccatttttaaaaatggctgttaagaaaaccttgaaaattcttgtccattatatcctattgttatttgatttctgagaccgatgtataataaataattagagccataccatgctcgatgtaataaagtgtccatgggcttgttgattcatttatgtaaattctgatctccaactttagcaatccttttttttctgtacacctgacttgtgtgaatatggacgtacatgtttgcaattgttccacaggtttttatgttagttcattctcctgaaa

SEQ ID NO: 22558 - DNA, 1627 bp, Zea Mays
aaggttttttgttatgcaaagaaaaaaagaggttctcaagcgagatattccatgggagcattacatgtcaactaagcttatctccggaacgtgccttcagcttttacggcgatatgaccacaaaccggagagccagcgagctcctttacttgaggaggatggaccagcatatgtccgagttttcctgaatatcctgtggagcatctccaaggaagagactgttgaatacgtgcttgccctcattgatgaaatgcttgcgacaaatcctaaacgtgcagcactgttttacgatcaatctctgtctggtgaagatatttatgagcctttcttaaggttgttatggaaaggcaactggtttgtacaagaaaaaagttgtaagatattgactgctataatcagtgcacgaccaaagcttcggaatggcacacttccaaatggagatgcttcgaattcgaagagcaagcttacttcaacacatgatgtattgagaggtttggtcaattggctctgttcacagctgaggaatcctacacacccgagctgctctattcctacttccatccattgcctctccacttcgctaagagaaccatatgttaggacattatttgttcaagctgatggcatcaagctgctcattccattaatttccccagctgccacacaacagtcaattcagctcctttatgaaacttgcctctgcatctggcttttatcattttatgatgctgcagttgattatttgtccaccacaagagttatgccaagacttgttgaggttgtcaagggatctactaaagagaaggtggtcagagttgctgtgttgtctttctgtaatttgctggcaaagggtgcatttgctgcccagatgatcgatcttggattgccgcaaatagtacaaaacttgaaagctcaagcatggactgatgaggatctgttagatgctttgaatcaactagaggtgggactcaaagaaaacctcaagaagttgagttcctttgataagtacaaacagcaagttcttcttggtcatcttgactggtctccaatgcacaaagatccaagtttctggcgtgagaacattaacaattttgaagagaatgatttccagattctacgagttctcatgacaatcattgacacatcaagtgacaccaccgctcttgccgtggcctgctacgacctctcacagttcctccagtaccatccatctggccgaatcgtggtggcagacctcaaggccaaggaccgagtcatgaagctcatgaatcatgaaaacactgaagtgcagaaaaatgcgctgctctgtgtgcagaggctcttccttggcgatttagatccagagaactcctggccatttttaaaaatggctgttaagaaaaccttgaaaattcttgtccattatatcctattgttatttgatttctgagaccgatgtataataaataattagagccataccatgctcgatgtaataaagtgtccatgggcttgttgattcatttatgtaaattctgatctccaactttagcaatccttttttttctgtacacctgacttgtgtgaatatggacgtacatgtttgcaattgttccacaggtttttatgttagttcattctcctgaaa

SEQ ID NO: 22559 - DNA, 731 bp, Zea Mays
ctgaatcggattgaaccgactgtgtctgtttgaaggatctgttagatgctttgaatcaactagaggtgggactcaaagaaaacctcaagaagttgagttcctttgataagtacaaacagcaagttcttcttggtcatcttgactggtctccaatgcacaaagatccaagtttctggcgtgagaacattaacaattttgaagagaatgatttccagattctacgagttctcatgacaatcattgacacatcaagtgacaccaccgctcttgccgtggcctgctacgacctctcacagttcctccagtaccatccatctggccgaatcgtggtggcagacctcaaggccaaggaccgagtcatgaagctcatgaatcatgaaaacactgaagtgcagaaaaatgcgctgctctgtgtgcagaggctcttccttggcgatttagatccagagaactcctggccatttttaaaaatggctgttaagaaaaccttgaaaattcttgtccattatatcctattgttatttgatttctgagaccgatgtataataaataattagagccataccatgctcgatgtaataaagtgtccatgggcttgttgattcatttatgtaaattctgatctccaactttagcaatccttttttttctgtacacctgacttgtgtgaatatggacgtacatgtttgcaattgttccacaggtttttatgttagttcattctcctgaaa

SEQ ID NO: 22560 - DNA, 1139 bp, Zea Mays
gcctggcccattgcaatctcgagaagcaactccgtcgcgccgcactcaatcgcctccgattctgcggagactcagcatcggaatggcggcggcggctcgtgccgggttccggcggctcttctccgtctcggccttcgctgcaccgcctcctcctgccgcgcgccccgcggcgaacccttgcaacaacctcttcgtctcaggtatgaagtttgctgcaaagctataatcagagaaggcgatggtacaattgaagtcgtccttgttgcaagaaacgccatcctagaggatttgaaggcagctaaataccaaaattaaatgtgatgcatgctgccacttgtgactaatatatgttttgcagggttaaataaacgcacaacgtccgagggacttaaggaagcattttctaaatttggtcaggttattgaagcaagagtaatcactgataggatatctggatactccagaggatttggctttgtcaaatatgcgactgtacaagaagctggtgaggccataaaaggcatggatggaaagttccttgacagttgggttattttcgctgagacgccacacaaccatcacaacaaggagcaccagcttatgattgaagttgccatacacggtcgatgacatacactgtatttttctgccgagtgtaatagtggatgttgattgccggccaaacatttgcagagagaatgtagcttgatgtgctccttgaacttcctttgttgtggttaacattggacttactgcaacctcatgcgcgtggcccataactttcgtctttcatttacaggtcactacattttttttgaccactgtgttggaaggaggttacactgcagcagaaatgcaatgtgttggaaggaggcccacctcctccttcggccaaaaacagtataaaataaatatgtcgaattatacaagaaaaaaaattgacccctcaaataaaattctaaataaaatcttatgtacgccactcagtcgtaccaggccgggaacccgagtcttggtccgccgcttcggccagcaccattggtctctatctatcgtcagtcgtcaccatcgtcgcgacctcgcctgcctgcgctccaccatagatgccgcatggaccagcgtcctatccagccattgca

SEQ ID NO: 22561 - DNA, 3132 bp, Zea Mays
gcctggcccattgcaatctcgagaagcaactccgtcgcgccgcactcaatcgcctccgattctgcggagactcagcatcggaatggcggcggcggctcgtgccgggttccggcggctcttctccgtctcggccttcgctgcaccgcctcctcctgccgcgcgccccgcggcgaacccttgcaacaacctcttcgtctcagagtatcaggtatgaagtttgctgcaaagctataatcagagaaggcgatggtacaattgaagtcgtccttgttgcaagaaacgccatcctagaggatttgaaggcagctaaataccaaaattaaatgtgatgcatgctgccacttgtgactaatatatgttttgcaggtacgtcataataggaaaatgtattcatcagctgcaccacaaatttcataccaatgattagagagaagtgggataatggtcatcatctgccacctactggtttcagacttccaacctaggctggttttagactttcctttccaacctatatccatagtagctattgaccggtcgatatcgatcactgttagtccgctccacgacacaatctttacactacaaccactttattgttatatcattttttacatacttttatgtgacataaaacatgaaattttattaaaatacaaatacataaaatcacagtttaccaacgggctctcgctgaatttcgtatttttaaaatttgaaaatatgtacatcaaatcttattgaaaaaaccaaaaatcgctggggaacaccgaaaatcacccagaaaatggtgaaaaccgctcgggatcttgtgaaaaccgctagagacaaccgaaattccattcgggatttggcaaaaattgacgaaaaccgtttggttttccgttcttgaatggtagcgagaaaagagaaaaaacgaaatgttgaactcggtctccaactcttgtacgacctagtgccccgacgacgcgggtggattgagcttcctcctcgtgacggcgcaagaaagaaggggctatcgggtctgttttgatctattaggatctaagagcaactccaatagttacttaaattttagctctctaaatcatagatttaagaagttgctaaatggcttttgaagtaaaaaatgtgagttctccaatagttctctaaatataggttgtaattttgttttgtatctatccacataaaaaataagtcacaaaaactatataatgcagtaaacatttttgtttagcgagttgttaaatggttgctaaatgtagagagaaaatgaggttagatgacaacttgttaaatttagaaagttcatttagagaactgttggagaatagtttttatattaactacctaaattattgatttaggaagtcttttatagaactactggagttgctctaatagaaacttgaacagagatcagacccttaaaggatatactttaaaagtttatggacaggttgaaacaagtagccaagtttgaggacgggaattgtaatttacccatccaaatttattgacgtatcgaaactccggcggccagatcttgagaagacaaataccgccagctctgtcatgcttatcactcgacatctcctcaccatactcttctatagaagaagcggtaaggaaggcctcaaaacatggaatttttgcatcgctgaatatgaacggaggcgagtaggcgtcaggcatgcgaggtagccgcatgcgctgcctcgacaaggggtcgcacacggctagctccggcaacaagcccaatgccctgaatgtaaaccccagaggtgcgcacttgaggagggcacgatcgtcacggaggtcacaaatctcccaaccaaggccagatgcagtgcgacactatgcaagaggaacccctcgctgtggttcttatgctgcgtgcttcattaattgcacatgttatgctgagcgctttattagttgcaagcggtggatgtttgcgataggattaggtatgggagaagctgtttgcttttgtctgagatctgcgagccagtagttacttcaaattttggtagacctgatgaactaaaactgatactaatcgatttgctctgtctgaacccactctgaacgagagaagtaccacacaagttcacaagtatttggtaaacttggaagtaggacacatctcaaatgccagcgattactgctggtttgagtaattcactttcctatgtagaaggtggtgctaaaaaattgttgcaggattcggtgcatttgtagctccctacaattttccttctctggcaatagttcatctggttatctgtgtcaaatagtcagtctcttcatcgaaggagaaaggcagagatttggaaaaattcaagggttaaataaacgcacaacgtccgagggacttaaggaagcattttctaaatttggtcaggttattgaagcaagagtaatcactgataggatatctggatactccagaggatttggctttgtcaaatatgcgactgtacaagaagctggtgaggccataaaaggcatggatggaaagttccttgacagttgggttattttcgctgagacgccacacaaccatcacaacaaggagcaccagcttatgattgaagttgccatacacggtcgatgacatacactgtatttttctgccgagtgtaatagtggatgttgattgccggccaaacatttgcagagagaatgtagcttgatgtgctccttgaacttcctttgttgtggttaacattggacttactgcaacctcatgcgcgtggcccataactttcgtctttcatttacaggtcactacattttttttgaccactgtgttggaaggaggttacactgcagcagaaatgcaatgtgttggaaggaggcccacctcctccttcggccaaaaacagtataaaataaatatgtcgaattatacaagaaaaaaaattgacccctcaaataaaattctaaataaaatcttatgtacgccactcagtcgtaccaggccgggaacccgagtcttggtccgccgcttcggccagcaccattggtctctatctatcgtcagtcgtcaccatcgtcgcgacctcgcctgcctgcgctccaccatagatgccgcatggaccagcgtcctatccagccattgca

SEQ ID NO: 22562 - DNA, 2966 bp, Zea Mays
gcctggcccattgcaatctcgagaagcaactccgtcgcgccgcactcaatcgcctccgattctgcggagactcagcatcggaatggcggcggcggctcgtgccgggttccggcggctcttctccgtctcggccttcgctgcaccgcctcctcctgccgcgcgccccgcggcgaacccttgcaacaacctcttcgtctcaggtacgtcataataggaaaatgtattcatcagctgcaccacaaatttcataccaatgattagagagaagtgggataatggtcatcatctgccacctactggtttcagacttccaacctaggctggttttagactttcctttccaacctatatccatagtagctattgaccggtcgatatcgatcactgttagtccgctccacgacacaatctttacactacaaccactttattgttatatcattttttacatacttttatgtgacataaaacatgaaattttattaaaatacaaatacataaaatcacagtttaccaacgggctctcgctgaatttcgtatttttaaaatttgaaaatatgtacatcaaatcttattgaaaaaaccaaaaatcgctggggaacaccgaaaatcacccagaaaatggtgaaaaccgctcgggatcttgtgaaaaccgctagagacaaccgaaattccattcgggatttggcaaaaattgacgaaaaccgtttggttttccgttcttgaatggtagcgagaaaagagaaaaaacgaaatgttgaactcggtctccaactcttgtacgacctagtgccccgacgacgcgggtggattgagcttcctcctcgtgacggcgcaagaaagaaggggctatcgggtctgttttgatctattaggatctaagagcaactccaatagttacttaaattttagctctctaaatcatagatttaagaagttgctaaatggcttttgaagtaaaaaatgtgagttctccaatagttctctaaatataggttgtaattttgttttgtatctatccacataaaaaataagtcacaaaaactatataatgcagtaaacatttttgtttagcgagttgttaaatggttgctaaatgtagagagaaaatgaggttagatgacaacttgttaaatttagaaagttcatttagagaactgttggagaatagtttttatattaactacctaaattattgatttaggaagtcttttatagaactactggagttgctctaatagaaacttgaacagagatcagacccttaaaggatatactttaaaagtttatggacaggttgaaacaagtagccaagtttgaggacgggaattgtaatttacccatccaaatttattgacgtatcgaaactccggcggccagatcttgagaagacaaataccgccagctctgtcatgcttatcactcgacatctcctcaccatactcttctatagaagaagcggtaaggaaggcctcaaaacatggaatttttgcatcgctgaatatgaacggaggcgagtaggcgtcaggcatgcgaggtagccgcatgcgctgcctcgacaaggggtcgcacacggctagctccggcaacaagcccaatgccctgaatgtaaaccccagaggtgcgcacttgaggagggcacgatcgtcacggaggtcacaaatctcccaaccaaggccagatgcagtgcgacactatgcaagaggaacccctcgctgtggttcttatgctgcgtgcttcattaattgcacatgttatgctgagcgctttattagttgcaagcggtggatgtttgcgataggattaggtatgggagaagctgtttgcttttgtctgagatctgcgagccagtagttacttcaaattttggtagacctgatgaactaaaactgatactaatcgatttgctctgtctgaacccactctgaacgagagaagtaccacacaagttcacaagtatttggtaaacttggaagtaggacacatctcaaatgccagcgattactgctggtttgagtaattcactttcctatgtagaaggtggtgctaaaaaattgttgcaggattcggtgcatttgtagctccctacaattttccttctctggcaatagttcatctggttatctgtgtcaaatagtcagtctcttcatcgaaggagaaaggcagagatttggaaaaattcaagggttaaataaacgcacaacgtccgagggacttaaggaagcattttctaaatttggtcaggttattgaagcaagagtaatcactgataggatatctggatactccagaggatttggctttgtcaaatatgcgactgtacaagaagctggtgaggccataaaaggcatggatggaaagttccttgacagttgggttattttcgctgagacgccacacaaccatcacaacaaggagcaccagcttatgattgaagttgccatacacggtcgatgacatacactgtatttttctgccgagtgtaatagtggatgttgattgccggccaaacatttgcagagagaatgtagcttgatgtgctccttgaacttcctttgttgtggttaacattggacttactgcaacctcatgcgcgtggcccataactttcgtctttcatttacaggtcactacattttttttgaccactgtgttggaaggaggttacactgcagcagaaatgcaatgtgttggaaggaggcccacctcctccttcggccaaaaacagtataaaataaatatgtcgaattatacaagaaaaaaaattgacccctcaaataaaattctaaataaaatcttatgtacgccactcagtcgtaccaggccgggaacccgagtcttggtccgccgcttcggccagcaccattggtctctatctatcgtcagtcgtcaccatcgtcgcgacctcgcctgcctgcgctccaccatagatgccgcatggaccagcgtcctatccagccattgca

SEQ ID NO: 22563 - DNA, 2036 bp, Zea Mays
gcctggcccattgcaatctcgagaagcaactccgtcgcgccgcactcaatcgcctccgattctgcggagactcagcatcggaatggcggcggcggctcgtgccgggttccggcggctcttctccgtctcggccttcgctgcaccgcctcctcctgccgcgcgccccgcggcgaacccttgcaacaacctcttcgtctcaggcaactaacctcgcctccatttcccccctttttgcatgttttgcaagagaaaaccctcgccttgattcttatgctgcgcgctttattagttgcttgttgtgctagcatgcggtggatgtttgcggtaggattaggaatgggggaagttgtttacttttgtctgagatctgttagccagtagttacttccaactttgatatacctgatgaactaaactgatactagtcgtagtcgaatagtgttatcttgcgaactgaatcgatttgctctatctgaacccactctgaacgagagaagtactgcacaggcgcatacaaacttattgtcgaatgtcgatgtcaactacttgaccttttataagcacacgtatatgttaaacttgaaactgagtctttttgtatttagacctagagaactcctggtcatttttcaaaatggctgttaagaaaaccttgaatttttttgtccattatatcctattgttatttgatttctgaaactggtgtataataaataatcagagccataccatgctcgatgtaatgaagtgttcatgggcttgttgattcatttatgcaaattttgttattccattaatattctactacttgacaacattgcctgacttgtgtgaatatggacgttacatgtttgcaattgttcctcaggtttttatgttaattcattctcttctggaacatcgtgcgcctgaaatattttgatttttccttgttgtgctacaccatccacatctttcgatttaacctgtattgtttttcatcataacgctcgatgttatttgctttttataaataacatatgagctttcacatatttcaaaaaacatatattccattgtcttcttgtcttgaaatatgagtgatggaagagtatcaggtatgaagtttgctgcaaagctataatcagagaaggcgatggtacaattgaagtcgtccttgttgcaagaaacgccatcctagaggatttgaaggcagctaaataccaaaattaaatgtgatgcatgctgccacttgtgactaatatatgttttgcagggttaaataaacgcacaacgtccgagggacttaaggaagcattttctaaatttggtcaggttattgaagcaagagtaatcactgataggatatctggatactccagaggatttggctttgtcaaatatgcgactgtacaagaagctggtgaggccataaaaggcatggatggaaagttccttgacagttgggttattttcgctgagacgccacacaaccatcacaacaaggagcaccagcttatgattgaagttgccatacacggtcgatgacatacactgtatttttctgccgagtgtaatagtggatgttgattgccggccaaacatttgcagagagaatgtagcttgatgtgctccttgaacttcctttgttgtggttaacattggacttactgcaacctcatgcgcgtggcccataactttcgtctttcatttacaggtcactacattttttttgaccactgtgttggaaggaggttacactgcagcagaaatgcaatgtgttggaaggaggcccacctcctccttcggccaaaaacagtataaaataaatatgtcgaattatacaagaaaaaaaattgacccctcaaataaaattctaaataaaatcttatgtacgccactcagtcgtaccaggccgggaacccgagtcttggtccgccgcttcggccagcaccattggtctctatctatcgtcagtcgtcaccatcgtcgcgacctcgcctgcctgcgctccaccatagatgccgcatggaccagcgtcctatccagccattgca

SEQ ID NO: 22564 - DNA, 4021 bp, Zea Mays
gcctggcccattgcaatctcgagaagcaactccgtcgcgccgcactcaatcgcctccgattctgcggagactcagcatcggaatggcggcggcggctcgtgccgggttccggcggctcttctccgtctcggccttcgctgcaccgcctcctcctgccgcgcgccccgcggcgaacccttgcaacaacctcttcgtctcaggcaactaacctcgcctccatttcccccctttttgcatgttttgcaagagaaaaccctcgccttgattcttatgctgcgcgctttattagttgcttgttgtgctagcatgcggtggatgtttgcggtaggattaggaatgggggaagttgtttacttttgtctgagatctgttagccagtagttacttccaactttgatatacctgatgaactaaactgatactagtcgtagtcgaatagtgttatcttgcgaactgaatcgatttgctctatctgaacccactctgaacgagagaagtactgcacaggcgcatacaaacttattgtcgaatgtcgatgtcaactacttgaccttttataagcacacgtatatgttaaacttgaaactgagtctttttgtatttagacctagagaactcctggtcatttttcaaaatggctgttaagaaaaccttgaatttttttgtccattatatcctattgttatttgatttctgaaactggtgtataataaataatcagagccataccatgctcgatgtaatgaagtgttcatgggcttgttgattcatttatgcaaattttgttattccattaatattctactacttgacaacattgcctgacttgtgtgaatatggacgttacatgtttgcaattgttcctcaggtttttatgttaattcattctcttctggaacatcgtgcgcctgaaatattttgatttttccttgttgtgctacaccatccacatctttcgatttaacctgtattgtttttcatcataacgctcgatgttatttgctttttataaataacatatgagctttcacatatttcaaaaaacatatattccattgtcttcttgtcttgaaatatgagtgatggaagagtatcaggtatgaagtttgctgcaaagctataatcagagaaggcgatggtacaattgaagtcgtccttgttgcaagaaacgccatcctagaggatttgaaggcagctaaataccaaaattaaatgtgatgcatgctgccacttgtgactaatatatgttttgcaggtacgtcataataggaaaatgtattcatcagctgcaccacaaatttcataccaatgattagagagaagtgggataatggtcatcatctgccacctactggtttcagacttccaacctaggctggttttagactttcctttccaacctatatccatagtagctattgaccggtcgatatcgatcactgttagtccgctccacgacacaatctttacactacaaccactttattgttatatcattttttacatacttttatgtgacataaaacatgaaattttattaaaatacaaatacataaaatcacagtttaccaacgggctctcgctgaatttcgtatttttaaaatttgaaaatatgtacatcaaatcttattgaaaaaaccaaaaatcgctggggaacaccgaaaatcacccagaaaatggtgaaaaccgctcgggatcttgtgaaaaccgctagagacaaccgaaattccattcgggatttggcaaaaattgacgaaaaccgtttggttttccgttcttgaatggtagcgagaaaagagaaaaaacgaaatgttgaactcggtctccaactcttgtacgacctagtgccccgacgacgcgggtggattgagcttcctcctcgtgacggcgcaagaaagaaggggctatcgggtctgttttgatctattaggatctaagagcaactccaatagttacttaaattttagctctctaaatcatagatttaagaagttgctaaatggcttttgaagtaaaaaatgtgagttctccaatagttctctaaatataggttgtaattttgttttgtatctatccacataaaaaataagtcacaaaaactatataatgcagtaaacatttttgtttagcgagttgttaaatggttgctaaatgtagagagaaaatgaggttagatgacaacttgttaaatttagaaagttcatttagagaactgttggagaatagtttttatattaactacctaaattattgatttaggaagtcttttatagaactactggagttgctctaatagaaacttgaacagagatcagacccttaaaggatatactttaaaagtttatggacaggttgaaacaagtagccaagtttgaggacgggaattgtaatttacccatccaaatttattgacgtatcgaaactccggcggccagatcttgagaagacaaataccgccagctctgtcatgcttatcactcgacatctcctcaccatactcttctatagaagaagcggtaaggaaggcctcaaaacatggaatttttgcatcgctgaatatgaacggaggcgagtaggcgtcaggcatgcgaggtagccgcatgcgctgcctcgacaaggggtcgcacacggctagctccggcaacaagcccaatgccctgaatgtaaaccccagaggtgcgcacttgaggagggcacgatcgtcacggaggtcacaaatctcccaaccaaggccagatgcagtgcgacactatgcaagaggaacccctcgctgtggttcttatgctgcgtgcttcattaattgcacatgttatgctgagcgctttattagttgcaagcggtggatgtttgcgataggattaggtatgggagaagctgtttgcttttgtctgagatctgcgagccagtagttacttcaaattttggtagacctgatgaactaaaactgatactaatcgatttgctctgtctgaacccactctgaacgagagaagtaccacacaagttcacaagtatttggtaaacttggaagtaggacacatctcaaatgccagcgattactgctggtttgagtaattcactttcctatgtagaaggtggtgctaaaaaattgttgcaggattcggtgcatttgtagctccctacaattttccttctctggcaatagttcatctggttatctgtgtcaaatagtcagtctcttcatcgaaggagaaaggcagagatttggaaaaattcaagggttaaataaacgcacaacgtccgagggacttaaggaagcattttctaaatttggtcaggttattgaagcaagagtaatcactgataggatatctggatactccagaggatttggctttgtcaaatatgcgactgtacaagaagctggtgaggccataaaaggcatggatggaaagttccttgacagttgggttattttcgctgagacgccacacaaccatcacaacaaggagcaccagcttatgattgaagttgccatacacggtcgatgacatacactgtatttttctgccgagtgtaatagtggatgttgattgccggccaaacatttgcagagagaatgtagcttgatgtgctccttgaacttcctttgttgtggttaacattggacttactgcaacctcatgcgcgtggcccataactttcgtctttcatttacaggtcactacattttttttgaccactgtgttggaaggaggttacactgcagcagaaatgcaatgtgttggaaggaggcccacctcctccttcggccaaaaacagtataaaataaatatgtcgaattatacaagaaaaaaaattgacccctcaaataaaattctaaataaaatcttatgtacgccactcagtcgtaccaggccgggaacccgagtcttggtccgccgcttcggccagcaccattggtctctatctatcgtcagtcgtcaccatcgtcgcgacctcgcctgcctgcgctccaccatagatgccgcatggaccagcgtcctatccagccattgca

SEQ ID NO: 22565 - DNA, 1725 bp, Zea Mays
aaatcagcctgttcggtcaccaaatcacttagaaaatcacgttgcgagtcgcccggtcgcccgtcgtggtggttaactggtctgggactctgggagtcatctccacgctccgggttcgcgcccgactcccctacaaattcgctccaccggcggctccggctgcaaaccgcgactgactgctgaccccgagcggcaccagcgcgcccgccccgccatggctatccccaacgcctttgactcccccctcgcggccaggtccgccgtcggcgcggcgctggcggccgtcatcgccgtccgcgcggtccgccgccgctccctagacgcctcgggcggggtcgccggcttcgtcgtcatggcggtccacatctcatgcggctacaggtacggggcgctgctgctggccttcttcttctcatcgtccaaggtaaccaagatcggggaggaccacaagcgccgcatcgaggagaacttcaaggagggcgggcagcgcaactggatccaagttctagcaaatagcacaattgccactgtactggttgtgatatttgcactaatgactggagggcaagatcagtgcatggactcaaatggttcaaagcttataactggcatcataggtggtatcattggccactactgttgctgcaatggagatacttggtcatctgaaatcggtgtgcttagtaatgaacaaccaaggcttattacatcccttaaggaggaggccttatcattggtctcactttcgttgttgttggactgttgactgctgaatgttcttccgatatggccatcaggcagctcctagtactacccatctctgctgcagctggtttgcttgggagtctaattgattcattgctgggagctacacttgaattcagtgggtattgcagtgttcggaagaaggtaatctgttctgtgccaccttggtaatatgctattagagaaaagaacaatctctggaactttttcattgaagattgcatcaagagggcactagtgtattgtgatagtactcatcggtcttaagttatggctctgatgtttagtcagtgataacggcaaagagcacaaaatcatttcttcgttttatcaccatgttcaaagtagaatatcaatagggcttcttatatacgtctattaacagttatgatatttgtacaagaacataacgagtacatttggatgtttcaagtataaacaatcatttagaatgatgccagaatttgctccttgtgctagctggggtctcttgcagtaaaatatattaacaagcttgactttgtttgaaagttaatgacttttaacaaagtattatcttgcaacttccatatgataatattttattgttgctctgtaggtggtcagcaaaaggggccctacggttacaaagatttctgggatgactatcctggacaacgatgctgttaatgcagtatctattctgctaacaactgtacttacagcttatgtatgcatttgcatcttttaaaaaactagttgggtaaatcttgagttgaaccctatttttcattgagcaatgtattgtgaccttagcctgcacggttcctggaaatggaacagcctgcaacttctctgtgtattggtacaatttgtattatggcacagaaaggccgattcatctccagcttgatactaatggttcactggaaactttttatattcccattgcaaaatgttacgatattggaatcacccttc

SEQ ID NO: 22566 - DNA, 302 bp, Zea Mays
tacctagttgacattgctaacaaggatctaatgaattatgagtttaatagattatctttagcagaaagacgtatattctttgctcattatcaaacaatcacttattcccaaacctcgtgtggggctaatcgttttcatttaccatctcatggaaaacctttttccttccacttagccctatcgggtattttagtgataggttctataggaactggacaatcctatttggtcaaatacctaacaaaaattcatattttcctttcattaaggtaccaaggcttcttattccacaagaacgaaag

SEQ ID NO: 22567 - DNA, 5958 bp, Zea Mays
cttcaatttcctactactagagagagacggcctcccttcctctcgcttcgcttacacttctcccctccccccaacccaaacccaacacaattcccccgtgttgcctacacgcactggccacgaccaaaccctaggcgccgccgcctccggggccctcagggctgtcatacggggaaggaggaggatatcggtgaggagagaaggggatttatgtcccagcgaggtgacaggggcgaggggcacgccaggagacccggccggtccagcagcttcggcggccaccgcggaggcggagtcggcggcgcgggcaagggcggcgcgggatcctcaggccagcctcctctttctaccaaccgcagctttaggaagcccggcaatggccacggcgggcagcagagggtggtgaaccagcccgacacaaccggtttccaacctgcccccgcgcctgccccccaccaaactcctgcgcgaccgccacctgcacctcagaatgcggctgtgcatgttcccatatccgcaccatggccgcaacctcaaggtccacaagtgtcatcttcatcagctgccagcgacaggccggctaatccgccattacctaaagctactcatgctgctccaagggctccaccaaaaagctctaacccaccccttcctcagggaggatcgaaaggggaaccaccaaaggggtttaactttcagtttggtagtataaatatgaatgggctgccgcaatttcctgccaggacaagctcagctcctccaaacttggatgaacaaaaacgtaatcaggtgcttgtggaggaacttaaggttacacctacccctgtgcaaccaactccaaaacagcagctgttgcagcagcatccgcatccgctgcagaagcaacagcatcagctgccgcagctgtcgcatcagccacagcagccacagcagcagtcaacaagaaaggaaactgttggttccagccaacctaactccatcaatccccatactacatcacaactgaaaagagatgtgcacccatctccgtcggtccccaatgttacatctgttagacctaccgttcaacaaatgcctggtgttcagatgccgatccccttccaccaccagccggcacaagtttccttgcagtttggtggccatggtgcacagctgcagccacaagttgtgcccagctcatttcaaatgtcaatgggattgacaggcagtagtacaccgcaagtcccacagcagctgtatgccccgactctgcagcatcatcaattgcaacagcaagcaatgatgcatcctggccagggtatgggttatgttccttcagttgctcaccaattcccacagttgggcagcattcctatgaacattgcatcgcaatatcctcagcaacagccaaacaaacctgctgctgcacgtaaggctattgtaaaaattactcatccagacacacatgaagagttgaagcttgataagaggatggactcttctgggcagagagctgcaccgagtattgcacaacaatctcagcctggtgttaattatgctcctcatttgggcttctttcatcagccaccgaattcctacaaccagtcaggaatgtattactctactacagctagtgtgaaccaggttgctactggatcatcgggtcctagatataattatcctgtcactcagtctgcgcaagcgatgacatatatcagtccatctgcagcgcctccggtatctggtcagtcacaatatacagttaagccgcaccctatggggttgctgtctgaaaaatcaggtactcatgtcacaataagtgctccaccagcaaaatctgatccacctaagttacatgctgctggggatgctgcgtcaagtctgaaaaaggataatgaagttgtttctgggatcactgttttaaataaaccaacccttgagagggagagtaacgatcctttagtcacagtgaagcattccactgtgataagcccgtccttgccaattcatggtgaaaaaccacaaactttggtgacatcgtcgcctgttgctaattcagtctcacctgtgactggagctgatgggaaaagcaaagaacccattcaaaggtctggatcatttaaagatagtaagaaaaatgtcactaaaaaggatgtcaggaattcatatgaaccaccaaatccaacttcatttgttgaggataaggttcaaactgtaaaggttggagatggcgatctccaggaaactaaaaagctgaacaatgagttggatttgaccaactcatcttcagctccaacggttccactggcagttagtacagagaatgccgacagcacagcagtaaccactgctgatgttcctgggacagatacaagctcaagaagaccatcttctgagggtactggtgagcctggagtggaaagcttcactgtttccgctgttgaatgtgacgaaagcaagaggactcacaaagttgtgaaagatcctagcaaggataatatttcttctgatgctaccaaacatgaattgcctaaggaatgtgcagtggactctactgaacaagcatcagcagtgacttctaacactgatgattcatatgcagcacctctagtaactaatcaggagcagttgctgaaagggtctgcttctgagaaacaagctgtgatgaataactcatccatgaattccgatacttcagcacatttttttgatggcaatgatgtgggcgtgacaacttctggaacttcagagcctactgctcaaacttccaatgatgaaggtgactcagatattagtccagaaacagacctagctgtttataatgtccctctaggttcatctgagctacaactgaaatctgagagtagggcaaatgatcaacagcctgctgcaccaacagtatcagttcgaccggtatccagggaaaagcctagtacaaagtccacagctgggaagaagaagaagaaaaaggaaatgcttgctaaggctgatgctgctgggtcttcagatctttataatgcatacaaaggaccagaagagaagtctgaagttgttggtaccgtggagggtgctgataattcttcaacagttgatacaactcatgtactgtctgacgaattagaaaaggatcctagtacatctgcagatgattgtaagaaaaaagttgagcttgatgattgggaagatgctgcagacatgtctactccaaagcagccatcagattctgggaaccaggctagcatcacccaagtgttggattcagacgtaactgaagcaaacagcaggaagaaatactcacgggattttctgttaactttgcaacatcactataccggtcttccttttggatttcagatgaatgaagctgtcaatgctataatgaataatttggcaggaaagtcttatgttgctgaccgggaacctcaccctagtcctggaaggggtttggaccgcccaacttctcgtgaccgccgtggtgctgccatggctgacgacaggtggactagggcgggtgttcctctcagtcctggtcgtgatgttcacatggacctgccaaatggaccatcagttatcaactaccgtggcggcccaggaggtaatcatggtgttttaaggaatccacgcagtcaatcatcaaatcagtatggcggtgggcttcttgcaggacccatgcagtccgttggaccgcaggtacctcgcagcggctctgatgctgatagatggcagcaaaagggtctcatgccttctcctggcacacctgtacaagcaatgcacaaagcagagaggaagtatgttattgggaaagtttctgatgaggaagaggcgaaacagaggcagttgaaagctattcttaacaagctgactccacagaacttcgaaaaactttttgaacaagttaaggaagtcaacattgacagtgtagcaacacttactggggtcatttcacagatatttgacaaagctttgatggaaccaactttctgtgaaatgtatgctaatttttgcttccatctggctggtgccttgcctgacttcagtgaagacaatgaaaaaatcacattcaaaagattacttttgaataaatgccaagaggagtttgagaggggtgaaagagaagaagctgaagctgataaaacagaagaggaaggcgagattaaacagaccaaagaagaaagggaggaaaagaggatccgtgctcgaaggcgcatgctgggaaacattaggttaattggagagttgtacaaaaagaggatgttgacggaaaggattatgcatgaatgcattaaaaaattgtttggaaatcatgatgatcctgatgaggagaacattgaagcattatgcaaattgatgagtacaattggtgatatgattgatcatgtaaaggcaaaggagcacatggatgcctattttagtatgatgcagataatgtcaacaaatcagaagttgtcttctcgtgtaaggtttatgttgagagattcaatcgacctcaggagaaataaatggcagcaaaggcgtaaagtcgaaggtcccaagaagattgaggaggttcacagagatgcagcacaagaaagacatgcccagtcgagtaggttgggacgtggtccagctgttagttctgttccaagaagagcacatcctatggattatggccctcgtggaccatctgcatcagcatcctcaagttcccaacaagggagcattcgaggaatgcctccacattcgcgtggttcacaagacatccgacatgacgaaaggcaccagtttgacaatagaactgttcttccgcagcgggtagtcaaagatgaagccatcactcttgggccacaaggtggccttgctaggggtatgtctataagagggcagccaccagtatcaaatactgaaattccttctgttattgaccaccggaggatagtatctagttctaatggctataactctgcggctgattggacatcatcatctggaagagaagattctaattcaagacttccagatcgaacctctggccgaattcctgcttctagtcaatctgctgtaacttcgcagaggcctgccagccaggaaggccgttcaagaagtaaatcatattctgaggatgagttgagagaaaaatctgttttgaccattcgagaatattacagtgcaaaagatgaaaaggaggttgttttgtgtattgaggagctgaatgctccaaatttctatccatttcttgtgtcactttgggtaaatgattcctttgagagaaaagacatggaaagagagttgttggctaaacttctcgtcagcctttgcagtggtcgacataatttgttgagcaagcaacaactcagtgatggcctttcaaatgttcttgcctcattagaagataatctaagtgatgctccaagagccaccgagtaccttggacgacttcttgcaaggtttgtggaggaaagcatattgctcttgcaagaggtaggtaaattgattcaagaaagtggagaagaaccagggtacctaatacaaggcggtattgcggctgacatcctaggtgcagtcctggattccataaaatcagacaaagggaattcattcttggatgagatcaagacaacttcaagtttaaagttggttgatttcagaccacaacatcttaagcgatcaaagttggacgccttcatgtaggcacataagttattgttacctgattaccaatgggtgcggtcaccaagcagtttagtttcttcgcacctaaatacccaacggcctttttgatgtactgtaaaacctctctgctcctacttgctgtccctgaccgtacactatttataagatggaaggcgatcggccacctatgtagcacggacggatacaccaattaggtgcggacgtgcggtatcctgtatcggatacctaacagatagggataccccatgatacgtgcgaatacatcgagtatctgagtaaaaataaatatttacaaattcgatatttaga

SEQ ID NO: 22568 - DNA, 5802 bp, Zea Mays
cttcaatttcctactactagagagagacggcctcccttcctctcgcttcgcttacacttctcccctccccccaacccaaacccaacacaattcccccgtgttgcctacacgcactggccacgaccaaaccctaggcgccgccgcctccggggccctcagggctgtcatacggggaaggaggaggatatcggtgaggagagaaggggatttatgtcccagcgaggtgacaggggcgaggggcacgccaggagacccggccggtccagcagcttcggcggccaccgcggaggcggagtcggcggcgcgggcaagggcggcgcgggatcctcaggccagcctcctctttctaccaaccgcagctttaggaagcccggcaatggccacggcgggcagcagagggtggtgaaccagcccgacacaaccggtttccaacctgcccccgcgcctgccccccaccaaactcctgcgcgaccgccacctgcacctcagaatgcggctgtgcatgttcccatatccgcaccatggccgcaacctcaaggtccacaagtgtcatcttcatcagctgccagcgacaggccggctaatccgccattacctaaagctactcatgctgctccaagggctccaccaaaaagctctaacccaccccttcctcagggaggatcgaaaggggaaccaccaaaggggtttaactttcagtttggtagtataaatatgaatgggctgccgcaatttcctgccaggacaagctcagctcctccaaacttggatgaacaaaaacgtaatcaggtgcttgtggaggaacttaaggttacacctacccctgtgcaaccaactccaaaacagcagctgttgcagcagcatccgcatccgctgcagaagcaacagcatcagctgccgcagctgtcgcatcagccacagcagccacagcagcagtcaacaagaaaggaaactgttggttccagccaacctaactccatcaatccccatactacatcacaactgaaaagagatgtgcacccatctccgtcggtccccaatgttacatctgttagacctaccgttcaacaaatgcctggtgttcagatgccgatccccttccaccaccagccggcacaagtttccttgcagtttggtggccatggtgcacagctgcagccacaagttgtgcccagctcatttcaaatgtcaatgggattgacaggcagtagtacaccgcaagtcccacagcagctgtatgccccgactctgcagcatcatcaattgcaacagcaagcaatgatgcatcctggccagggtatgggttatgttccttcagttgctcaccaattcccacagttgggcagcattcctatgaacattgcatcgcaatatcctcagcaacagccaaacaaacctgctgctgcacgtaaggctattgtaaaaattactcatccagacacacatgaagagttgaagcttgataagaggatggactcttctgggcagagagctgcaccgagtattgcacaacaatctcagcctggtgttaattatgctcctcatttgggcttctttcatcagccaccgaattcctacaaccagtcaggaatgtattactctactacagctagtgtgaaccaggttgctactggatcatcgggtcctagatataattatcctgtcactcagtctgcgcaagcgatgacatatatcagtccatctgcagcgcctccggtatctggtcagtcacaatatacagttaagccgcaccctatggggttgctgtctgaaaaatcaggtactcatgtcacaataagtgctccaccagcaaaatctgatccacctaagttacatgctgctggggatgctgcgtcaagtctgaaaaaggataatgaagttgtttctgggatcactgttttaaataaaccaacccttgagagggagagtaacgatcctttagtcacagtgaagcattccactgtgataagcccgtccttgccaattcatggtgaaaaaccacaaactttggtgacatcgtcgcctgttgctaattcagtctcacctgtgactggagctgatgggaaaagcaaagaacccattcaaaggtctggatcatttaaagatagtaagaaaaatgtcactaaaaaggatgtcaggaattcatatgaaccaccaaatccaacttcatttgttgaggataaggttcaaactgtaaaggttggagatggcgatctccaggaaactaaaaagctgaacaatgagttggatttgaccaactcatcttcagctccaacggttccactggcagttagtacagagaatgccgacagcacagcagtaaccactgctgatgttcctgggacagatacaagctcaagaagaccatcttctgagggtactggtgagcctggagtggaaagcttcactgtttccgctgttgaatgtgacgaaagcaagaggactcacaaagttgtgaaagatcctagcaaggataatatttcttctgatgctaccaaacatgaattgcctaaggaatgtgcagtggactctactgaacaagcatcagcagtgacttctaacactgatgattcatatgcagcacctctagtaactaatcaggagcagttgctgaaagggtctgcttctgagaaacaagctgtgatgaataactcatccatgaattccgatacttcagcacatttttttgatggcaatgatgtgggcgtgacaacttctggaacttcagagcctactgctcaaacttccaatgatgaaggtgactcagatattagtccagaaacagacctagctgtttataatgtccctctaggttcatctgagctacaactgaaatctgagagtagggcaaatgatcaacagcctgctgcaccaacagtatcagttcgaccggtatccagggaaaagcctagtacaaagtccacagctgggaagaagaagaagaaaaaggaaatgcttgctaaggctgatgctgctgggtcttcagatctttataatgcatacaaaggaccagaagagaagtctgaagttgttggtaccgtggagggtgctgataattcttcaacagttgatacaactcatgtactgtctgacgaattagaaaaggatcctagtacatctgcagatgattgtaagaaaaaagttgagcttgatgattgggaagatgctgcagacatgtctactccaaagcagccatcagattctgggaaccaggctagcatcacccaagtgttggattcagacgtaactgaagcaaacagcaggaagaaatactcacgggattttctgttaactttgcaacatcactataccggtcttccttttggatttcagatgaatgaagctgtcaatgctataatgaataatttggcaggaaagtcttatgttgctgaccgggaacctcaccctagtcctggaaggggtttggaccgcccaacttctcgtgaccgccgtggtgctgccatggctgacgacaggtggactagggcgggtgttcctctcagtcctggtcgtgatgttcacatggacctgccaaatggaccatcagttatcaactaccgtggcggcccaggaggtaatcatggtgttttaaggaatccacgcagtcaatcatcaaatcagtatggcggtgggcttcttgcaggacccatgcagtccgttggaccgcaggtacctcgcagcggctctgatgctgatagatggcagcaaaagggtctcatgccttctcctggcacacctgtacaagcaatgcacaaagcagagaggaagtatgttattgggaaagtttctgatgaggaagaggcgaaacagaggcagttgaaagctattcttaacaagctgactccacagaacttcgaaaaactttttgaacaagttaaggaagtcaacattgacagtgtagcaacacttactggggtcatttcacagatatttgacaaagctttgatggaaccaactttctgtgaaatgtatgctaatttttgcttccatctggctggtgccttgcctgacttcagtgaagacaatgaaaaaatcacattcaaaagattacttttgaataaatgccaagaggagtttgagaggggtgaaagagaagaagctgaagctgataaaacagaagaggaaggcgagattaaacagaccaaagaagaaagggaggaaaagaggatccgtgctcgaaggcgcatgctgggaaacattaggttaattggagagttgtacaaaaagaggatgttgacggaaaggattatgcatgaatgcattaaaaaattgtttggaaatcatgatgatcctgatgaggagaacattgaagcattatgcaaattgatgagtacaattggtgatatgattgatcatgtaaaggcaaaggagcacatggatgcctattttagtatgatgcagataatgtcaacaaatcagaagttgtcttctcgtgtaaggtttatgttgagagattcaatcgacctcaggagaaataaatggcagcaaaggcgtaaagtcgaaggtcccaagaagattgaggaggttcacagagatgcagcacaagaaagacatgcccagtcgagtaggttgggacgtggtccagctgttagttctgttccaagaagagcacatcctatggattatggccctcgtggaccatctgcatcagcatcctcaagttcccaacaagggagcattcgaggaatgcctccacattcgcgtggttcacaagacatccgacatgacgaaaggcaccagtttgacaatagaactgttcttccgcagcgggtagtcaaagatgaagccatcactcttgggccacaaggtggccttgctaggggtatgtctataagagggcagccaccagtatcaaatactgaaattccttctgttattgaccaccggaggatagtatctagttctaatggctataactctgcggctgattggacatcatcatctggaagagaagattctaattcaagacttccagatcgaacctctggccgaattcctgcttctagtcaatctgctgtaacttcgcagaggcctgccagccaggaaggccgttcaagaagtaaatcatattctgaggatgagttgagagaaaaatctgttttgaccattcgagaatattacagtgcaaaagatgaaaaggaggttgttttgtgtattgaggagctgaatgctccaaatttctatccatttcttgtgtcactttgggtaaatgattcctttgagagaaaagacatggaaagagagttgttggctaaacttctcgtcagcctttgcagtggtcgacataatttgttgagcaagcaacaactcagtgatggcctttcaaatgttcttgcctcattagaagataatctaagtgatgctccaagagccaccgagtaccttggacgacttcttgcaaggtttgtggaggaaagcatattgctcttgcaagaggtaggtaaattgattcaagaaagtggagaagaaccagggtacctaatacaaggcggtattgcggctgacatcctaggtgcagtcctggattccataaaatcagacaaagggaattcattcttggatgagatcaagacaacttcaagtttaaagttggttgatttcagaccacaacatcttaagcgatcaaagttggacgccttcatgtaggcacataagttattgttacctgattaccaatgggtgcggtcaccaagcagtttagtttcttcgcacctaaatacccaacggcctttttgatgttgcaggaacctacacgagagcccgacgcgcatcctctcgctgggagggttgccacctttgtcg

SEQ ID NO: 22569 - DNA, 5578 bp, Zea Mays
cttcaatttcctactactagagagagacggcctcccttcctctcgcttcgcttacacttctcccctccccccaacccaaacccaacacaattcccccgtgttgcctacacgcactggccacgaccaaaccctaggcggagtcggcggcgcgggcaagggcggcgcgggatcctcaggccagcctcctctttctaccaaccgcagctttaggaagcccggcaatggccacggcgggcagcagagggtggtgaaccagcccgacacaaccggtttccaacctgcccccgcgcctgccccccaccaaactcctgcgcgaccgccacctgcacctcagaatgcggctgtgcatgttcccatatccgcaccatggccgcaacctcaaggtccacaagtgtcatcttcatcagctgccagcgacaggccggctaatccgccattacctaaagctactcatgctgctccaagggctccaccaaaaagctctaacccaccccttcctcagggaggatcgaaaggggaaccaccaaaggggtttaactttcagtttggtagtataaatatgaatgggctgccgcaatttcctgccaggacaagctcagctcctccaaacttggatgaacaaaaacgtaatcaggtgcttgtggaggaacttaaggttacacctacccctgtgcaaccaactccaaaacagcagctgttgcagcagcatccgcatccgctgcagaagcaacagcatcagctgccgcagctgtcgcatcagccacagcagccacagcagcagtcaacaagaaaggaaactgttggttccagccaacctaactccatcaatccccatactacatcacaactgaaaagagatgtgcacccatctccgtcggtccccaatgttacatctgttagacctaccgttcaacaaatgcctggtgttcagatgccgatccccttccaccaccagccggcacaagtttccttgcagtttggtggccatggtgcacagctgcagccacaagttgtgcccagctcatttcaaatgtcaatgggattgacaggcagtagtacaccgcaagtcccacagcagctgtatgccccgactctgcagcatcatcaattgcaacagcaagcaatgatgcatcctggccagggtatgggttatgttccttcagttgctcaccaattcccacagttgggcagcattcctatgaacattgcatcgcaatatcctcagcaacagccaaacaaacctgctgctgcacgtaaggctattgtaaaaattactcatccagacacacatgaagagttgaagcttgataagaggatggactcttctgggcagagagctgcaccgagtattgcacaacaatctcagcctggtgttaattatgctcctcatttgggcttctttcatcagccaccgaattcctacaaccagtcaggaatgtattactctactacagctagtgtgaaccaggttgctactggatcatcgggtcctagatataattatcctgtcactcagtctgcgcaagcgatgacatatatcagtccatctgcagcgcctccggtatctggtcagtcacaatatacagttaagccgcaccctatggggttgctgtctgaaaaatcaggtactcatgtcacaataagtgctccaccagcaaaatctgatccacctaagttacatgctgctggggatgctgcgtcaagtctgaaaaaggataatgaagttgtttctgggatcactgttttaaataaaccaacccttgagagggagagtaacgatcctttagtcacagtgaagcattccactgtgataagcccgtccttgccaattcatggtgaaaaaccacaaactttggtgacatcgtcgcctgttgctaattcagtctcacctgtgactggagctgatgggaaaagcaaagaacccattcaaaggtctggatcatttaaagatagtaagaaaaatgtcactaaaaaggatgtcaggaattcatatgaaccaccaaatccaacttcatttgttgaggataaggttcaaactgtaaaggttggagatggcgatctccaggaaactaaaaagctgaacaatgagttggatttgaccaactcatcttcagctccaacggttccactggcagttagtacagagaatgccgacagcacagcagtaaccactgctgatgttcctgggacagatacaagctcaagaagaccatcttctgagggtactggtgagcctggagtggaaagcttcactgtttccgctgttgaatgtgacgaaagcaagaggactcacaaagttgtgaaagatcctagcaaggataatatttcttctgatgctaccaaacatgaattgcctaaggaatgtgcagtggactctactgaacaagcatcagcagtgacttctaacactgatgattcatatgcagcacctctagtaactaatcaggagcagttgctgaaagggtctgcttctgagaaacaagctgtgatgaataactcatccatgaattccgatacttcagcacatttttttgatggcaatgatgtgggcgtgacaacttctggaacttcagagcctactgctcaaacttccaatgatgaaggtgactcagatattagtccagaaacagacctagctgtttataatgtccctctaggttcatctgagctacaactgaaatctgagagtagggcaaatgatcaacagcctgctgcaccaacagtatcagttcgaccggtatccagggaaaagcctagtacaaagtccacagctgggaagaagaagaagaaaaaggaaatgcttgctaaggctgatgctgctgggtcttcagatctttataatgcatacaaaggaccagaagagaagtctgaagttgttggtaccgtggagggtgctgataattcttcaacagttgatacaactcatgtactgtctgacgaattagaaaaggatcctagtacatctgcagatgattgtaagaaaaaagttgagcttgatgattgggaagatgctgcagacatgtctactccaaagcagccatcagattctgggaaccaggctagcatcacccaagtgttggattcagacgtaactgaagcaaacagcaggaagaaatactcacgggattttctgttaactttgcaacatcactataccggtcttccttttggatttcagatgaatgaagctgtcaatgctataatgaataatttggcaggaaagtcttatgttgctgaccgggaacctcaccctagtcctggaaggggtttggaccgcccaacttctcgtgaccgccgtggtgctgccatggctgacgacaggtggactagggcgggtgttcctctcagtcctggtcgtgatgttcacatggacctgccaaatggaccatcagttatcaactaccgtggcggcccaggaggtaatcatggtgttttaaggaatccacgcagtcaatcatcaaatcagtatggcggtgggcttcttgcaggacccatgcagtccgttggaccgcaggtacctcgcagcggctctgatgctgatagatggcagcaaaagggtctcatgccttctcctggcacacctgtacaagcaatgcacaaagcagagaggaagtatgttattgggaaagtttctgatgaggaagaggcgaaacagaggcagttgaaagctattcttaacaagctgactccacagaacttcgaaaaactttttgaacaagttaaggaagtcaacattgacagtgtagcaacacttactggggtcatttcacagatatttgacaaagctttgatggaaccaactttctgtgaaatgtatgctaatttttgcttccatctggctggtgccttgcctgacttcagtgaagacaatgaaaaaatcacattcaaaagattacttttgaataaatgccaagaggagtttgagaggggtgaaagagaagaagctgaagctgataaaacagaagaggaaggcgagattaaacagaccaaagaagaaagggaggaaaagaggatccgtgctcgaaggcgcatgctgggaaacattaggttaattggagagttgtacaaaaagaggatgttgacggaaaggattatgcatgaatgcattaaaaaattgtttggaaatcatgatgatcctgatgaggagaacattgaagcattatgcaaattgatgagtacaattggtgatatgattgatcatgtaaaggcaaaggagcacatggatgcctattttagtatgatgcagataatgtcaacaaatcagaagttgtcttctcgtgtaaggtttatgttgagagattcaatcgacctcaggagaaataaatggcagcaaaggcgtaaagtcgaaggtcccaagaagattgaggaggttcacagagatgcagcacaagaaagacatgcccagtcgagtaggttgggacgtggtccagctgttagttctgttccaagaagagcacatcctatggattatggccctcgtggaccatctgcatcagcatcctcaagttcccaacaagggagcattcgaggaatgcctccacattcgcgtggttcacaagacatccgacatgacgaaaggcaccagtttgacaatagaactgttcttccgcagcgggtagtcaaagatgaagccatcactcttgggccacaaggtggccttgctaggggtatgtctataagagggcagccaccagtatcaaatactgaaattccttctgttattgaccaccggaggatagtatctagttctaatggctataactctgcggctgattggacatcatcatctggaagagaagattctaattcaagacttccagatcgaacctctggccgaattcctgcttctagtcaatctgctgtaacttcgcagaggcctgccagccaggaaggccgttcaagaagtaaatcatattctgaggatgagttgagagaaaaatctgttttgaccattcgagaatattacagtgcaaaagatgaaaaggaggttgttttgtgtattgaggagctgaatgctccaaatttctatccatttcttgtgtcactttgggtaaatgattcctttgagagaaaagacatggaaagagagttgttggctaaacttctcgtcagcctttgcagtggtcgacataatttgttgagcaagcaacaactcagtgatggcctttcaaatgttcttgcctcattagaagataatctaagtgatgctccaagagccaccgagtaccttggacgacttcttgcaaggtttgtggaggaaagcatattgctcttgcaagaggtaggtaaattgattcaagaaagtggagaagaaccagggtacctaatacaaggcggtattgcggctgacatcctaggtgcagtcctggattccataaaatcagacaaagggaattcattcttggatgagatcaagacaacttcaagtttaaagttggttgatttcagaccacaacatcttaagcgatcaaagttggacgccttcatgtaggcacataagttattgttacctggttgcaggaacctacacgagagcccgacgcgcatcctctcgctgggagggttgccacctttgtcg

SEQ ID NO: 22570 - DNA, 1874 bp, Zea Mays
atggttccagacggcgaacaaacggggtggggaaaaggacccaccgctcctccctcagtatgcgcctgtcgtccattgctcctagacgcatcgcggcgtggatcggctttctctgtgctccgcctcgccagcctcgtaccccgtagccccgactccccatccgccacctccacctcatgggccaccgggtccaccctcgctttccagcttggcaacatctttgaccgtggtgtcgacgagctccgcctcctgcaccccctccgcctcctcgtcccttctgctgaggcccgcgtcggcgcattcctgccgtagtcggcaaccaataggagcgtaaaactggagctagggattgcagatgttgtaggtacatgttatacatgaatggacatgagcaggcactcccactgagggcgcttcttggcttcgtctgcagaggcttgctgataattggcataggatattgttaactccagtgactggtggagtagttgtggttcggcccttaacaagagaacgaagaccatgccgatgcgtggcgtcgatttcaagtggtatgacgggttcttcctctccatgctgttcagaataatgattctgtaccctgcagcataagctccggggcgcacatccgcagccacaatctctccctgcagcataagctcgtcaaggctatcaaggatgctgggaacatcaaggtctgtcacttttatgtgcccttgcagcttccactatacttactagctactaattcgtggtttagaaagattcctttttaatctattttgttaagtttgttaagggtttgtttggttagaaggggattgaagaaagcttcctttttaatccattttgttgattgagtcgcattcccgaatccatacttgaacatcaggatctcatatgcgaggtgtcatctcgggacactggaaagactatggttgatgcttcattaggagagataatgaccacatgtgagaagattacctagcaaaatgaagactggtacttaatgtaatggcctacataataaaatttagaatagatgtttttactcgggagatctggaggttggcgaacgcccggggagaaactattcaaggagaaactataatgtgtacacaacttgtgaagtatatgcaaatttgttcgggatatgcacctgaaatccagttatttttttctgttgtcataatagatatggtttaatttattcgtgtctagataatctatgcagaagacatgtttgtaaagttatttttgttttacatacataaggtttaggaaattgtttactgagcatgctaaaaaattcctgagcactcatctatgcaaggccctagatgagctgtgattttattttgttttctattgatatatgtcaatatagtttatgattagcccttaggcctgtactgaaccttggctctgataagaacggaacgacagtttcatggtccaaattctttggtgttgaacattgaaaaatctatttcgttcatggtccaaattctttggggttgaacattgaaaaatctatttttctcatgctgaatagtggcatgcttattacatttggctcacttgcttgttattatcaagctttcttttttattaggctattgattcaaaattgtagtttttaagttttctttgcttcaacaaacctgatttgtgttgtataggcaagcaattcttctagatttcaggttggaagaatgttcttattgtattcatttttagcagttagaaaagcacaggagaactgatcaagagctaaataagggggttctaaagcttgaattttgccttcaagattatcagtctcagatgcgaaaattaaagaggaaacgaatgaaatggtcgtttggtctgca

SEQ ID NO: 22571 - DNA, 883 bp, Zea Mays
gcactcgccgtcgccgttggcctgcaggaggggttcgccagctcgctatttgccaccgtcgccgtcttcgcctccgtggtaatgtcaaatttactgtattattatggcatgtgtaatgtcgtgaaggatattttgttgcaacactactttggaaagggagtacgtggaggctcggttgaacctgaatcagatattgtgcaggcttgcagaagctttctagatcaacgacagtgcattaatgtgtggcgatttatccaaactatcaacgagagaaaagacttgacagagaacctgaagcagctacagtgcaggacactaatttttgttggtgagaattcccagttccatgctgaagttgtgcacatgactgcaaagcttgataggcgatatagcgctcttgtggaggtacaagcttgtggctcggttgtgacagaggagcaaccacacacaatgctgataccaatggagtactttctcatgggatatggactgtacaggccaagccagataaactttagccctcgtagccctctgaatccgttttgtatatcaccagagctcctctctcctgagagcaagggggttaagctaaagccaaccaagacacgagccaaccttaaagcataggaacaggtgatgagaatgcataggaactgatgtgcatcccttgattttttttttgtgctgaagtgacatagctgttgtttccgtgatgtacataagacaagaggttagtcgggtcaaggttgggtgggtggtcgattccattgatttgtagcctttaaaacagttgtacattgtcacagatttatttgttgaagggagaagaaataataaggggagatgagatgttgccaaaagttagttcctctacgtttccatt

SEQ ID NO: 22572 - DNA, 927 bp, Zea Mays
gttggcctgcaggaggggttcgccagctcgctatttgccaccgtcgccgtcttcgcctccgtgttgcttctgaatgcattgaataagcaagttaggcatggtctgaatggttttataataaggtaatgtcaaatttactgtattattatggcatgtgtaatgtcgtgaaggatattttgttgcaacactactttggaaagggagtacgtggaggctcggttgaacctgaatcagatattgtgcaggcttgcagaagctttctagatcaacgacagtgcattaatgtgtggcgatttatccaaactatcaacgagagaaaagacttgacagagaacctgaagcagctacagtgcaggacactaatttttgttggtgagaattcccagttccatgctgaagttgtgcacatgactgcaaagcttgataggcgatatagcgctcttgtggaggtacaagcttgtggctcggttgtgacagaggagcaaccacacacaatgctgataccaatggagtactttctcatgggatatggactgtacaggccaagccagataaactttagccctcgtagccctctgaatccgttttgtatatcaccagagctcctctctcctgagagcaagggggttaagctaaagccaaccaagacacgagccaaccttaaagcataggaacaggtgatgagaatgcataggaactgatgtgcatcccttgattttttttttgtgctgaagtgacatagctgttgtttccgtgatgtacataagacaagaggttagtcgggtcaaggttgggtgggtggtcgattccattgatttgtagcctttaaaacagttgtacattgtcacagatttatttgttgaagggagaagaaataataaggggagatgagatgttgccaaaagttagttcctctacgtttccatt

SEQ ID NO: 22573 - DNA, 2461 bp, Zea Mays
aaagctttcgcatccgacgatgagtccctgactagtcagagagtggcccctacgcgcgcagccttaaccccatccgcagacatcagccggcgcctgtgttcctctccccgagccggtgcacgcaccacttcccccacttcgatctagcataatccgactccgccgactcgcctgaaccctagccagccgccgccatgccgccgcgacgcggtaggggaaagggtaagggtagggcaaagccaagagcgaagcccaccgagcccgagcccgagtccgatcccgaactagacgaagccgccaagtccgaaatcgaggcgggggacgcggaggctggggaggagtccagcgccgagagcgaggactcgaaggaagacgaatcggagagcgacaccgagtccatggatgcagaggccagcgaagaagctggcgagaacggaacggaggagatggatgcagagcctgaagccaaagccgtcgaggccaaggctgaaacggtggccacggaggcggaggcgaagcctgacgcctcggatgaagaagctggtgagactggctcagaccgcgaagcagatggcaagggtgctgatccgaaggcgaaagcggaggagtccgacggcgaggatgaggagggagccaccgccgtgaccgacggcgatagtgaagaggaagccgctgagacgggcggcgagagcgaagaggatggtggcgactccgacaccgaaggtgatgccgaggaatctcctccatcccctcctcgccgcagtcgccgccgtaagcgagcggccactcccgatgacgaagcagaggagacccctacgccgtcgcgtcgccggcgccgtcggaagtcaggggagcgtggtgactccccgccgccacttcctgaccacctccgctgccgtcgcagcgacgggaagaagtggcgctgctcgggccgtgcactcccaaccgttagcttttgcgagtaccactacgcgagggctaacaagggtaagaagttaccagcggatgaggaggtccttgctgttgttcttcagaggcagaagaacaagaggaagggcaggaggagcatcaatcctccgacgtcccctcaggcagccacgagtgacccccagaccagggatctcccaaatggactgatgacgatctcgccaggtagcagtggacctgcggcattgtcaactcctgtgaagattggtgtagaaattcctgcacccatacagcggtgctatcgttccaagaatgctgagccattgcctgttggtcctgtgaaggttgttcctcgtgcgatgagtgtgacaaaaacagcaagaacatgtcactgctgtggaatgaagaaggctgcacgtgtggccaattgcaagaactgtgataagaacttctgtaacagctgcattaataaatggtattctaagttgtccaggaaagatataaaggctcgttgtccagcttgccgtggtctctgcaattgtaaaccatgcagccttggtaattccaagggttctacgcctaaggaaccgccaaaagttgaaaggaagatacttagcataaaaatttccaaccatcaattttacaagcttttacctgtaagacttgaccaggaacagctagatgagttggaactggaagctaaaatacaaggaacaaaaatatctaatgtctgcgtccaggttgctgaaactggtcagataataactgtaagctctcgatgagccgattattaaggtgctgcccaacatgcccgtttaagctgtgcctaagttgctgtcagaagatacgtgaaggaaacatgtcggacaacacccctgaagataaattcaagaatcggttgattcaacaagagtctgtccatgaggatggcagtattacttgcccttcgattgagctgggtggatgtggtgacgccatgctgaacctaatatattcatctccatctagccagtccgaagagctcagttcagaatgtgagctagatgctgcaggcaatcattctggagtgaaggatgctcaggctcatgggtcacctgtacctgagagtaatggaagattattggctgctgcccaggcagaaacagtgtctgaggaatgaagatgcagctatggttggctcatcgttcaggtgggagcgcaagctgacatgttcactagcatgaagcctgaagatgtgtatgatacggtccggattcgatagagggtaggttgcttaatttagctaggttatcggcctatatggctattgattttaggcctgtgacctggggatatgtttcgtctttgatccgggagtcgttatgttaaacatcgttgtacatatggttatggctttatttttgtcattaccgagaggcgggagctgatggattggttgtattgtcgttcgtctaagggattaccttgataatttttatgtgcggtactatcagtattcagtagcccacatggatcgtattgttgacttgttgtc

SEQ ID NO: 22574 - DNA, 2212 bp, Zea Mays
aaagctttcgcatccgacgatgagtccctgactagtcagagagtggcccctacgcgcgcagccttaaccccatccgcagacatcagccggcgcctgtgttcctctccccgagccggtgcacgcaccacttcccccacttcgatctagcataatccgactccgccgactcgcctgaaccctagccagccgccgccatgccgccgcgacgcggtaggggaaagggtaagggtagggcaaagccaagagcgaagcccaccgagcccgagcccgagtccgatcccgaactagacgaagccgccaagtccgaaatcgaggcgggggacgcggaggctggggaggagtccagcgccgagagcgaggactcgaaggaagacgaatcggagagcgacaccgagtccatggatgcagaggccagcgaagaagctggcgagaacggaacggaggagatggatgcagagcctgaagccaaagccgtcgaggccaaggctgaaacggtggccacggaggcggaggcgaagcctgacgcctcggatgaagaagctggtgagactggctcagaccgcgaagcagatggcaagggtgctgatccgaaggcgaaagcggaggagtccgacggcgaggatgaggagggagccaccgccgtgaccgacggcgatagtgaagaggaagccgctgagacgggcggcgagagcgaagaggatggtggcgactccgacaccgaaggtgatgccgaggaatctcctccatcccctcctcgccgcagtcgccgccgtaagcgagcggccactcccgatgacgaagcagaggagacccctacgccgtcgcgtcgccggcgccgtcggaagtcaggggagcgtggtgactccccgccgccacttcctgaccacctccgctgccgtcgcagcgacgggaagaagtggcgctgctcgggccgtgcactcccaaccgttagcttttgcgagtaccactacgcgagggctaacaagggtaagaagttaccagcggatgaggaggtccttgctgttgttcttcagaggcagaagaacaagaggaagggcaggaggagcatcaatcctccgacgtcccctcaggcagccacgagtgacccccagaccagggatctcccaaatggactgatgacgatctcgccaggtagcagtggacctgcggcattgtcaactcctgtgaagattggtgtagaaattcctgcacccatacagcggtgctatcgttccaagaatgctgagccattgcctgttggtcctgtgaaggttgttcctcgtgcgatgagtgtgacaaaaacagcaagaacatgtcactgctgtggaatgaagaaggctgcacgtgtggccaattgcaagaactgtgataagaacttctgtaacagctgcattaataaatggtattctaagttgtccaggaaagatataaaggctcgttgtccagcttgccgtggtctctgcaattgtaaaccatgcagccttggtaattccaagggttctacgcctaaggaaccgccaaaagttgaaaggaagatacttagcataaaaatttccaaccatcaattttacaagcttttacctgtaagacttgaccaggaacagctagatgagttggaactggaagctaaaatacaaggaacaaaaatatctaatgtctgcgtccaggttgctgaaactggtcagagtgagtcactctactgtgctattccgatcgattcatcaacgcatgaagcaggtgcatccgccgcgatcgtcccctgctccgcagggcgccatgaacacgcccgtccgtggccttgggatggagcacttccacctgccgtgcccacagcttgacgatccacgatgcagccagccctcgaaacacccgcggagggagagagcgtgccgcgatggagttcttgaagaacggcagtgggagggtgagcagtgaatggataaacgatagggataggtgagaataggaacacacgggtgagcagtgaatgggttaaaaaatgttcttattttacactagtgttgttaaccattttttctattttatgaattatgactttctatctccatattccaaacagcacatttttctataacttccccatgctttgcatttatcggttttctcccttcattaccattttatccgtatggttcttactttaatacatcagtttttagacctattattttttaaaaagtttaacccaagt

SEQ ID NO: 22575 - DNA, 2642 bp, Zea Mays
aaagctttcgcatccgacgatgagtccctgactagtcagagagtggcccctacgcgcgcagccttaaccccatccgcagacatcagccggcgcctgtgttcctctccccgagccggtgcacgcaccacttcccccacttcgatctagcataatccgactccgccgactcgcctgaaccctagccagccgccgccatgccgccgcgacgcggtaggggaaagggtaagggtagggcaaagccaagagcgaagcccaccgagcccgagcccgagtccgatcccgaactagacgaagccgccaagtccgaaatcgaggcgggggacgcggaggctggggaggagtccagcgccgagagcgaggactcgaaggaagacgaatcggagagcgacaccgagtccatggatgcagaggccagcgaagaagctggcgagaacggaacggaggagatggatgcagagcctgaagccaaagccgtcgaggccaaggctgaaacggtggccacggaggcggaggcgaagcctgacgcctcggatgaagaagctggtgagactggctcagaccgcgaagcagatggcaagggtgctgatccgaaggcgaaagcggaggagtccgacggcgaggatgaggagggagccaccgccgtgaccgacggcgatagtgaagaggaagccgctgagacgggcggcgagagcgaagaggatggtggcgactccgacaccgaaggtgatgccgaggaatctcctccatcccctcctcgccgcagtcgccgccgtaagcgagcggccactcccgatgacgaagcagaggagacccctacgccgtcgcgtcgccggcgccgtcggaagtcaggggagcgtggtgactccccgccgccacttcctgaccacctccgctgccgtcgcagcgacgggaagaagtggcgctgctcgggccgtgcactcccaaccgttagcttttgcgagtaccactacgcgagggctaacaagggtaagaagttaccagcggatgaggaggtccttgctgttgttcttcagaggcagaagaacaagaggaagggcaggaggagcatcaatcctccgacgtcccctcaggcagccacgagtgacccccagaccagggatctcccaaatggactgatgacgatctcgccaggtagcagtggacctgcggcattgtcaactcctgtgaagattggtgtagaaattcctgcacccatacagcggtgctatcgttccaagaatgctgagccattgcctgttggtcctgtgaaggttgttcctcgtgcgatgagtgtgacaaaaacagcaagaacatgtcactgctgtggaatgaagaaggctgcacgtgtggccaattgcaagaactgtgataagaacttctgtaacagctgcattaataaatggtattctaagttgtccaggaaagatataaaggctcgttgtccagcttgccgtggtctctgcaattgtaaaccatgcagccttggtaattccaagggttctacgcctaaggaaccgccaaaagttgaaaggaagatacttagcataaaaatttccaaccatcaattttacaagcttttacctgtaagacttgaccaggaacagctagatgagttggaactggaagctaaaatacaaggaacaaaaatatctaatgtctgcgtccaggttgctgaaactggtcagagtgagtcactctactgtaataactgtaagctctcgatgagccgattattaaggtgctgcccaacatgcccgtttaagctgtgcctaagttgctgtcagaagatacgtgaaggaaacatgtcggacaacacccctgaagataaattcaagaatcggttgattcaacaagagtctgtccatgaggatggcagtattacttgcccttcgattgagctgggtggatgtggtgacgccatgctgaacctaatatattcatctccatctagccagtccgaagagctcagttcagaatgtgagctagatgctgcaggcaatcattctggagtgaaggatgctcaggctcatgggtcacctgtacctgagagtaatggaagattattggctgctgcccaggcagaaacagtgtctgaggaatgaagatgcagctatggttggctcatcgttcagtgctattccgatcgattcatcaacgcatgaagcaggtgcatccgccgcgatcgtcccctgctccgcagggcgccatgaacacgcccgtccgtggccttgggatggagcacttccacctgccgtgcccacagcttgacgatccacgatgcagccagccctcgaaacacccgcggagggagagagcgtgccgcgatggagttcttgaagaacggcagtgggagggtgagcagtgaatggataaacgatagggataggtgagaataggaacacacgggtgagcagtgaatgggttaaaaaatgttcttattttacactagtgttgttaaccattttttctattttatgaattatgactttctatctccatattccaaacagcacatttttctataacttccccatgctttgcatttatcggttttctcccttcattaccattttatccgtatggttcttactttaatacatcagtttttagacctattattttttaaaaagtttaacccaagt

SEQ ID NO: 22576 - DNA, 1887 bp, Zea Mays
gtgtcctagttttgaagtataactgtagttttgctcctatttttagtctttacattttttttatgacaattcgaactattttggcaacaattcaaattattttaacaaaataaaaatttaaaagcttcatctgtgtttctgctactagtagtgaagtcaaagcccgtggaagtcttggcaaagaggctctacgttttcaatttactgccgtcatccgcacaccccttggagccagcagccagccatctgcaagcaacaccacgatcgcattcacagccacgccgtcaatccgccatagtatttgccaaatccccggctatgcaaaataagctactcccttccctgctaacaacaactactacgtacaaaatacatgttatcaacaaagctccaccacgccacgccctccaaccacagccatcctgcatcgggagttcacaagaacgcatcccaccagcggccgaccgccaggctgagcgcgaggccaaggagggcggcggcggtggcgccgcgcggcgtcgcggaggcggcggccgcggaaccgcccgcgctggcggtgcgctcgaactgcagcgagtccacggcaagcggcatgttctcctggtcagggctgcaccgcggcgccgcgccgccgctgccggactccgtcgggcgcgcggtgtagagcatggcgcgcagcacggcggagacggtggggatgtaggccgtcttgttcttggccagcagccacgtgaggcccatcagctggcagtcccgccccagcatccgccgcgcgcggtcgccgccggcgccggagacctcgcggctcacgttccccttcagctgcacaagttggtgggtgcaagtgcaaccgaggaagctgcaggttagcaagtgcagttaatgtggttcatgcagcaggggacgttctcgcgatgcaggcagtgcagtttccactttccaccactgaacgttgcatttggcttgctcgacctctcagtaaatgctccccatgcacaacaaactgttcttgctacgcgcgcccgaccgatttggttgcaggttttcgcaatgcaagaaagagaacaatgtcaaaaaagttttgagtgcatgattggactgttcgtcatgatcatgtccttgagagattaatacaatgccaatctggatgcaggacatgcaagtcggggactaggtctgctcatcaatccacggctttcgaagctgcaagtggtggctaaccagctaaaagcattcataattgaaaaagacactgcccattgtggttgtcctccggctaggatggtttgtccccacaaatgtgtgttcaagctttcaaggaatggtcctatccggtggttacctggtggcgggattgccctttcccagggttgcttccagagagaaaggcaatcaagtaggaaatgattagtgggtgatggtaagctcaagaacaagcagatcagttcgaaagttgaaacaatgatgcggatagaaagcgcagtggaaaccctttgtgggaaaggggataccatcaaaatggccaccttttgctagataaaaaaaaacaagcaaagaaggagcgagggcgtcgcttgaagcgccgcactattgctctgcaggagtggtacgtataattgacaaaattgttgaaggttttcgtctatatataagcaggggtagaaatcgatcagtggtttgaatccaagaaggcaagatatgcgtggacgcgtggtgtaacatttcaaagattagttatatagggaaatgcaagaccaaaccaaaagagacaagaacggaaaagatgagcaaaagcaatggcattaggagagaaagctagcaagaaaggtttaccttttgcagggactgcacgcatcgcgagcagccggcgtaggaggcgttgcggca

SEQ ID NO: 22577 - DNA, 1483 bp, Zea Mays
tttaaaagcttcatctgtgtttctgctactagtagtgaagtcaaagcccgtggaagtcttggcaaagaggctctacgttttcaatttactgccgtcatccgcacaccccttggagccagcagccagccatctgcaagcaacaccacgatcgcattcacagccacgccgtcaatccgccatagtatttgccaaatccccggctatgcaaaataagctactcccttccctgctaacaacaactactacgtacaaaatacatgttatcaacaaagctccaccacgccacgccctccaaccacagccatcctgcatcgggagttcacaagaacgcatcccaccagcggccgaccgccaggctgagcgcgaggccaaggagggcggcggcggtggcgccgcgcggcgtcgcggaggcggcggccgcggaaccgcccgcgctggcggtgcgctcgaactgcagcgagtccacggcaagcggcatgttctcctggtcagggctgcaccgcggcgccgcgccgccgctgccggactccgtcgggcgcgcggtgtagagcatggcgcgcagcacggcggagacggtggggatgtaggccgtcttgttcttggccagcagccacgtgaggcccatcagctggcagtcccgccccagcatccgccgcgcgcggtcgccgccggcgccggagacctcgcggctcacgttccccttcagctgcacaagttggtgggtgcaagtgcaaccgaggaagctgcaggacatgcaagtcggggactaggtctgctcatcaatccacggctttcgaagctgcaagtggtggctaaccagctaaaagcattcataattgaaaaagacactgcccattgtggttgtcctccggctaggatggtttgtccccacaaatgtgtgttcaagctttcaaggaatggtcctatccggtggttacctggtggcgggattgccctttcccagggttgcttccagagagaaaggcaatcaagtaggaaatgattagtgggtgatggtaagctcaagaacaagcagatcagttcgaaagttgaaacaatgatgcggatagaaagcgcagtggaaaccctttgtgggaaaggggataccatcaaaatggccaccttttgctagataaaaaaaaacaagcaaagaaggagcgagggcgtcgcttgaagcgccgcactattgctctgcaggagtggtacgtataattgacaaaattgttgaaggttttcgtctatatataagcaggggtagaaatcgatcagtggtttgaatccaagaaggcaagatatgcgtggacgcgtggtgtaacatttcaaagattagttatatagggaaatgcaagaccaaaccaaaagagacaagaacggaaaagatgagcaaaagcaatggcattaggagagaaagctagcaagaaaggtttaccttttgcagggactgcacgcatcgcgagcagccggcgtaggaggcgttgcggca

SEQ ID NO: 22578 - DNA, 2164 bp, Zea Mays
catcatcccacgccacgcccacgcgaactaaacccgaaaaaacagcaggcggggcagggaaaccagagtaccataccaccgccccgataccgcgacgacccgacacctcgtccacctctccttccgagttccgactcatactggctatccaccgcctgtctctcaggcgatcaagtcgaccagagccggcaaccgatggtggtggtggcggtgggagggggcggcggcggcggtggctgggggacgtgggaggagctggtgctgggcggcgcagtgctccggcacgggagcgccgcgtgggccaccgtcgccgacgagcttcggacccgctctccgtgcaccttctcgcccgaggaatgtgaagcaaaatttgcagagatacagttgcggtactctgcgtgcaatgcttggtatgaagagcttcgtaagcagagagttgctgaactgaaaagggaattggagaagtcagaaaattctattggatccctccaatctgtgattcaaagcctcagcaatagcaaacacgttgatgggagttctgaatgccgcaccagtcatactgaatcatgtccacattctgaaaatacagcagatactaattcctcaggtaaagaaacgtccagggatagatcatcagctgctagtttcacagaggaagcaagcaacagtcagaaatctcagaaagtgcagcagtgtgatactgattcaattcaagttatcaatccatcaccagacgagtcatatccccaggcccaagttgaaaaggtcggtcccaaagatggcttgctttggggttctagaaaacaaagagtaatgagagctagaaggacacttctgaaagctggtgatagtagtggggatggtgagcctacatctacagcatgcatacagggggagggtttgtccaaaggctgcatgaagaacttcaaaactcaaaacttagaatcagttgttgtgaagaagggtgtgaaaactccaaaggtagaatctgatgtgatgaataaggatttgaaaaccctaaatgtaggatctggtataatgaagaagggcttgaaagctcccaaaacagaatctgatatgatgaagaagggcgtgagaacttctaaagcagagtctgatggtatgaagaaggggatgaaaataccgaaagtagaacctgatgttatggactggaaaactcccaaagcaggatctgatgttacgaagaagggcttgagatctccaaaggcagaatgttgccagcctgtgattgagagcgttaaactaaagctggcagagattttgaatactatatcaactcaagatgactgcaaaatgttgcaacaccaacttgatacccagaggaaaagagctagatataagaagatgattcgccggcatatggacttccgaatgcttcactctaagatcaagagtggcgcaatctctggcaccaaggagcttttgagagatatacttattttcatcaataatgtaataaccttctatccgaagactacattagagcacatggctgcggttgagcttcgtgactttactctggggatgcaagggcaagcaaggtttcttcaagggatgctgctgccaaggaaggggatggcaagagaccttgcagtgatgagctggctaatcaaaagactacaaagagaaatgagccagccaagaagaggggtgtgggtcggcctccaaagagtgggcagaggattgctggggcacaggaaaatagccccatcaaaggcaggaaaagtagcgctggggcacaggtagatagccccagcaaaggcaggaagaggagtgtggaagcacatgatgatagctccagcaaagggggcaagaggagccggcggtgaagctaccatcagctcaatgccggtgaaactgtgtacagcttaaccatatatcataggctgttcccttccggtttgtttacctgacaaaaaaaagttattgtcccagtattcaaactgatgtaacaggaagggttagttgtttctgatgttgttttgtaaggagtaaggacaattagaagggaaccctcatttttatattgagattatccgagttaggctatacatatctgaccatgtaatgcttatagtagtttaagttgttataccatgtgaactgatgcttgaacaccgaagttacctatcatcagtctgtc

SEQ ID NO: 22579 - DNA, 1821 bp, Zea Mays
gtgaatctttaaacataactgtcgggtggagtctttgctgttttggtaaaagataacattgcttggtatgaagagcttcgtaagcagagagttgctgaactgaaaagggaattggagaagtcagaaaattctattggatccctccaatctgtgattcaaagcctcagcaatagcaaacacgttgatgggagttctgaatgccgcaccagtcatactgaatcatgtccacattctgaaaatacagcagatactaattcctcaggtaaagaaacgtccagggatagatcatcagctgctagtttcacagaggaagcaagcaacagtcagaaatctcagaaagtgcagcagtgtgatactgattcaattcaagttatcaatccatcaccagacgagtcatatccccaggcccaagttgaaaaggtcggtcccaaagatggcttgctttggggttctagaaaacaaagagtaatgagagctagaaggacacttctgaaagctggtgatagtagtggggatggtgagcctacatctacagcatgcatacagggggagggtttgtccaaaggctgcatgaagaacttcaaaactcaaaacttagaatcagttgttgtgaagaagggtgtgaaaactccaaaggtagaatctgatgtgatgaataaggatttgaaaaccctaaatgtaggatctggtataatgaagaagggcttgaaagctcccaaaacagaatctgatatgatgaagaagggcgtgagaacttctaaagcagagtctgatggtatgaagaaggggatgaaaataccgaaagtagaacctgatgttatggactggaaaactcccaaagcaggatctgatgttacgaagaagggcttgagatctccaaaggcagaatgttgccagcctgtgattgagagcgttaaactaaagctggcagagattttgaatactatatcaactcaagatgactgcaaaatgttgcaacaccaacttgatacccagaggaaaagagctagatataagaagatgattcgccggcatatggacttccgaatgcttcactctaagatcaagagtggcgcaatctctggcaccaaggagcttttgagagatatacttattttcatcaataatgtaataaccttctatccgaagactacattagagcacatggctgcggttgagcttcgtgactttgcactctggggatgcaagggcaagcaaggtttcttcaagggatgctgctgccaaggaaggggatggcaagagaccttgcagtgatgagctggctaatcaaaagactacaaagagaaatgagccagccaagaagaggggtgtgggtcggcctccaaagagtgggcagaggattgctggggcacaggaaaatagccccatcaaaggcaggaaaagtagcgctggggcacaggtagatagccccagcaaaggcaggaagaggagtgtggaagcacatgatgatagctccagcaaagggggcaagaggagccggcggtgaagctaccatcagctcaatgccggtgaaactgtgtacagcttaaccatatatcataggctgttcccttccggtttgtttacctgacaaaaaaaagttattgtcccagtattcaaactgatgtaacaggaagggttagttgtttctgatgttgttttgtaaggagtaaggacaattagaagggaaccctcatttttatattgagattatccgagttaggctatacatatctgaccatgtaatgcttatagtagtttaagttgttataccatgtgaactgatgcttgaacaccgaagttacctatcatcagtctgtc

SEQ ID NO: 22580 - DNA, 1720 bp, Zea Mays
agtgacaagttgttcacagagcaattttgaatttcaatccctccaatctgtgattcaaagcctcagcaatagcaaacacgttgatgggagttctgaatgccgcaccagtcatactgaatcatgtccacattctgaaaatacagcagatactaattcctcaggtaaagaaacgtccagggatagatcatcagctgctagtttcacagaggaagcaagcaacagtcagaaatctcagaaagtgcagcagtgtgatactgattcaattcaagttatcaatccatcaccagacgagtcatatccccaggcccaagttgaaaaggtcggtcccaaagatggcttgctttggggttctagaaaacaaagagtaatgagagctagaaggacacttctgaaagctggtgatagtagtggggatggtgagcctacatctacagcatgcatacagggggagggtttgtccaaaggctgcatgaagaacttcaaaactcaaaacttagaatcagttgttgtgaagaagggtgtgaaaactccaaaggtagaatctgatgtgatgaataaggatttgaaaaccctaaatgtaggatctggtataatgaagaagggcttgaaagctcccaaaacagaatctgatatgatgaagaagggcgtgagaacttctaaagcagagtctgatggtatgaagaaggggatgaaaataccgaaagtagaacctgatgttatggactggaaaactcccaaagcaggatctgatgttacgaagaagggcttgagatctccaaaggcagaatgttgccagcctgtgattgagagcgttaaactaaagctggcagagattttgaatactatatcaactcaagatgactgcaaaatgttgcaacaccaacttgatacccagaggaaaagagctagatataagaagatgattcgccggcatatggacttccgaatgcttcactctaagatcaagagtggcgcaatctctggcaccaaggagcttttgagagatatacttattttcatcaataatgtaataaccttctatccgaagactacattagagcacatggctgcggttgagcttcgtgactttgcactctggggatgcaagggcaagcaaggtttcttcaagggatgctgctgccaaggaaggggatggcaagagaccttgcagtgatgagctggctaatcaaaagactacaaagagaaatgagccagccaagaagaggggtgtgggtcggcctccaaagagtgggcagaggattgctggggcacaggaaaatagccccatcaaaggcaggaaaagtagcgctggggcacaggtagatagccccagcaaaggcaggaagaggagtgtggaagcacatgatgatagctccagcaaagggggcaagaggagccggcggtgaagctaccatcagctcaatgccggtgaaactgtgtacagcttaaccatatatcataggctgttcccttccggtttgtttacctgacaaaaaaaagttattgtcccagtattcaaactgatgtaacaggaagggttagttgtttctgatgttgttttgtaaggagtaaggacaattagaagggaaccctcatttttatattgagattatccgagttaggctatacatatctgaccatgtaatgcttatagtagtttaagttgttataccatgtgaactgatgcttgaacaccgaagttacctatcatcagtctgtc

SEQ ID NO: 22581 - DNA, 2059 bp, Zea Mays
ccggtcgcggaggaggccgcgtggggcgcgcgcgcgagcgagctgtgagcatcgccgttcctctcgcgctctcggctgtctcgctccttcccgcggtcgcctccgcccgtgcccgtgcccgtgccccgtcccaactcccacccaacatttcccaatccctccgggctccggcaccgcgagatgtttcgttagccattcccacgacacaatcagcaccaccggtgccctcgctgccaaggcgcccgctcgtgtgacgagtggcgctccaccaccgcccattgcgcgctcagctccgaggcctcccgctcgccgcggcatcatctccggctcctcccgccgccgtgggcgtcatgaaatgaacctgacttgcttgagttgcttcttgacaccataagaaggcgatccatctgtttccagttgcacacagaaagctagtgccttgaaagataagaatggtaaggggggcggtaggtgtcctaagatgaaactgcggttgcatctgttggtcctgtgcgtgatcatcatattcctggtgtacaacatggctagctttcaacataagcagacatcgtcggaagcaaaatcccatccatttgatacagtgacggtctctgacagagatgctgttaagttgccccaaaaagctgaggttaggattggttatttaccccatggtatagtggagtctaactccgacatgaagttgaaaccgttgtggttgacaacaagtgcgcagtcaaagaagtctaaacaaaaagatcacttcttgattgctattgctgccggtataaatcaaaagaaaagtgtggacgctataatgaagaagtttcttccagaaaattttacagctgtattgttccattacgacgggaatgtcaatgggtggaatgatctaccatggagcaaaagtgtgatacatatagctgcttctaaccagactaaatggtggtttgcaaagaggttcctccatcctgctgttgtgtctatgtaccagtacatctttctttgggatgaagacctggaagtagataactttaatccgagaaggtacttaaatatagttagatcagaaggactggagatatcacaaccaggtcttgattctaagctttctgaaattcatcaccgaataactgttcgtaaaaatacagggacctttcatagaagagttagtcgggctaacaaacgttgtttaagagaaggaccgccttgttctggatgggtcgaaggcatggcaccggttttctcaaagtacgcttggcaatgtgtgtggcaccttatacagaatgatcttatacatggatggggcatcgattacaagtttgggtattgtgctcagggtgacaggacaaagaacatcggcgtagttgatagtgaatttatagttcaccgaggagtgcagacattaggaggttctacaataacaaaggatggtattcgtggcaaaaatgcccagtcactccgccagaaagcagctcaagtccaaaaatcgagagggagggatcctggccttgatatgcgaacaaagatccggagaaaatcacgatcggagcttcgtgatttccagaagcgctgggcccgggctgcaagggaagacagaacatgggttgatccgtttgcccactcccgaagaaagcggaggaatagaaacccacagtagataagcataatcatcattgtttaagcttgcacagaattcgtctgcacctaccatctagggtgtgtttgatatagctccagagcagaattctaaggaggagctagcaagagtctactaaacactcgtaactctagagttgcaaactccataaagttttcagagttgtagtacatatagttggagtacttcttttgctgctctgaaaacttaaaaaaacaacctagacgtggagtttggagttatttatccgccactgtcattggttatgagaaaataatttaaatctggagtagagctgcttcatccagagttttgaagtggaactgctctaaagtagaacagagttataccaaacatgcctttagtgtatataattgcatggttcgagtgggagttgtg

SEQ ID NO: 22582 - DNA, 1987 bp, Zea Mays
gcgtggggcgcgcgcgcgagcgagctgtgagcatcgccgttcctctcgcgctctcggctgtctcgctccttcccgcggtcgcctccgcccgtgcccgtgcccgtgccccgtcccaactcccacccaacatttcccaatccctccgggctccggcaccgcgagatgtttcgttagccattcccacgacacaatcagcaccaccggtgccctcgctgccaaggcgcccgctcgtgtgacgagtggcgctccaccaccgcccattgcgcgctcagctccgaggcctcccgctcgccgcggcatcatctccggctcctcccgccgccgtgggcgtcatgaaatgaacctgacttgcttgagttgcttcttgacaccataagaaggcgatccatctgtttccagttgcacacagaaagctagtgccttgaaagataagaatggtaaggggggcggtaggtgtcctaagatgaaactgcggttgcatctgttggtcctgtgcgtgatcatcatattcctggtgtacaacatggctagctttcaacataagcagacatcgtcggaagcaaaatcccatccatttgatacagtgacggtctctgacagagatgctgttaagttgccccaaaaagctgaggttaggattggttatttaccccatggtatagtggagtctaactccgacatgaagttgaaaccgttgtggttgacaacaagtgcgcagtcaaagaagtctaaacaaaaagatcacttcttgattgctattgctgccggtataaatcaaaagaaaagtgtggacgctataatgaagaagtttcttccagaaaattttacagctgtattgttccattacgacgggaatgtcaatgggtggaatgatctaccatggagcaaaagtgtgatacatatagctgcttctaaccagactaaatggtggtttgcaaagaggttcctccatcctgctgttgtgtctatgtaccagtacatctttctttgggatgaagacctggaagtagataactttaatccgagaaggtacttaaatatagttagatcagaaggactggagatatcacaaccaggtcttgattctaagctttctgaaattcatcaccgaataactgttcgtaaaaatacagggacctttcatagaagagttagtcgggctaacaaacgttgtttaagagaaggaccgccttgttctggatgggtcgaaggcatggcaccggttttctcaaagtacgcttggcaatgtgtgtggcaccttatacagggtgacaggacaaagaacatcggcgtagttgatagtgaatttatagttcaccgaggagtgcagacattaggaggttctacaataacaaaggatggtattcgtggcaaaaatgcccagtcactccgccagaaagcagctcaagtccaaaaatcgagagggagggatcctggccttgatatgcgaacaaagatccggagaaaatcacgatcggagcttcgtgatttccagaagcgctgggcccgggctgcaagggaagacagaacatgggttgatccgtttgcccactcccgaagaaagcggaggaatagaaacccacagtagataagcataatcatcattgtttaagcttgcacagaattcgtctgcacctaccatctagggtgtgtttgatatagctccagagcagaattctaaggaggagctagcaagagtctactaaacactcgtaactctagagttgcaaactccataaagttttcagagttgtagtacatatagttggagtacttcttttgctgctctgaaaacttaaaaaaacaacctagacgtggagtttggagttatttatccgccactgtcattggttatgagaaaataatttaaatctggagtagagctgcttcatccagagttttgaagtggaactgctctaaagtagaacagagttataccaaacatgcctttagtgtatataattgcatggttcgagtgggagttgtg

SEQ ID NO: 22583 - DNA, 2184 bp, Zea Mays
gcgtggggcgcgcgcgcgagcgagctgtgagcatcgccgttcctctcgcgctctcggctgtctcgctccttcccgcggtcgcctccgcccgtgcccgtgcccgtgccccgtcccaactcccacccaacatttcccaatccctccgggctccggcaccgcgagatgtttcgttagccattcccacgacacaatcagcaccaccggtgccctcgctgccaaggcgcccgctcgtgtgacgagtggcgctccaccaccgcccattgcgcgctcagctccgaggcctcccgctcgccgcggcatcatctccggctcctcccgccgccgtgttatgacctgccatcctgcaagcagggcgtcatgaaatgaacctgacttgcttgagttgcttcttgacaccataagaaggcgatccatctgtttccagttgcacacagaaagctagtgccttgaaagataagaatggtaaggggggcggtaggtgtcctaagatgaaactgcggttgcatctgttggtcctgtgcgtgatcatcatattcctggtgtacaacatggctagctttcaacataagcagacatcggtaacaaccagtatcccctggtttattgaaacagggttctgtgaacgtaaatatacctaaaagattaatctgatgtgattatgcaactttacagtcggaagcaaaatcccatccatttgatacagtgacggtctctgacagagatgctgttaagttgccccaaaaagctgaggttaggattggttatttaccccatggtatagtggagtctaactccgacatgaagttgaaaccgttgtggttgacaacaagtgcgcagtcaaagaagtctaaacaaaaagatcacttcttgattgctattgctgccggtataaatcaaaagaaaagtgtggacgctataatgaagaagtttcttccagaaaattttacagctgtattgttccattacgacgggaatgtcaatgggtggaatgatctaccatggagcaaaagtgtgatacatatagctgcttctaaccagactaaatggtggtttgcaaagaggttcctccatcctgctgttgtgtctatgtaccagtacatctttctttgggatgaagacctggaagtagataactttaatccgagaaggtacttaaatatagttagatcagaaggactggagatatcacaaccaggtcttgattctaagctttctgaaattcatcaccgaataactgttcgtaaaaatacagggacctttcataggtaagttcttgtagtgcaccttttattttggatttttttatgtcataacacaatgaaacatgatgtgtattttgatagaagagttagtcgggctaacaaacgttgtttaagagaaggaccgccttgttctggatgggtcgaaggcatggcaccggttttctcaaagtacgcttggcaatgtgtgtggcaccttatacagggtgacaggacaaagaacatcggcgtagttgatagtgaatttatagttcaccgaggagtgcagacattaggaggttctacaataacaaaggatggtattcgtggcaaaaatgcccagtcactccgccagaaagcagctcaagtccaaaaatcgagagggagggatcctggccttgatatgcgaacaaagatccggagaaaatcacgatcggagcttcgtgatttccagaagcgctgggcccgggctgcaagggaagacagaacatgggttgatccgtttgcccactcccgaagaaagcggaggaatagaaacccacagtagataagcataatcatcattgtttaagcttgcacagaattcgtctgcacctaccatctagggtgtgtttgatatagctccagagcagaattctaaggaggagctagcaagagtctactaaacactcgtaactctagagttgcaaactccataaagttttcagagttgtagtacatatagttggagtacttcttttgctgctctgaaaacttaaaaaaacaacctagacgtggagtttggagttatttatccgccactgtcattggttatgagaaaataatttaaatctggagtagagctgcttcatccagagttttgaagtggaactgctctaaagtagaacagagttataccaaacatgcctttagtgtatataattgcatggttcgagtgggagttgtg

SEQ ID NO: 22584 - DNA, 1875 bp, Zea Mays
gcgtggggcgcgcgcgcgagcgagctgtgagcatcgccgttcctctcgcgctctcggctgtctcgctccttcccgcggtcgcctccgcccgtgcccgtgcccgtgccccgtcccaactcccacccaacatttcccaatccctccgggctccggcaccgcgagatgtttcgttagccattcccacgacacaatcagcaccaccggtgccctcgctgccaaggcgcccgctcgtgtgacgagtggcgctccaccaccgcccattgcgcgctcagctccgaggcctcccgctcgccgcggcatcatctccggctcctcccgccgccgtgggcgtcatgaaatgaacctgacttgcttgagttgcttcttgacaccataagaaggcgatccatctgtttccagttgcacacagaaagctagtgccttgaaagataaggtctctgacagagatgctgttaagttgccccaaaaagctgaggttaggattggttatttaccccatggtatagtggagtctaactccgacatgaagttgaaaccgttgtggttgacaacaagtgcgcagtcaaagaagtctaaacaaaaagatcacttcttgattgctattgctgccggtataaatcaaaagaaaagtgtggacgctataatgaagaagaaaattttacagctgtattgttccattacgacgggaatgtcaatgggtggaatgatctaccatggagcaaaagtgtgatacatatagctgcttctaaccagactaaatggtggtttgcaaagaggttcctccatcctgctgttgtgtctatgtaccagtacatctttctttgggatgaagacctggaagtagataactttaatccgagaaggtacttaaatatagttagatcagaaggactggagatatcacaaccaggtcttgattctaagctttctgaaattcatcaccgaataactgttcgtaaaaatacagggacctttcatagaagagttagtcgggctaacaaacgttgtttaagagaaggaccgccttgttctggatgggtcgaaggcatggcaccggttttctcaaagtacgcttggcaatgtgtgtggcaccttatacagaatgatcttatacatggatggggcatcgattacaagtttgggtattgtgctcagggtgacaggacaaagaacatcggcgtagttgatagtgaatttatagttcaccgaggagtgcagacattaggaggttctacaataacaaaggatggtattcgtggcaaaaatgcccagtcactccgccagaaagcagctcaagtccaaaaatcgagagggagggatcctggccttgatatgcgaacaaagatccggagaaaatcacgatcggagcttcgtgatttccagaagcgctgggcccgggctgcaagggaagacagaacatgggttgatccgtttgcccactcccgaagaaagcggaggaatagaaacccacagtagataagcataatcatcattgtttaagcttgcacagaattcgtctgcacctaccatctagggtgtgtttgatatagctccagagcagaattctaaggaggagctagcaagagtctactaaacactcgtaactctagagttgcaaactccataaagttttcagagttgtagtacatatagttggagtacttcttttgctgctctgaaaacttaaaaaaacaacctagacgtggagtttggagttatttatccgccactgtcattggttatgagaaaataatttaaatctggagtagagctgcttcatccagagttttgaagtggaactgctctaaagtagaacagagttataccaaacatgcctttagtgtatataattgcatggttcgagtgggagttgtg

SEQ ID NO: 22585 - DNA, 1768 bp, Zea Mays
gcgtggggcgcgcgcgcgagcgagctgtgagcatcgccgttcctctcgcgctctcggctgtctcgctccttcccgcggtcgcctccgcccgtgcccgtgcccgtgccccgtcccaactcccacccaacatttcccaatccctccgggctccggcaccgcgagatgtttcgttagccattcccacgacacaatcagcaccaccggtgccctcgctgccaaggcgcccgctcgtgtgacgagtggcgctccaccaccgcccattgcgcgctcagctccgaggcctcccgctcgccgcggcatcatctccggctcctcccgccgccgtggtctctgacagagatgctgttaagttgccccaaaaagctgaggttaggattggttatttaccccatggtatagtggagtctaactccgacatgaagttgaaaccgttgtggttgacaacaagtgcgcagtcaaagaagtctaaacaaaaagatcacttcttgattgctattgctgccggtataaatcaaaagaaaagtgtggacgctataatgaagaagaaaattttacagctgtattgttccattacgacgggaatgtcaatgggtggaatgatctaccatggagcaaaagtgtgatacatatagctgcttctaaccagactaaatggtggtttgcaaagaggttcctccatcctgctgttgtgtctatgtaccagtacatctttctttgggatgaagacctggaagtagataactttaatccgagaaggtacttaaatatagttagatcagaaggactggagatatcacaaccaggtcttgattctaagctttctgaaattcatcaccgaataactgttcgtaaaaatacagggacctttcatagaagagttagtcgggctaacaaacgttgtttaagagaaggaccgccttgttctggatgggtcgaaggcatggcaccggttttctcaaagtacgcttggcaatgtgtgtggcaccttatacagaatgatcttatacatggatggggcatcgattacaagtttgggtattgtgctcagggtgacaggacaaagaacatcggcgtagttgatagtgaatttatagttcaccgaggagtgcagacattaggaggttctacaataacaaaggatggtattcgtggcaaaaatgcccagtcactccgccagaaagcagctcaagtccaaaaatcgagagggagggatcctggccttgatatgcgaacaaagatccggagaaaatcacgatcggagcttcgtgatttccagaagcgctgggcccgggctgcaagggaagacagaacatgggttgatccgtttgcccactcccgaagaaagcggaggaatagaaacccacagtagataagcataatcatcattgtttaagcttgcacagaattcgtctgcacctaccatctagggtgtgtttgatatagctccagagcagaattctaaggaggagctagcaagagtctactaaacactcgtaactctagagttgcaaactccataaagttttcagagttgtagtacatatagttggagtacttcttttgctgctctgaaaacttaaaaaaacaacctagacgtggagtttggagttatttatccgccactgtcattggttatgagaaaataatttaaatctggagtagagctgcttcatccagagttttgaagtggaactgctctaaagtagaacagagttataccaaacatgcctttagtgtatataattgcatggttcgagtgggagttgtg

SEQ ID NO: 22586 - DNA, 2861 bp, Zea Mays
aaacactgttgccaagtcgttttggggaatgcagtagcagtacctcctttttgaacgtcaaacacggcaggcattggaaaacccaaacccacatcagacagaacagaaccagacgaaaagacttcctgaaatcaaaccacatttgccaagcgagtttacaagtagtttacatgctccatcaggcatctactgacacacatcaacagggatcagcagcaacaactccacgacggatccaccagccgccgctcgccagccacaacgcagcagggggcagcagtacaaggttgcaatgcttcagaacaagacctaaacctgtacagatacagagtcacaaagaggagagagagcccgcctgtcctggctgtcatgccccggagacggagtggatcatcgattcatcggcaacaccaacacgcccgcaaagcgcacggctgctcctcgcctcctctacagacaagacattgatggttgactggctgacaacagccagcgttctcagtgtgctgggtgtgtgctacatcagcactagctagggtttggcgaggagccagtgaaaggaggcggctggtgtgacggccaccggatcctctctggggggcacggtgcaggggcaggatgcgcgatgaacgttggcacgtcttgccctggcatcagaactgacacgcctctggggtaaacaggcatctgcaagcatcgtcaacaaagtggtcaacgagaatgtctctagtgagcccaagtccactatggtgtggagaaaaaaatgcaatatatttcatcagattatttatggtgtgtttcgtttgtagagtcaccctatgcttcatgagaaaaatgtccctccctaatgctcctctaattttataggagctgttagttttttagctaattcccatgtaaatgatgaaaaaatacttctaacaactccctaatttaatttggtcccctaatcttagatcctagctttgtcccgatgcatcataagttcatccataatttttggtggaaccaactcacttcttatgtatgtactaactattagcttaccaataatgagatgatgatggatcaatttattctattccataatctaaataaaaaagtgaggagtgagaaaaagatcgaccacttcatttctcaaaccaaacatgcctttactgtcatacaacatattacatagtttagcatctagtttttccgcacctccaccagttaacactcgatcctgggcgctggtaagcaagaaccgatgctgaacatgagttgaatacaggtagctgtgctgtgtccacgtttgggtacagcttgtcgtcgatggagtgtggtagtttgcttacgaattacaattacggggcgtttggatcccttcattttagaggaattggaattcactcaataaagtaacttatttagtttggaatttgacattccaccactttacaaagttcagatataaggctatctcgaattcatggggtggggtatgggaaatgattttatacagtagtagaaattgtttctactctgtaacttaaatgacactcttcatcttactcctctatagtaaaaatatagcacataaatatcttcgacatcttgctaataatagtatacaaatatattttgtataaaaccgaattagcttaattgatatatgcctaaattactattattagaatgaaattcaattccaatgatccaaactgggcattaacgttcttttccaccactggaatattataacacaagatggtgctagcaagctgttactacaaaattttcatacgagctatcacgtgtactccgtagcgcatacttttacattgtctgaactccgcacagcaatgcaattgacttgaaacagagaatagggagaatggatctttgtgctatccagcttccactgtaaactgaaaccgatgtttcagtagttggattgaaaccgtcctaatttaattttttttaagaatgtaatttatatttgtggtatggtgcacctctcccgtcactgtgagtaaatgtttcctttatctccatgttctaaggctatcctccatctctcgtttcaaatttctcgctctacagtatagtctacagtacaaaacagtatttttacacagccagatgaacgacctgctggacatagcctaacgcattgctccaacagtaattacgttgaactgctgatccaccttaataacaagactgctccacattactaacaactttcaagcagctaaaatgatgactgcactggggccttgtgtagctgtggtcctgtgtacaaccaggcttgcaattcctaaactacgggaccaaatttcggtgtggctgcagacaaggatgggcccttgtctgtttgctgctgtccgccgaatttccttctcagcaactccataacttgtgttctcctttctggtggattctaggccccaatcttttgtggctcgttcgcgatgtagagaactatgaaggttcttctgataaagtaagtatacaaatgcattaactgaacttagccgtaggatagaaagtggagaagatagaaggaatggcattcaaggatagatgctaaatcaaacatatctggtgccgacatctactctaacctctcacggcacaggcagaacaactgctccccacttttcagagacaagtataaatggccgcgataccaaaagaaattaataagggaatttctaagaagaagaaaagtgtcgatgcaaaagcacagcatgtacatgatggacaggccgcaggcatacatgaagataaagttggagcaaccaacaatggcatgcccatgcccactaaaatatataagtaaacgatatgtcctggtctctcggacaatgttacat

SEQ ID NO: 22587 - DNA, 4543 bp, Zea Mays
aggagactgcaggaggttccaagccagttcaaaccggattgcagctttctggctggaaatagacggcgaccaccgcctcaacggcgacggcagcgacggccaccattcccttccaatctgccgcacaacatggcgtcgtgcgtggccgcgatggcgctggtcggcgcccgacctccgtctcacgccgctggccctgcggcggccagctgcagtggccgcgcgcagcttagcttccaccgcctcggcgctcgcgctcgcgctcgggtcatccgcgcctaccgccgccgcccacaccatccctcttatgtgcctgaggatggggtcgttctggagtggctgaggagcgcggccgccgcgctcgccatagtaacccagatttccgtctcgctgccggcgaacgcggtgctttactcgcctgacactaaggtgccgaggaccggggagctggccctgaggagggcgatccccgctaacccgaacatgaaggccatacaggaatcgctggaggatatttcgtacttgttgaggataccgcagaggaagccgtacggttccatggagggcgatgtgaagaagtccatgaaaatagcaatggacaacaaggaggcaatcctggcaagcattcctgaagagcataaggaggagggtgccaagctatatacctcattactcgaagagaagggtggtttgcagactctcttgaaatatattaaggagaataaccctgacaaactttctatagcacttgcttcatcacttgacactgttgctgaattggagctgttacaggctcctggtctgtcctttctcctgcctcaacagtatatagaatatccaaggctgacaggaagaggagttgttgaattcacagttgaaaaaggtgatggttcaacattctttccaactggtggtggtgaaccgaaaagtgttgctacaattcaggtcgttattgatgggtactctgccccactgactgctggaaactttgcaaaattggtcttggatggggtatatgacggggtaacacttaaatgtgcaagccaagcaattattgctgataacgagactggaaaaaacgggtacactgttccattagaggtcctgccagcaggacaattcgaaccattgtacagaactccactaagcattcaggatggagaattgccagtcctgcccatgtcggtgtatggtgctgttgccatggcacatagtgtggattcagatgaatacaactcaccaactcagttctttttctatctttatgacaagagaaactctggcttaggaggaatatcgttcgacgaggggcaattttcagttttcgggtataccactgatgggagagatgttctgtcacagattaaggccggagataaaattcggtctgccaagcttgtacagggcagagaacgccttgtattgccatccatagcccccgaagagagctgatattatcgatcccaagcatttgcagcattcttttacactgatgaggcaaccaacattttgtatatccaagccactaaacctgaccgaacagtttacagtcaaatactgagtatagcatatataacaatcgttgtacatgaaacatttttcttgtgtatccatgcatccgaatgcttattcgacaggtatgttacggtgagttgcctgggctgtgcatctctcattgagccaggccaggatgtccccacggacacgctcgatgttctcgtccggttccccaaatagcaaggagtggagcatcccgtcgtatatcttgatagtcttatccttgctggcggcggcggcgtacagggcgcggctgacttccgggtcggtaacctcgtcggtgctgccgtgcacgacaaggaacgggatgctgacttcgccgaggcgcttggccagctcgtcggtggcacgcaacagctcgacgacggtgccgagcctgggacggccgttgtagcgcacagggttgcgcgctgcaacgatgcgcttggcgggcaccttgacggacttctcgatgaggtcggcggtgggcacgatggccgccgtgggcgcgaagcgcgcgacgaaggtgagaatctccggcagcggccacggcgggcggatccggtcggagatcctgcacatgggagcgacgaggaccgcccccgcccactcctccggccgtgtgcggaggtggatgagcaggcagatggccccgcccatggactccccgaacaggaagcagggcaggcccgcgtgctcctccctcgccctgacggcgcggaagaaggcgaggaggtcagcgacggcggcgtcgaggtcgggcacgaaggcgcggaggccgtgggagcggccgtggcccgggaggtcggccgcgaagcaggcgaacccggaccgcgcgaggaagaccgccgtggactggaacgtccagctgatgtcgttgccgtagccgtggaccatgaacacgagcgccctgggccgctcgggcgcgcggggcctccacgcgcgcgtgaagagccgccgggcgcccgcgtcgggcgtggtgaagtaggaggactcgccctccgtgccgtgcgccgagtagaactccgcctccgtggccgggtgctcgccccagaagtgaacggccggcgccagcgcctccccgtccgccggcatagtggtggggatcggagtttggtcccggacgttggcgtcgggtggtgtggtgtggtgcgcgttgtgtgtggatgtaaagggaactggtggccgctggccggcgagcgggggagtcgctgctatgctggatgcttgccagttgcgtcgcggcaggggcagccgggcagggctgcttgggggacgtttcgatgcgggaggggaaatcactggattcgtttcgggttggtgccttggtgggacggctcttgtgccgcagatccaccggctcgtccccgcgccggtgcaatgcaaaattcacgtggtatgctacttccttcatagttggcacacgcggggaacaataactagtaagcgcaggcaggtgctaagggcatgtaaaacctagacactgttgcacggtactccaaatataagacataactaaaacacaacataatataatggtcatgtctaaaacatatgtcttatcatattcattatacaaatcagagcattcaataaattaaagtgatcaatcaaataatctactgtctcgaacatagagctaagacactgtgtcttcgtcaagatacatgtcttgagtctttttacatttaccccctagacatactctaagacacaacttaaaacactcactgtacatgccataacggtcctgtagcatcccaaatctatccatgtgtttacaaaaaaaattacgaatagatatagaactaaatgttcttattttctcacattctgaataaatcaatacctagagttattttaaatcataaaaaaatttaagttttaagtttatagaaaagagcgtcgaggtttatgggactaaattagtagcattggacacatcataatgtatttttaacaatatgatcattcagtgtcataaatattgtttctctataaattcggttcaacaatcaaattttttgttgaagttattttagatattattttagatagctttaggagttagtttatttaggaacgaaggaggtacattttagtatcgacccagtcatggtaacatccgttctcgaatatttgtcgtctgcttattaatttttaaattaaactacagcaaataaaaaaacagagtgggtataatcaaacatgtagaggtagtacaagctacatcatttccataaacatgctctggacaaaaatgccagcgttggtggtaattacccggacggtgtaggacaacgccatacccgcagtggcgcgcaccttttttttttggctcgccctacaggtggtcctgtgggtcggcactcggcaggcacatctacctctcgtatctgacccgatctcctccggccatggggcctaagctcgccctttattcatcttcaacccccttttcacgcaaagaaattaaagctgaacaagaataaaggtcaccagaagggcagaaccggacggagatcagtacaggtgcgggtactttgcccctaaaatacactcgaggttctttctatctcgatcgatatgaaaattaaaatattcgttttcattttacactatctatctacagctacatcatctcttaattactattagctacattatatcactaaattttaatctcttagcatgggatatccatgtcatatctctacttaaattttatttaaaaaatattgtaatttcctgcagcaatgtgtggagtatcttcaatctaacaggagtacggtgctgcttacctgaacttcgtgcgtgctgatgctacccagcatggttttggtccaccgccgcagtgcttcacgtcacgttagagaagagaagtatggcaatgcacagttgacacagcgatagatgatgatagctatgtgtccagtccagcaaattttatttgtaacagtagtgaccgagaaacaagcagctgctaccaaccgggccatgcaaagttctg

SEQ ID NO: 22588 - DNA, 4323 bp, Zea Mays
aggagactgcaggaggttccaagccagttcaaaccggattgcagctttctggctggaaatagacggcgaccaccgcctcaacggcgacggcagcgacggccaccattcccttccaatctgccgcacaacatggcgtcgtgcgtggccgcgatggcgctggtcggcgcccgacctccgtctcacgccgctggccctgcggcggccagctgcagtggccgcgcgcagcttagcttccaccgcctcggcgctcgcgctcgcgctcgggtcatccgcgcctaccgccgccgcccacaccatccctcttatgtgcctgaggatggggtcgttctggagtggctgaggagcgcggccgccgcgctcgccatagtaacccagatttccgtctcgctgccggcgaacgcggtgctttactcgcctgacactaaggtgccgaggaccggggagctggccctgaggagggcgatccccgctaacccgaacatgaaggccatacaggaatcgctggaggatatttcgtacttgttgaggataccgcagaggaagccgtacggttccatggagggcgatgtgaagaagtccatgaaaatagcaatggacaacaaggaggcaatcctggcaagcattcctgaagagcataaggaggagggtgccaagctatatacctcattactcgaagagaagggtggtttgcagactctcttgaaatatattaaggagaataaccctgacaaactttctatagcacttgcttcatcacttgacactgttgctgaattggagctgttacaggctcctggtctgtcctttctcctgcctcaacagtatatagaatatccaaggctgacaggaagaggagttgttgaattcacagttgaaaaaggtgatggttcaacattctttccaactggtggtggtgaaccgaaaagtgttgctacaattcaggtcgttattgatgggtactctgccccactgactgctggaaactttgcaaaattggtcttggatggggtatatgacggggtaacacttaaatgtgcaagccaagcaattattgctgataacgagactggaaaaaacgggtacactgttccattagaggtcctgccagcaggacaattcgaaccattgtacagaactccactaagcattcaggatggagaattgccagtcctgcccatgtcggtgtatggtgctgttgccatggcacatagtgtggattcagatgaatacaactcaccaactcagttctttttctatctttatgacaagagaaactctggcttaggaggaatatcgttcgacgaggggcaattttcagttttcgggtataccactgatgggagagatgttctgtcacagattaaggccggagataaaattcggtctgccaagcttgtacagggcagagaacgccttgtattgccatccatagcccccgaagagagctgatattatcgatcccaagcatttgcagcattcttttacactgatgaggcaaccaacattttgtatatccaagccactaaacctgaccgaacagtttacagtcaaatactgagtatagcatatataacaatcgttgtacatgaaacatttttcttgtgtatccatgcatccgaatgcttattcgacaggtatgttacggtgagttgcctgggctgtgcatctctcattgagccaggccaggatgtccccacggacacgctcgatgttctcgtccggttccccaaatagcaaggagtggagcatcccgtcgtatatcttgatagtcttatccttgctggcggcggcggcgtacagggcgcggctgacttccgggtcggtaacctcgtcggtgctgccgtgcacgacaaggaacgggatgctgacttcgccgaggcgcttggccagctcgtcggtggcacgcaacagctcgacgacggtgccgagcctgggacggccgttgtagcgcacagggttgcgcgctgcaacgatgcgcttggcgggcaccttgacggacttctcgatgaggtcggcggtgggcacgatggccgccgtgggcgcgaagcgcgcgacgaaggtgagaatctccggcagcggccacggcgggcggatccggtcggagatcctgcacatgggagcgacgaggaccgcccccgcccactcctccggccgtgtgcggaggtggatgagcaggcagatggccccgcccatggactccccgaacaggaagcagggcaggcccgcgtgctcctccctcgccctgacggcgcggaagaaggcgaggaggtcagcgacggcggcgtcgaggtcgggcacgaaggcgcggaggccgtgggagcggccgtggcccgggaggtcggccgcgaagcaggcgaacccggaccgcgcgaggaagaccgccgtggactggaacgtccagctgatgtcgttgccgtagccgtggaccatgaacacgagcgccctgggccgctcgggcgcgcggggcctccacgcgcgcgtgaagagccgccgggcgcccgcgtcgggcgtggtgaagtaggaggactcgccctccgtgccgtgcgccgagtagaactccgcctccgtggccgggtgctcgccccagaagtgaacggccggcgccagcgcctccccgtccgccggcatagtggtggggatcggagtttggtcccggacgttggcgtcgggtggtgtggtgtggtgcgcgttgtgtgtggatgtaaagggaactggtggccgctggccggcgagcgggggagtcgctgctatgctggatgcttgccagttgcgtcgcggcaggggcagccgggcagggctgcttgggggacgtttcgatgcgggaggggaaatcactggattcgtttcgggttggtgccttggtgggacggctcttgtgccgcagatccaccggctcgtccccgcgccggtgcaatgcaaaattcacgtggtatgctacttccttcatagttggcacacgcggggaacaataactagtaagcgcaggcaggtgctaagggcatgtaaaacctagacactgttgcacggtactccaaatataagacataactaaaacacaacataatataatggtcatgtctaaaacatatgtcttatcatattcattatacaaatcagagcattcaataaattaaagtgatcaatcaaataatctactgtctcgaacatagagctaagacactgtgtcttcgtcaagatacatgtcttgagtctttttacatttaccccctagacatactctaagacacaacttaaaacactcactgtacatgccataacggtcctgtagcatcccaaatctatccatgtgtttacaaaaaaaattacgaatagatatagaactaaatgttcttattttctcacattctgaataaatcaatacctagagttattttaaatcataaaaaaatttaagttttaagtttatagaaaagagcgtcgaggtttatgggactaaattagtagcattggacacatcataatgtatttttaacaatatgatcattcagtgtcataaatattgtttctctataaattcggttcaacaatcaaattttttgttgaagttattttagatattattttagatagctttaggagttagtttatttaggaacgaaggaggtacattttagtatcgacccagtcatggtaacatccgttctcgaatatttgtcgtctgcttattaatttttaaattaaactacagcaaataaaaaaacagagtgggtataatcaaacatgtagaggtagtacaagctacatcatttccataaacatgctctggacaaaaatgccagcgttggtggtaattacccggacggtgtaggacaacgccatacccgcagtggcgcgcaccttttttttttggctcgccctacaggtggtcctgtgggtcggcactcggcaggcacatctacctctcgtatctgacccgatctcctccggccatggggcctaagctcgccctttattcatcttcaacccccttttcacgcaaagaaattaaagctgaacaagaataaaggtcaccagaagggcagaaccggacggagatcagtacaggtcaatgtgtggagtatcttcaatctaacaggagtacggtgctgcttacctgaacttcgtgcgtgctgatgctacccagcatggttttggtccaccgccgcagtgcttcacgtcacgttagagaagagaagtatggcaatgcacagttgacacagcgatagatgatgatagctatgtgtccagtccagcaaattttatttgtaacagtagtgaccgagaaacaagcagctgctaccaaccgggccatgcaaagttctg

SEQ ID NO: 22589 - DNA, 1963 bp, Zea Mays
gtttttccccccgagtgagcaacagtggggtctcaacatgggccgcctatgtagctcaacactgaaatgcggcagacgcgtgggtggtcggagctggggcctcagcttgatcccaggctgccgttcgcggaatctctcttcccactagcgacgactgggcgacctccgccgccacactaaaccctactccaggtgcccaggtctgcgtcgggcccttgccggcgacgagcacccgctaggtttatctttccagttaccactgtgcggtttccaagatggctcgccgtggattgatggaacaggacttaagcaaattggatgtgacaaagcttgacccactgtcacctgaagttatctcacgccaagcaacaatcaatattggtaccattggccatgtggctcatggaaagtctactgttgtgaaggctatatccggagttcagactgttcggttcaagaatgagctggaacgtaacattactataaagctgggctatgctaatgcaaaaatctacaaatgtgaggatgacagatgtccacgaccaatgtgctacaaggcctatggaagcggaaaagaagatagccctctatgtgatgtgcctggatttgaaaacactagaatgaagctcctgagacatgtttcttttgttgattgcccgggacacgacattctcatggctacaatgcttaatggagctgctatcatggatggagctcttcttttgatcgcagcaaatgaaagttgtccacagcctcagacatctgagcatcttgctgctgttgaaatcatgcgccttcaacatatcatcattctgcagaacaagattgatcttatccaggaaagtgcagcaatgaatcaacatgaagcaatccaaaaattcatccagggaacaatagctgaaggtgcacctgtggtgcctatatctgcccagctgaaatacaacattgatgttatttgcgaatacattgtgaagaaaatccccatccccgaaaggaactttacctcgcctcccaacatgattgttattcgttcctttgatgttaacaagcctggttcagaggttgacgaaattagaggtggtgtagctggtggcagtatcctcaggggagttcttagggtgaaccagaagattgaagttcgccctggcattgttatgaaagatgagaatggaaacattaagtgcacgccaatctactcaaggattgtctcactctatgctgagcagaatgagctccaatttgctgtcccaggagggcttattggtgtgggaacaaccatggacccaactctaacgcgtgctgataggctggttggccaggttcttggtgaagttggttcactacctgatgtttatgtagagcttgagatcaatttcttcctactccggaggctgttgggtgtgaggacgaaaggtacagagaaggcagggaaggtgtcgaagctcaccaagggcgagatcctcatgcttaacataggatccatgtccacaggcgcccgtgtactcgccgttaagaacgatcttgccaagctacagctcaccgcgcctgtctgcacgagccgaggagagaaggttgctctgagccgtcgtgttgagaagcattggcgtctcatcggatggggccagatccaggccggtacaacacttgaagtaccaccctgcccgctctaaagcgtcatacacagacgtgagcttaatttgtgtgtgccaaagaaaaaaaatgagtttgttgttagtattgtctttgtgttactgcatatccaaagccttaggccattctagtttaattttgtttcgttcaattttggaggccacttccattatgattcctgtgaacattagcaggtcagaaaccagtactgtgaacattatgagtacgacgtgtggatcagtattgccaatgtcttgctttcacaccaaattttagacttgtattcgtagggttcttgaaagtaatgtccaga

SEQ ID NO: 22590 - DNA, 1821 bp, Zea Mays
gtttttccccccgagtgagcaacagtggggtctcaacatgggccgcctatgtagctcaacactgaaatgcggcagacgcgtgggtggtcggagctggggcctcagcttgatcccaggctgccgttcgcggaatctctcttcccactagcgacgactgggcgacctccgccgccacactaaaccctactccaggtgcccaggtctgcgtcgggcccttgccggcgacgagcacccgctaggtaccattggccatgtggctcatggaaagtctactgttgtgaaggctatatccggagttcagactgttcggttcaagaatgagctggaacgtaacattactataaagctgggctatgctaatgcaaaaatctacaaatgtgaggatgacagatgtccacgaccaatgtgctacaaggcctatggaagcggaaaagaagatagccctctatgtgatgtgcctggatttgaaaacactagaatgaagctcctgagacatgtttcttttgttgattgcccgggacacgacattctcatggctacaatgcttaatggagctgctatcatggatggagctcttcttttgatcgcagcaaatgaaagttgtccacagcctcagacatctgagcatcttgctgctgttgaaatcatgcgccttcaacatatcatcattctgcagaacaagattgatcttatccaggaaagtgcagcaatgaatcaacatgaagcaatccaaaaattcatccagggaacaatagctgaaggtgcacctgtggtgcctatatctgcccagctgaaatacaacattgatgttatttgcgaatacattgtgaagaaaatccccatccccgaaaggaactttacctcgcctcccaacatgattgttattcgttcctttgatgttaacaagcctggttcagaggttgacgaaattagaggtggtgtagctggtggcagtatcctcaggggagttcttagggtgaaccagaagattgaagttcgccctggcattgttatgaaagatgagaatggaaacattaagtgcacgccaatctactcaaggattgtctcactctatgctgagcagaatgagctccaatttgctgtcccaggagggcttattggtgtgggaacaaccatggacccaactctaacgcgtgctgataggctggttggccaggttcttggtgaagttggttcactacctgatgtttatgtagagcttgagatcaatttcttcctactccggaggctgttgggtgtgaggacgaaaggtacagagaaggcagggaaggtgtcgaagctcaccaagggcgagatcctcatgcttaacataggatccatgtccacaggcgcccgtgtactcgccgttaagaacgatcttgccaagctacagctcaccgcgcctgtctgcacgagccgaggagagaaggttgctctgagccgtcgtgttgagaagcattggcgtctcatcggatggggccagatccaggccggtacaacacttgaagtaccaccctgcccgctctaaagcgtcatacacagacgtgagcttaatttgtgtgtgccaaagaaaaaaaatgagtttgttgttagtattgtctttgtgttactgcatatccaaagccttaggccattctagtttaattttgtttcgttcaattttggaggccacttccattatgattcctgtgaacattagcaggtcagaaaccagtactgtgaacattatgagtacgacgtgtggatcagtattgccaatgtcttgctttcacaccaaattttagacttgtattcgtagggttcttgaaagtaatgtccaga

SEQ ID NO: 22591 - DNA, 1894 bp, Zea Mays
ccccccgagtgagcaacagtggggtctcaacatgggccgcctatgtagctcaacactgaaatgcggcagacgcgtgggtggtcggagctggggcctcagcttgatcccaggctgccgttcgcggaatctctcttcccactagcgacgactgggcgacctccgccgccacactaaaccctactccaggtgcccaggtctgcgtcgggcccttgccggcgacgagcacccgctaggacttaagcaaattggatgtgacaaagcttgacccactgtcacctgaagttatctcacgccaagcaacaatcaatattggtaccattggccatgtggctcatggaaagtctactgttgtgaaggctatatccggagttcagactgttcggttcaagaatgagctggaacgtaacattactataaagctgggctatgctaatgcaaaaatctacaaatgtgaggatgacagatgtccacgaccaatgtgctacaaggcctatggaagcggaaaagaagatagccctctatgtgatgtgcctggatttgaaaacactagaatgaagctcctgagacatgtttcttttgttgattgcccgggacacgacattctcatggctacaatgcttaatggagctgctatcatggatggagctcttcttttgatcgcagcaaatgaaagttgtccacagcctcagacatctgagcatcttgctgctgttgaaatcatgcgccttcaacatatcatcattctgcagaacaagattgatcttatccaggaaagtgcagcaatgaatcaacatgaagcaatccaaaaattcatccagggaacaatagctgaaggtgcacctgtggtgcctatatctgcccagctgaaatacaacattgatgttatttgcgaatacattgtgaagaaaatccccatccccgaaaggaactttacctcgcctcccaacatgattgttattcgttcctttgatgttaacaagcctggttcagaggttgacgaaattagaggtggtgtagctggtggcagtatcctcaggggagttcttagggtgaaccagaagattgaagttcgccctggcattgttatgaaagatgagaatggaaacattaagtgcacgccaatctactcaaggattgtctcactctatgctgagcagaatgagctccaatttgctgtcccaggagggcttattggtgtgggaacaaccatggacccaactctaacgcgtgctgataggctggttggccaggttcttggtgaagttggttcactacctgatgtttatgtagagcttgagatcaatttcttcctactccggaggctgttgggtgtgaggacgaaaggtacagagaaggcagggaaggtgtcgaagctcaccaagggcgagatcctcatgcttaacataggatccatgtccacaggcgcccgtgtactcgccgttaagaacgatcttgccaagctacagctcaccgcgcctgtctgcacgagccgaggagagaaggttgctctgagccgtcgtgttgagaagcattggcgtctcatcggatggggccagatccaggccggtacaacacttgaagtaccaccctgcccgctctaaagcgtcatacacagacgtgagcttaatttgtgtgtgccaaagaaaaaaaatgagtttgttgttagtattgtctttgtgttactgcatatccaaagccttaggccattctagtttaattttgtttcgttcaattttggaggccacttccattatgattcctgtgaacattagcaggtcagaaaccagtactgtgaacattatgagtacgacgtgtggatcagtattgccaatgtcttgctttcacaccaaattttagacttgtattcgtagggttcttgaaagtaatgtccaga

SEQ ID NO: 22592 - DNA, 2494 bp, Zea Mays
gttaactccacgtctccacctcaccactgccagtaaacagcgagtcctcccttgctccgtcctcctcgtccctgccgttccccaaacccaaagcagagcagcctcggcttctcttatccggagaggagggcggccgccggcgtcgaccttcgcgaggaaggagaggaggccgttggatctcgctggattcgattgggctaggacgggatctccgcgggcagtgcacgatggtcgatcttgctgatctcgagggtgcgggcgaggcggcgcgctcgcatcccgccgcttccggccagcgggacaggctggcggcgctgctggagctcgctgcggcggacgacgccgcggggttccgcgaggcgctcgcgggaggaggcggccagggcgacgcagcggagctggcggacggggtcgggctgtggtacggccgaagcaaggcgtacgagccgcgcacgccgctgatggttgcggcgacgtacggcagcgtcgaagtggtgtcgttgctgctcggcctcggatgcgtcgacgtcaaccggcgccccggcgtcgacggcgccaccccgctgcactgcgccgcttccggcggctcgcgaaacgccgtggccgtggtcaagctgctcctggctgccggtgcctgcccggtaacccccgactccgccggtcgcttgcctgccgacgtcatcttgcctcctgcttcgcccgacgccttgggcgatctggatatgctccttggccgccgccgagggctcgctgtcgcgacctcggtaccatcgctctcgtcgtccccgccgctctcgacctcgccggatgaaggtaacaggtcgccatcctcgcggtcgtcttcgttgtcaccgattaccgtggaccgcgccaagaaggagtacccggtggatccgacgctgcccgacatcaaaagcagcgtgtatgcctcggacgaattccgcatgttcgcgttcaaggtgcggccgtgctctagggcctactcgcatgactggacagagtgtccgttcgtgcaccctgccccaacttccgccgccctggaggttgtcccagtggtgatagctgcgagttctcccatggtgttttcgagagctggctccacccatcgcagtaccgcacaaggccctgcaaggagggcgcagcttgtgcccgccgcatctgcttcttcgcccatgatgaagatgagctccgccatgtgcctcacaatagtggtgcaggcctgctgtctccccgagcctcttcatccattgacatgaccgctgctgctgctgctcttgggcttctacctggatctcctaccagacactttgtgccaccacctctgtcaccatctgccgccaacaatggtggaggtgctgctgctcattggcttcaaggtagcaggctacgatcttctttcaatgcaagggatgcacaggttgatgaccttggcgtgctcctggaatgggaatcacaataccttggagctctcagcctcccacaaagcagccgatcccagctgagtattcgtccaaccgcaattgctccatccaatcttgaagagatgtatgcttcagacatggctatgtcgccaagattctccaatgatcaagttcactcagtctactcaccagcacacaaatctgcacttctaaacaagtttcatcatcagcaaaagggccttctgtcgcctgtcaatactaacaggatatactcgcctaggggtcttgatccatcagttctccattctccatttggtggtatgtgtcctcggtcccctcggactatggagccagcatctcccttaactgtctgtgtcggggctactgctacacagcgtgatatgttggatcagttctcttccctgaacaagcatcaggtgccatctgcgggatcgccacggaatcttaatgtctcatggggcaacattggtaccccaaaaagtaaggtggattggggtgttgacaaagatgaactagtccgcttgaggcaccctgtgcaacctggaaatacagaagaggagccagatgtgtcttgggtgcagtcaatggtgaaccatgctgagctgagtggcaagaggggtgaaatggcaggcatggcttctcgaccaactaataggcctgaactgagcagtcaggatgactcactggatgagagtgttattgcttcttggcttgagcagcagatgcacttggagccgaagtaactgtgaaagaggtcttttgctctcaaggaaagcagtcgctcacagattggtagctgaaagcagctgtcaagaattggtaaacagcctcgttaccttggaggtcctaactagtattcttttgattagttcagatgaggtaaaattcatatattccaccgtgagagtcaatagtatctgtgttggtctctgtaacaagagaggttatagatatttttttttccatttatcattgaacgatttcatgaatacattgataattcccatttattcttctgaatacattttccaatgtttttcctattttctgcc

SEQ ID NO: 22593 - DNA, 2606 bp, Zea Mays
cagcgagtcctcccttgctccgtcctcctcgtccctgccgttccccaaacccaaagcagagcagcctcggcttctcttatccggagaggagggcggccgccggcgtcgaccttcgcgaggaaggagaggaggccgttggatctcgctggattcgattgggctaggacgggatctccgcgggcagatgcgctgagctcttggcgtgtgcagtgcacgatggtcgatcttgctgatctcgagggtgcgggcgaggcggcgcgctcgcatcccgccgcttccggccagcgggacaggctggcggcgctgctggagctcgctgcggcggacgacgccgcggggttccgcgaggcgctcgcgggaggaggcggccagggcgacgcagcggagctggcggacggggtcgggctgtggtacggccgaagcaaggcgtacgagccgcgcacgccgctgatggttgcggcgacgtacggcagcgtcgaagtggtgtcgttgctgctcggcctcggatgcgtcgacgtcaaccggcgccccggcgtcgacggcgccaccccgctgcactgcgccgcttccggcggctcgcgaaacgccgtggccgtggtcaagctgctcctggctgccggtgcctgcccggtaacccccgactccgccggtcgcttgcctgccgacgtcatcttgcctcctgcttcgcccgacgccttgggcgatctggatatgctccttggccgccgccgagggctcgctgtcgcgacctcggtaccatcgctctcgtcgtccccgccgctctcgacctcgccggatgaaggtaacaggtcgccatcctcgcggtcgtcttcgttgtcaccgattaccgtggaccgcgccaagaaggagtacccggtggatccgacgctgcccgacatcaaaagcagcgtgtatgcctcggacgaattccgcatgttcgcgttcaaggtgcggccgtgctctagggcctactcgcatgactggacagagtgtccgttcgtgcaccctgccccaacttccgccgccctggaggttgtcccagtggtgatagctgcgagttctcccatggtgttttcgagagctggctccacccatcgcagtaccgcacaaggccctgcaaggagggcgcagcttgtgcccgccgcatctgcttcttcgcccatgatgaagatgagctccgccatgtgcctcacaatagtggtgcaggcctgctgtctccccgagcctcttcatccattgacatgaccgctgctgctgctgctcttgggcttctacctggatctcctaccagacactttgtgccaccacctctgtcaccatctgccgccaacaatggtggaggtgctgctgctcattggcttcaaggtagcaggctacgatcttctttcaatgcaagggatgcacaggttgatgaccttggcgtgctcctggaatgggaatcacaataccttggagctctcagcctcccacaaagcagccgatcccagctgagtattcgtccaaccgcaattgctccatccaatcttgaagagatgtatgcttcagacatggctatgtcgccaagattctccaatgatcaagttcactcagtctactcaccagcacacaaatctgcacttctaaacaagtttcatcatcagcaaaagggccttctgtcgcctgtcaatactaacaggatatactcgcctaggggtcttgatccatcagttctccattctccatttggtggtatgtgtcctcggtcccctcggactatggagccagcatctcccttaactgtctgtgtcggggctactgctacacagcgtgatatgttggatcagttctcttccctgaacaagcatcaggtgccatctgcgggatcgccacggaatcttaatgtctcatggggcaacattggtaccccaaaaagtaaggtggattggggtgttgacaaagatgaactagtccgcttgaggcaccctgtgcaacctggaaatacagaagaggagccagatgtgtcttgggtgcagtcaatggtgaaccatgctgagctgagtggcaagaggggtgaaatggcaggcatggcttctcgaccaactaataggcctgaactgagcagtcaggatgactcactggatgagagtgttattgcttcttggcttgagcagcagatgcacttggagccgaagtaactgtgaaagaggtcttttgctctcaaggtggatgaaaccatctttttgccgggttagtttcctagaagaatatttgtcctagtaaataataatattccttttgtattcttgaatttttttgttcgcgaagtcagagatggtggttttcaggaaagcagtcgctcacagattggtagctgaaagcagctgtcaagaattggtaaacagcctcgttaccttggaggtcctaactagtattcttttgattagttcagatgaggtaaaattcatatattccaccgtgagagtcaatagtatctgtgttggtctctgtaacaagagaggttatagatatttttttttccatttatcattgaacgatttcatgaatacattgataattcccatttattcttctgaatacattttccaatgtttttcctattttctgcc

SEQ ID NO: 22594 - DNA, 4811 bp, Zea Mays
ccaagtgtcagcagcggacctgtggactgtgatgtcgcgagcgcgcgcgtgtgtggataacgattttgaccgatctaaacgggccaaatggatctatcaggtctttgacccacattatttcaagtaagttattaatgggcaggaatatggcccaaacaaaaatcagagtccacaagggcctatgaagactagatccacagtcagagtcaccaccagattcgcgtgtagggaaagctagcggatcgctcgacggaatccggaaggcggaagccaccgaggcgagcggcgagcgcacgcaccggcacaagcaccacaccgccgctaccgactcgaccatcactcacccaattcgtggaggtgagagatggcggcgtcgggatcgggaggcaacgagcccagcggacggccctggactgcaaccagcacgtggacccccggtcccgccggcggggccgtggcggacgctgtctcgtttgagacctccgacgacgacgcggaggcgtcaccggcgggcgtcgtgctctgccacccgtcggccgactcggaccgcgacatgactccctgcccctgcgaggtcactggggaaagtatgagattcacagggtatatgtgcgaagcacggctcggatatatgaactataccactctcctgatgcaaagggtaccagcaaggattatctatgcactgtgcgttgtggacttgctgttaaagaaacacagtgctgtggtgaagaaagtatgtcacagtggactggcagtgctttaaacagtgacaagcgtgaacatgaggcaaaaagtgtaagcagtgcaagtgatgaagatagttgggttgatgtcaagattccagaatctcctgcaggaaataaaacaccagaatctcaagaaaggagtgtgattcgaacctgccgagaaaatactctgccacactatgaagctactgctgagatgactgatgtgaacccatgtgtatctcttactgtacgtcttctatcacttcagtcgaagacatccgtgcacattgaggaaatctacatatttgctgatcctgttgagcccaccgatgatgtttcagtaagaggtcctgtaaacatgggaggtagttctttgctggcaatgcttgttcctggccttatgcaaatgtctaaatcaaggaatttgaaaatcgatgacagttatttttctgacggatcaaggaatcaagaaagcagcaaatgtgaaagctttacacaggaagcagggccatgtagcacaaatgattcaaaacatacgtctgcaggaatagaaaatggaatgaactctacagtcggtgtttcagcatctgatgataaaagcagccaaggtgaattccatttcaaggacccagattctcttccactccctgtacaaacattagaaagtacacaagcgccttcagtgaagaaccagcatgaattaaacacaggttatcttgctaatcccatcatgagtgaaaaccttactccttctaatcatattgagagaaagctggacactctgctttcgaaggtagagaatatggaattattttgctctaggtttgaggacagcatgataaagccccttggtagcattgaggcaaggcttcagcgactggaggaacagtttagttcgttcgctgttgatattcagtctttgagagattattctgcatttaggtcagcaccagatggtatgcctaatacaaagagctcacaggaggaagcacataatgatgctaatgatagaagtacttctacatctgacaggaagccaggtttagttgtcagggcgccagattttgtgtcagatgattcatgtggttgtaatgtgataactaatggaagccgtgttaattgtcatgggcctaatgtggtgccaagaatacttgtgaaggcccctgattttatttcccaacctgagttaacggatgaaaacctccatgacggacatgctctatcttctgaaaaggagtgtaagacttccccaggtttagttgtcaaggttcctgaactcccagatgatgatgatgatgatggagtcgaagataagaaacaggcagaagtttgtggtgatggtgatgatcacacaaggtctgatgatactctaaggaaaagcacagctggcaacaccaagagcaaaaaatctgtatctatcaatggcgcgttggcatccgcattggaggcattactcacttctaccataggaacatcatattcaaaacctactatttgtgctaccagtaatttaagtgctgaaaatattaatggtttcttcagttgctccccttgtcctgaaaaaactggcgagatgtccactaaagatggttcagctgtccaaattctgggtacatctggtgatccaaatttggtcggtgccttcatatcttctcaggaaattgatacagctccacataattctctctcaaaggaaatgttggatagcaaggttgagataaatgaacagaactgtgacatcaatacagaaaatgtggcatttgttgcaatcacagaaccattggatgttccctcacaggctgatacagttgaggaatctattaatgatggaagttgggtgaatagacaaaactatggttctaatttgaatgcaatgccttatgccatgaacgttgaacctttggatcctcctaagcctcctacagtttctgaacctgttgatagtggagttcaggtgaatgaagatagaccttccatatccttggtggagtttcttgcagcaaggaatgctagctcttgtaagaatggtacttctgaggtatgccttggtaatgttgccgctgaaaaactgtcttttgagagaacatcggctggagctggtaaaaactcgaaaaatatcagtcagcttctagtgaagaaagctcttgaggttgatgcggacaagatattttttttgtttagtgtacccattgggccaaaatttgaaggatcaagcagtcccacccccagaactagtgggcacaatattaataatacagaagaagctgtctcagataaggaatgtggcgtgaaggataccaagaatggatttaggccctctttggggatggactctatattttctcagtaccatgctacagattctaagaaaaatttgagtgagaacagcagttcggaccggattctagatgagagtttctcaaaacagaatggagaacaatctcggtcaagtctgagtagtatggtgtcatttagtggagcatctgccacagaacccgttgttccagggagtggcacatcggaaaattacgtggaagatcttacaggcgttagagatcgtcctgttgcaacactaaattctggggaagagctccaaaaggtctgtgatttactttatgagtttaaggatgaaatgttgagggcctccgtagcgaagtgtacaaataagagcagcccgtcacttgaagctttgcttgctgaatcatctgattctgaagcgcaaatctctgatctggagggtactgacagtggtgctggcattggctccggtcgactgtttagtacactctcatcttcagatgacgatgatgcttctgctgcggacgagcctttagttgatgttgctgacctgactacgccaccagagcgatatacttctgtccccagcgacgagcctctggttgacatagctgacctgacaaacccttcagggatagatgcttcttcagtgaatgagcctccggctgatgtggttgatctgctacatacttcaaacgagcctttggtcagtttggatggtctgccaaaccatccagagatgtgttttggtgggagcagtggagaacataccgacagtcttatttaaaggataaggccatgcggtactgatagttcagagatgagcggaacatataagtccatgcggctgatgtgaacgacagtctcatataagtgtgttccaagttatgcataagtttttgtacgtaaataagcctttgtgtctgcatcagtttatactaaatactatgaaagcagagtaactttggttttgggttgctattctcccgtttatgtaaatccattacaactaacactttgccgatataactttttactgttgcacgttctttttcaagttctgagcattgcaggagaaagcaaagttactacttaccagacgcgcctatattggtaccatttcagtttgaagtgatgtcacattgtcaccagacctgagttacaatcatgatgaacaacatctagaccagaccagacaaggtatggcataacttcactgcgtgctttattagtatgtacagtaatttattgcagtaaactcgtgtcatttaaccgctggcctctgacagtgacaggttaagctcggaacatgctgtgttcttttactttcgatggaacacgccatgttccttccataagtaagcgaacagaagaacaggcggcgctctgttcacatgtgagcatgactgccacctgctgcgcgcctgcgctccgtgtatagaacacgggctagccctggtcctggcgaagtcgtcccgccattaatacgagacacggcccggcccggcccgtgcggcccattagtgggtccgactccgtcttcgctctgtctaggttcaaggaataggttataggaatccatggattcgcattcgcatccccgcgagatcacaaacacaaagagacacaagagaaacaatagtggataaacttttctcttgttatttagtatgagaaggtagatgcttatgatatacaaaagtagagccacttatggatatgtttgatattgtgcacttaaccatcgtatggtttcttaatattataccattttgtcttctc

SEQ ID NO: 22595 - DNA, 4575 bp, Zea Mays
ccaagtgtcagcagcggacctgtggactgtgatgtcgcgagcgcgcgcgtgtgtggataacgattttgaccgatctaaacgggccaaatggatctatcaggtctttgacccacattatttcaagtaagttattaatgggcaggaatatggcccaaacaaaaatcagagtccacaagggcctatgaagactagatccacagtcagagtcaccaccagattcgcgtgtagggaaagctagcggatcgctcgacggaatccggaaggcggaagccaccgaggcgagcggcgagcgcacgcaccggcacaagcaccacaccgccgctaccgactcgaccatcactcacccaattcgtggaggtgagagatggcggcgtcgggatcgggaggcaacgagcccagcggacggccctggactgcaaccagcacgtggacccccggtcccgccggcggggccgtggcggacgctgtctcgtttgagacctccgacgacgacgcggaggcgtcaccggcgggcgtcgtgctctgccacccgtcggccgactcggaccgcgacatgactccctgcccctgcgaggtcactgttagtttcaggggaaagtatgagattcacagggtatatgtgcgaagcacggctcggatatatgaactataccactctcctgatgcaaagggtaccagcaaggattatctatgcactgtgcgttgtggacttgctgttaaagaaacacagtgctgtggtgaagaaagtatgtcacagtggactggcagtgctttaaacagtgacaagcgtgaacatgaggcaaaaagtgtaagcagtgcaagtgatgaagatagttgggttgatgtcaagattccagaatctcctgcaggaaataaaacaccagaatctcaagaaaggagtgtgattcgaacctgccgagaaaatactctgccacactatgaagctactgctgagatgactgatgtgaacccatgtgtatctcttactgtacgtcttctatcacttcagtcgaagacatccgtgcacattgaggaaatctacatatttgctgatcctgttgagcccaccgatgatgtttcagtaagaggtcctgtaaacatgggaggtagttctttgctggcaatgcttgttcctggccttatgcaaatgtctaaatcaaggaatttgaaaatcgatgacagttatttttctgacggatcaaggaatcaagaaagcagcaaatgtgaaagctttacacaggaagcagggccatgtagcacaaatgattcaaaacatacgtctgcaggaatagaaaatggaatgaactctacagtcggtgtttcagcatctgatgataaaagcagccaaggtgaattccatttcaaggacccagattctcttccactccctgtacaaacattagaaagtacacaagcgccttcagtgaagaaccagcatgaattaaacacaggttatcttgctaatcccatcatgagtgaaaaccttactccttctaatcatattgagagaaagctggacactctgctttcgaaggtagagaatatggaattattttgctctaggtttgaggacagcatgataaagccccttggtagcattgaggcaaggcttcagcgactggaggaacagtttagttcgttcgctgttgatattcagtctttgagagattattctgcatttaggtcagcaccagatggtatgcctaatacaaagagctcacaggaggaagcacataatgatgctaatgatagaagtacttctacatctgacaggaagccaggtttagttgtcagggcgccagattttgtgtcagatgattcatgtggttgtaatgtgataactaatggaagccgtgttaattgtcatgggcctaatgtggtgccaagaatacttgtgaaggcccctgattttatttcccaacctgagttaacggatgaaaacctccatgacggacatgctctatcttctgaaaaggagtgtaagacttccccaggtttagttgtcaaggttcctgaactcccagatgatgatgatgatgatggagtcgaagataagaaacaggcagaagtttgtggtgatggtgatgatcacacaaggtctgatgatactctaaggaaaagcacagctggcaacaccaagagcaaaaaatctgtatctatcaatggcgcgttggcatccgcattggaggcattactcacttctaccataggaacatcatattcaaaacctactatttgtgctaccagtaatttaagtgctgaaaatattaatggtttcttcagttgctccccttgtcctgaaaaaactggcgagatgtccactaaagatggttcagctgtccaaattctgggtacatctggtgatccaaatttggtcggtgccttcatatcttctcaggaaattgatacagctccacataattctctctcaaaggaaatgttggatagcaaggttgagataaatgaacagaactgtgacatcaatacagaaaatgtggcatttgttgcaatcacagaaccattggatgttccctcacaggctgatacagttgaggaatctattaatgatggaagttgggtgaatagacaaaactatggttctaatttgaatgcaatgccttatgccatgaacgttgaacctttggatcctcctaagcctcctacagtttctgaacctgttgatagtggagttcaggtgaatgaagatagaccttccatatccttggtggagtttcttgcagcaaggaatgctagctcttgtaagaatggtacttctgaggtatgccttggtaatgttgccgctgaaaaactgtcttttgagagaacatcggctggagctggtaaaaactcgaaaaatatcagtcagcttctagtgaagaaagctcttgaggttgatgcggacaagatattttttttgtttagtgtacccattgggccaaaatttgaaggatcaagcagtcccacccccagaactagtgggcacaatattaataatacagaagaagctgtctcagataaggaatgtggcgtgaaggataccaagaatggatttaggccctctttggggatggactctatattttctcagtaccatgctacagattctaagaaaaatttgagtgagaacagcagttcggaccggattctagatgagagtttctcaaaacagaatggagaacaatctcggtcaagtctgagtagtatggtgtcatttagtggagcatctgccacagaacccgttgttccagggagtggcacatcggaaaattacgtggaagatcttacaggcgttagagatcgtcctgttgcaacactaaattctggggaagagctccaaaaggtctgtgatttactttatgagtttaaggatgaaatgttgagggcctccgtagcgaagtgtacaaataagagcagcccgtcacttgaagctttgcttgctgaatcatctgattctgaagcgcaaatctctgatctggagggtactgacagtggtgctggcattggctccggtcgactgtttagtacactctcatcttcagatgacgatgatgcttctgctgcggacgagcctttagttgatgttgctgacctgactacgccaccagagcgatatacttctgtccccagcgacgagcctctggttgacatagctgacctgacaaacccttcagggatagatgcttcttcagtgaatgagcctccggctgatgtggttgatctgctacatacttcaaacgagcctttggtcagtttggatggtctgccaaaccatccagagatgtgttttggtgggagcagtggagaacataccgacagtcttatttaaaggataaggccatgcggtactgatagttcagagatgagcggaacatataagtccatgcggctgatgtgaacgacagtctcatataagtgtgttccaagttatgcataagtttttttctgagcattgcaggagaaagcaaagttactacttaccagacgcgcctatattggtaccatttcagtttgaagtgatgtcacattgtcaccagacctgagttacaatcatgatgaacaacatctagaccagaccagacaagtgacaggttaagctcggaacatgctgtgttcttttactttcgatggaacacgccatgttccttccataagtaagcgaacagaagaacaggcggcgctctgttcacatgtgagcatgactgccacctgctgcgcgcctgcgctccgtgtatagaacacgggctagccctggtcctggcgaagtcgtcccgccattaatacgagacacggcccggcccggcccgtgcggcccattagtgggtccgactccgtcttcgctctgtctaggttcaaggaataggttataggaatccatggattcgcattcgcatccccgcgagatcacaaacacaaagagacacaagagaaacaatagtggataaacttttctcttgttatttagtatgagaaggtagatgcttatgatatacaaaagtagagccacttatggatatgtttgatattgtgcacttaaccatcgtatggtttcttaatattataccattttgtcttctc

SEQ ID NO: 22596 - DNA, 4541 bp, Zea Mays
ccaagtgtcagcagcggacctgtggactgtgatgtcgcgagcgcgcgcgtgtgtggataacgattttgaccgatctaaacgggccaaatggatctatcaggtctttgacccacattatttcaagtaagttattaatgggcaggaatatggcccaaacaaaaatcagagtccacaagggcctatgaagactagatccacagtcagagtcaccaccagattcgcgtgtagggaaagctagcggatcgctcgacggaatccggaaggcggaagccaccgaggcgagcggcgagcgcacgcaccggcacaagcaccacaccgccgctaccgactcgaccatcactcacccaattcgtggaggtgagagatggcggcgtcgggatcgggaggcaacgagcccagcggacggccctggactgcaaccagcacgtggacccccggtcccgccggcggggccgtggcggacgctgtctcgtttgagacctccgacgacgacgcggaggcgtcaccggcgggcgtcgtgctctgccacccgtcggccgactcggaccgcgacatgactccctgcccctgcgaggtcactgttagtttcaggggaaagtatgagattcacagggtatatgtgcgaagcacggctcggatatatgaactataccactctcctgatgcaaagggtaccagcaaggattatctatgcactgtgcgttgtggacttgctgttaaagaaacacagtgctgtggtgaagaaagtatgtcacagtggactggcagtgctttaaacagtgacaagcgtgaacatgaggcaaaaagtgtaagcagtgcaagtgatgaagatagttgggttgatgtcaagattccagaatctcctgcaggaaataaaacaccagaatctcaagaaaggagtgtgattcgaacctgccgagaaaatactctgccacactatgaagctactgctgagatgactgatgtgaacccatgtgtatctcttactgtacgtcttctatcacttcagtcgaagacatccgtgcacattgaggaaatctacatatttgctgatcctgttgagcccaccgatgatgtttcagtaagaggtcctgtaaacatgggaggtagttctttgctggcaatgcttgttcctggccttatgcaaatgtctaaatcaaggaatttgaaaatcgatgacagttatttttctgacggatcaaggaatcaagaaagcagcaaatgtgaaagctttacacaggaagcagggccatgtagcacaaatgattcaaaacatacgtctgcaggaatagaaaatggaatgaactctacagtcggtgtttcagcatctgatgataaaagcagccaaggtgaattccatttcaaggacccagattctcttccactccctgtacaaacattagaaagtacacaagcgccttcagtgaagaaccagcatgaattaaacacaggttatcttgctaatcccatcatgagtgaaaaccttactccttctaatcatattgagagaaagctggacactctgctttcgaaggtagagaatatggaattattttgctctaggtttgaggacagcatgataaagccccttggtagcattgaggcaaggcttcagcgactggaggaacagtttagttcgttcgctgttgatattcagtctttgagagattattctgcatttaggtcagcaccagatggtatgcctaatacaaagagctcacaggaggaagcacataatgatgctaatgatagaagtacttctacatctgacaggaagccaggtttagttgtcagggcgccagattttgtgtcagatgattcatgtggttgtaatgtgataactaatggaagccgtgttaattgtcatgggcctaatgtggtgccaagaatacttgtgaaggcccctgattttatttcccaacctgagttaacggatgaaaacctccatgacggacatgctctatcttctgaaaaggagtgtaagacttccccaggtttagttgtcaaggttcctgaactcccagatgatgatgatgatgatggagtcgaagataagaaacaggcagaagtttgtggtgatggtgatgatcacacaaggtctgatgatactctaaggaaaagcacagctggcaacaccaagagcaaaaaatctgtatctatcaatggcgcgttggcatccgcattggaggcattactcacttctaccataggaacatcatattcaaaacctactatttgtgctaccagtaatttaagtgctgaaaatattaatggtttcttcagttgctccccttgtcctgaaaaaactggcgagatgtccactaaagatggttcagctgtccaaattctgggtacatctggtgatccaaatttggtcggtgccttcatatcttctcaggaaattgatacagctccacataattctctctcaaaggaaatgttggatagcaaggttgagataaatgaacagaactgtgacatcaatacagaaaatgtggcatttgttgcaatcacagaaccattggatgttccctcacaggctgatacagttgaggaatctattaatgatggaagttgggtgaatagacaaaactatggttctaatttgaatgcaatgccttatgccatgaacgttgaacctttggatcctcctaagcctcctacagtttctgaacctgttgatagtggagttcaggtgaatgaagatagaccttccatatccttggtggagtttcttgcagcaaggaatgctagctcttgtaagaatggtacttctgaggtatgccttggtaatgttgccgctgaaaaactgtcttttgagagaacatcggctggagctggtaaaaactcgaaaaatatcagtcagcttctagtgaagaaagctcttgaggttgatgcggacaagatattttttttgtttagtgtacccattgggccaaaatttgaaggatcaagcagtcccacccccagaactagtgggcacaatattaataatacagaagaagctgtctcagataaggaatgtggcgtgaaggataccaagaatggatttaggccctctttggggatggactctatattttctcagtaccatgctacagattctaagaaaaatttgagtgagaacagcagttcggaccggattctagatgagagtttctcaaaacagaatggagaacaatctcggtcaagtctgagtagtatggtgtcatttagtggagcatctgccacagaacccgttgttccagggagtggcacatcggaaaattacgtggaagatcttacaggcgttagagatcgtcctgttgcaacactaaattctggggaagagctccaaaaggtctgtgatttactttatgagtttaaggatgaaatgttgagggcctccgtagcgaagtgtacaaataagagcagcccgtcacttgaagctttgcttgctgaatcatctgattctgaagcgcaaatctctgatctggagggtactgacagtggtgctggcattggctccggtcgactgtttagtacactctcatcttcagatgacgatgatgcttctgctgcggacgagcctttagttgatgttgctgacctgactacgccaccagagcgatatacttctgtccccagcgacgagcctctggttgacatagctgacctgacaaacccttcagggatagatgcttcttcagtgaatgagcctccggctgatgtggttgatctgctacatacttcaaacgagcctttggtcagtttggatggtctgccaaaccatccagagatgtgttttggtgggagcagtggagaacataccgacagtcttatttaaaggataaggccatgcggtactgatagttcagagatgagcggaacatataagtccatgcggctgatgtgaacgacagtctcatataattctgagcattgcaggagaaagcaaagttactacttaccagacgcgcctatattggtaccatttcagtttgaagtgatgtcacattgtcaccagacctgagttacaatcatgatgaacaacatctagaccagaccagacaaggttaagctcggaacatgctgtgttcttttactttcgatggaacacgccatgttccttccataagtaagcgaacagaagaacaggcggcgctctgttcacatgtgagcatgactgccacctgctgcgcgcctgcgctccgtgtatagaacacgggctagccctggtcctggcgaagtcgtcccgccattaatacgagacacggcccggcccggcccgtgcggcccattagtgggtccgactccgtcttcgctctgtctaggttcaaggaataggttataggaatccatggattcgcattcgcatccccgcgagatcacaaacacaaagagacacaagagaaacaatagtggataaacttttctcttgttatttagtatgagaaggtagatgcttatgatatacaaaagtagagccacttatggatatgtttgatattgtgcacttaaccatcgtatggtttcttaatattataccattttgtcttctc

SEQ ID NO: 22597 - DNA, 1984 bp, Zea Mays
ccaagtgtcagcagcggacctgtggactgtgatgtcgcgagcgcgcgcgtgtgtggataacgattttgaccgatctaaacgggccaaatggatctatcaggtctttgacccacattatttcaagtaagttattaatgggcaggaatatggcccaaacaaaaatcagagtccacaagggcctatgaagactagatccacagtcagagtcaccaccagattcgcgtgtagggaaagctagcggatcgctcgacggaatccggaaggcggaagccaccgaggcgagcggcgagcgcacgcaccggcacaagcaccacaccgccgctaccgactcgaccatcactcacccaattcgtggaggtgagagatggcggcgtcgggatcgggaggcaacgagcccagcggacggccctggactgcaaccagcacgtggacccccggtcccgccggcggggccgtggcggacgctgtctcgtttgagacctccgacgacgacgcggaggcgtcaccggcgggcgtcgtgctctgccacccgtcggccgactcggaccgcgacatgactccctgcccctgcgaggtcactgttagtttcaggggaaagtatgagattcacagggtatatgtgcgaagcacggctcggatatatgaactataccactctcctgatgcaaagggtaccagcaaggattatctatgcactgtgcgttgtggacttgctgttaaagaaacacagtgctgtggtgaagaaagtatgtcacagtggactggcagtgctttaaacagtgacaagcgtgaacatgaggcaaaaagtgtaagcagtgcaagtgatgaagatagttgggttgatgtcaagattccagaatctcctgcaggaaataaaacaccagaatctcaagaaaggagtgtgattcgaacctgccgagaaaatactctgccacactatgaagctactgctgagatgactgatgtgaacccatgtgtatctcttactgtacgtcttctatcacttcagtcgaagacatccgtgcacattgaggaaatctacatatttgctgatcctgttgagcccaccgatgatgtttcagtaagaggtcctgtaaacatgggaggtagttctttgctggcaatgcttgttcctggccttatgcaaatgtctaaatcaaggaatttgaaaatcgatgacagttatttttctgacggatcaaggaatcaagaaagcagcaaatgtgaaagctttacacaggaagcagggccatgtagcacaaatgattcaaaacatacgtctgcaggaatagaaaatggaatgaactctacagtcggtgtttcagcatctgatgataaaagcagccaagttctgagcattgcaggagaaagcaaagttactacttaccagacgcgcctatattggtaccatttcagtttgaagtgatgtcacattgtcaccagacctgagttacaatcatgatgaacaacatctagaccagaccagacaagtgacaggttaagctcggaacatgctgtgttcttttactttcgatggaacacgccatgttccttccataagtaagcgaacagaagaacaggcggcgctctgttcacatgtgagcatgactgccacctgctgcgcgcctgcgctccgtgtatagaacacgggctagccctggtcctggcgaagtcgtcccgccattaatacgagacacggcccggcccggcccgtgcggcccattagtgggtccgactccgtcttcgctctgtctaggttcaaggaataggttataggaatccatggattcgcattcgcatccccgcgagatcacaaacacaaagagacacaagagaaacaatagtggataaacttttctcttgttatttagtatgagaaggtagatgcttatgatatacaaaagtagagccacttatggatatgtttgatattgtgcacttaaccatcgtatggtttcttaatattataccattttgtcttctc

SEQ ID NO: 22598 - DNA, 1817 bp, Zea Mays
cgagtccccactcccacgtgcacctcgccgccatttagcgtgcccccggtcgtctgctccgcgccctaggtttctctcttcgtttcctcctcatcgaatcggagcttcgcatagtgtccctcgtcgccgccggcgccggcgccggcagccatgtccatgctccttatacagaaacaacccctccctctctccgttcgtccccgcacgactctccgccagtgccgtctccccacgactcgattctccgccgccgccgccgactcggctagccgcgctgcccccttcgccgtcgaggactacctcgtcgccgcatgccacctaaccccggcgcaggcgctcaaggcctccaaggtgctctcgcacctcaagtcaccctcccgacccgacgccgtgctagccttcctctcgggcctcggtctctccgacgccgacatcgccgccgccgtcgcctacgaccccaagcttctctgctccgaggtcgagcgcacgctggccccgcgtctcgcggagctccgggatctcggcctctctccgtctcagatcgcccgcctcgcactcgtcgaccccgcgcgcttccgccgccccaccgtcgtctccaagctgcagtattatgtccccctcttcggttccttcgagaacctgctccaggctctcaggaacaacgcctaccttctcagctcggacctcgagcgcgttgtgaagcccaacgtcgcgttcctggtggagtgcgggctagatgcttgtgatattgccaagctgtccatacccgtccctaggttgatcaccaccaacccagaacgcgtccgggcaatggtggagcgagctgaagctgtcggtgtgcctcgtggcactgggatgtttaggcacgcactgctggctgttgcattcctcagcgaggaaaagatcaaagctaaggcagagtttttgaagacaacatttcggtggtcggatgctgaggtgggcgttgcggtttccaagctgccattggtgctcaagcactccaaggacaggctgcgccgcatgtcagagttcctgatcaccaaggaccggagctactatactgctgtccagatgagtgagagtgccttcatggataagttcatatgcccctacaaggaagctgcaccaagcctcgccctagattatgctgctgcttgcagaggagaggggaaaactggaagccattttgaaccaaagacgattcagaaataagactgtctgggagattaatccactctggacttcacaaaagcacttgttatcggaaagttttgtattggattatcttaaagttggccaaacctgctacctacaacaaggctctttcggtgaaattctgaaagcaaattggcgaggaacacccattgctgtcaaacgcattcttccatccttatctgatgacaggctggtgatgcgcaggccaatgcagaaagtgttcactctgaagacgccccaacttgttcatacagtagtgtactttcagttattttgtttttgttattggtttgtatgaatgctgtagttggtttcatgtttggatatgcttgtatgattattaatctggaaatggtacaaacaattcagatgaacatttttagtgtacgaaaatatggtttaatttgtttatatgcctatatatttgatgccttgtctttgcctgcatagcatttctagcatatagttttttgttcatcagaagcttggctcacttactggtatgactgattgttctctgcctacaacaagtttcactttgatatactatgcttgttggctcttattatcattttaccgtggtcttggagctgaatattatc

SEQ ID NO: 22599 - DNA, 1979 bp, Zea Mays
ctcgccgccatttagcgtgcccccggtcgtctgctccgcgccctaggtttctctcttcgtttcctcctcatcgaatcggagcttcgcatagtgtccctcgtcgccgccggcgccggcgccggcagccatgtccatgctccttatacagaaacaacccctccctctctccgttcgtccccgcacgactctccgccagtgccgtctccccacgactcgattctccgccgccgccgccgactcggctagccgcgctgcccccttcgccgtcgaggactacctcgtcgccgcatgccacctaaccccggcgcaggcgctcaaggcctccaaggtgctctcgcacctcaagtcaccctcccgacccgacgccgtgctagccttcctctcgggcctcggtctctccgacgccgacatcgccgccgccgtcgcctacgaccccaagcttctctgctccgaggtcgagcgcacgctggccccgcgtctcgcggagctccgggatctcggcctctctccgtctcagatcgcccgcctcgcactcgtcgaccccgcgcgcttccgccgccccaccgtcgtctccaagctgcagtattatgtccccctcttcggttccttcgagaacctgctccaggctctcaggaacaacgcctaccttctcagctcggacctcgagcgcgttgtgaagcccaacgtcgcgttcctggtggagtgcgggctagatgcttgtgatattgccaagctgtccatacccgtccctaggttgatcaccaccaacccagaacgcgtccgggcaatggtggagcgagctgaagctgtcggtgtgcctcgtggcactgggatgtttaggcacgcactgctggctgttgcattcctcagcgaggaaaagatcaaagctaaggcagagtttttgaagacaacatttcggtggtcggatgctgaggtgggcgttgcggtttccaagctgccattggtgctcaagcactccaaggacaggctgcgccgcatgtcagagttcctgatcaccaaggttgggttggagccagagtacattgctcacaggcctgctctgcttacatatagcttggaacgccgcctcatgccccgacactatgttgtgaattacctgaaggaaaatggattgttggagcaggaccggagctactatactgctgtccagatgagtgagagtgccttcatggataagttcatatgcccctacaaggaagctgcaccaagcctcgccctagattatgctgctgcttgcagaggagaggttgatgcatcatatgaccattcccatctccttggattttattccccctttttaccgtgtaggggaaaactggaagccattttgaaccaaagacgattcagaaataagactgtctgggagattaatccactctggacttcacaaaagcacttgttatcggaaagttttgtattggattatcttaaagttggccaaacctgctacctacaacaaggctctttcggtgaaattctgaaagcaaattggcgaggaacacccattgctgtcaaacgcattcttccatccttatctgatgacaggctggtgatgcgcaggccaatgcagaaagtgttcactctgaagacgccccaacttgttcatacagtagtgtactttcagttattttgtttttgttattggtttgtatgaatgctgtagttggtttcatgtttggatatgcttgtatgattattaatctggaaatggtacaaacaattcagatgaacatttttagtgtacgaaaatatggtttaatttgtttatatgcctatatatttgatgccttgtctttgcctgcatagcatttctagcatatagttttttgttcatcagaagcttggctcacttactggtatgactgattgttctctgcctacaacaagtttcactttgatatactatgcttgttggctcttattatcattttaccgtggtcttggagctgaatattatc

SEQ ID NO: 22600 - DNA, 2257 bp, Zea Mays
cgccgccatttagcgtgcccccggtcgtctgctccgcgccctaggtttctctcttcgtttcctcctcatcgaatcggagcttcgcatagtgtccctcgtcgccgccggcgccggcgccggcagccatgtccatgctccttatacagaaacaacccctccctctctccgttcgtccccgcacgactctccgccagtgccgtctccccacgactcgattctccgccgccgccgccgactcggctagccgcgctgcccccttcgccgtcgaggactacctcgtcgccgcatgccacctaaccccggcgcaggcgctcaaggcctccaaggtgctctcgcacctcaagtcaccctcccgacccgacgccgtgctagccttcctctcgggcctcggtctctccgacgccgacatcgccgccgccgtcgcctacgaccccaagcttctctgctccgaggtcgagcgcacgctggccccgcgtctcgcggagctccgggatctcggcctctctccgtctcagatcgcccgcctcgcactcgtcgaccccgcgcgcttccgccgccccaccgtcgtctccaagctgcagtattatgtccccctcttcggttccttcgagaacctgctccaggctctcaggaacaacgcctaccttctcagctcggacctcgagcgcgttgtgaagcccaacgtcgcgttcctggtggagtgcgggctagatgcttgtgatattgccaagctgtccatacccgtccctaggttgatcaccaccaacccagaacgcgtccgggcaatggtggagcgagctgaagctgtcggtgtgcctcgtggcactgggatgtttaggcacgcactgctggctgttgcattcctcagcgaggaaaagatcaaagctaaggcagagtttttgaagacaacatttcggtggtcggatgctgaggtgggcgttgcggtttccaagctgccattggtgctcaagcactccaaggacaggctgcgccgcatgtcagagttcctgatcaccaaggttgggttggagccagagtacattgctcacaggcctgctctgcttacatatagcttggaacgccgcctcatgccccgacactatgttgtgaattacctgaaggaaaatggattgttggagcaggaccggagctactatactgctgtccagatgagtgagagtgccttcatggataagttcatatgcccctacaaggaagctgcaccaagcctcgccctagattatgctgctgcttgcagaggagaggtgcccactaccttcttggcaaatgtttaacccttcagtgtaaagcaatgttttgacacttagcagtgagctggtaattttgtttctttccttgcctaactgctacatcccgcagctgtgtctttagaattggctctggtacataagatgtgagccatggttattaccagggctagatttatctttgctctctgttattcaagctgatcaagtattccaatttcacctgtcactgtatggtatggatttagttggggaaaactggaagccattttgaaccaaagacgattcagaaataagactgtctgggagattaatccactctggacttcacaaaagcacttgttatcggaaaggtttaaagtcttgaaacatctcctacccaatacaattatttgataaagtattagcataatttagtgattttctgtacttcacttttagttttgtattggattatcttaaagttggccaaacctgctacctacaacaaggctctttcggtgaaattctgaaagcaaattggcgaggaacacccattgctgtcaaacgcattcttccatccttatctgatgacaggctggtgatgcgcaggccaatgcagaaagtgttcactctgaagacgccccaacttgttcatacagtagtgtactttcagttattttgtttttgttattggtttgtatgaatgctgtagttggtttcatgtttggatatgcttgtatgattattaatctggaaatggtacaaacaattcagatgaacatttttagtgtacgaaaatatggtttaatttgtttatatgcctatatatttgatgccttgtctttgcctgcatagcatttctagcatatagttttttgttcatcagaagcttggctcacttactggtatgactgattgttctctgcctacaacaagtttcactttgatatactatgcttgttggctcttattatcattttaccgtggtcttggagctgaatattatc

SEQ ID NO: 22601 - DNA, 1813 bp, Zea Mays
cgccgccatttagcgtgcccccggtcgtctgctccgcgccctaggtttctctcttcgtttcctcctcatcgaatcggagcttcgcatagtgtccctcgtcgccgccggcgccggcgccggcagccatgtccatgctccttatacagaaacaacccctccctctctccgttcgtccccgcacgactctccgccagtgccgtctccccacgactcgattctccgccgccgccgccgactcggctagccgcgctgcccccttcgccgtcgaggactacctcgtcgccgcatgccacctaaccccggcgcaggcgctcaaggcctccaaggtgctctcgcacctcaagtcaccctcccgacccgacgccgtgctagccttcctctcgggcctcggtctctccgacgccgacatcgccgccgccgtcgcctacgaccccaagcttctctgctccgaggtcgagcgcacgctggccccgcgtctcgcggagctccgggatctcggcctctctccgtctcagatcgcccgcctcgcactcgtcgaccccgcgcgcttccgccgccccaccgtcgtctccaagctgcagtattatgtccccctcttcggttccttcgagaacctgctccaggctctcaggaacaacgcctaccttctcagctcggacctcgagcgcgttgtgaagcccaacgtcgcgttcctggtggagtgcgggctagatgcttgtgatattgccaagctgtccatacccgtccctaggttgatcaccaccaacccagaacgcgtccgggcaatggtggagcgagctgaagctgtcggtgtgcctcgtggcactgggatgtttaggcacgcactgctggctgttgcattcctcagcgaggaaaagatcaaagctaaggcagagtttttgaagacaacatttcggtggtcggatgctgaggtgggcgttgcggtttccaagctgccattggtgctcaagcactccaaggacaggctgcgccgcatgtcagagttcctgatcaccaaggaaaatggattgttggagcaggaccggagctactatactgctgtccagatgagtgagagtgccttcatggataagttcatatgcccctacaaggaagctgcaccaagcctcgccctagattatgctgctgcttgcagaggagaggggaaaactggaagccattttgaaccaaagacgattcagaaataagactgtctgggagattaatccactctggacttcacaaaagcacttgttatcggaaagttttgtattggattatcttaaagttggccaaacctgctacctacaacaaggctctttcggtgaaattctgaaagcaaattggcgaggaacacccattgctgtcaaacgcattcttccatccttatctgatgacaggctggtgatgcgcaggccaatgcagaaagtgttcactctgaagacgccccaacttgttcatacagtagtgtactttcagttattttgtttttgttattggtttgtatgaatgctgtagttggtttcatgtttggatatgcttgtatgattattaatctggaaatggtacaaacaattcagatgaacatttttagtgtacgaaaatatggtttaatttgtttatatgcctatatatttgatgccttgtctttgcctgcatagcatttctagcatatagttttttgttcatcagaagcttggctcacttactggtatgactgattgttctctgcctacaacaagtttcactttgatatactatgcttgttggctcttattatcattttaccgtggtcttggagctgaatattatc

SEQ ID NO: 22602 - DNA, 1006 bp, Zea Mays
gcgccctcccccgctccccgcgtgactactctcctattgagcaaggagtatatagcgcaagttaattaaagctgagtaggaggaaggaattcagagtgacctgttccaccaggcgtccaagcaacccggccggctgggtggctcgtcgtcgtagaactccttggtggccgggcgcgcggcgaacgatcgcctatttcagctgctgagcgggcggctgatcggcggcgttccacggcttgggttacctaccactaccaacgacggaacggaaccggccgggccggcggcatggcggcgtggatgcggtcgctcttgtcgccgctcaggaagctctggatccgaatgcattcggcgcagaacaagaaggggcggggcatctacatcctgtacgaggacgtcaagtcgtgcccctgcgaggacgtgcacatcctctggtccatcctcgtcgactcgtcccactcccacccgccgccgctgtctctgcgcctcaagcactgactgactcgtccctccctccctgcctccgacgaacgagaccgtcggtgtacatgaagatgacgacgagtggcggcagctcaccttcttcttcagccgccgcgataccatatcgcttccacgcgcgggaagaagttccttttgtttgatgagtaggagattgatgagctccttcgttcaccctgccccgcgcgtcctccggtagatgcagccatgcaggtgcatagcagagcagagcagagcaggcttccctcaccgacaccgccaagggattttttttttcttctttcctttgcttttgtttttggaaaaggaacggcgcggttggtgatccgggacatgccgcgtgtgcctctagctaccatgtaaatacagaaaggtgaagagggggcaaaaaaaacagagaggtgtgtgtatatacggagagtactccactactaatactgtagtacagcgacgtgtgatgcaagctttttaaaaggatccgtcgtcacaagcgtgcttcgcgtgc

SEQ ID NO: 22603 - DNA, 1918 bp, Zea Mays
gacggcgcgggcgcccgtcccctctcagctcgcgacggagccacgacagccagcgacagcgcgtgacggcgcgtgggttgcgcccgcccggcgcttcgcgtggagctcgattgcgactcagtcccagaccgcgatgcagatctcggctgcgacgcggctgccaacggcagcgcgccggcgtccgcgcgcgaggacggtcgtcggctgtcgggcgtgcgtggtgccgtgatctgcgacgaacggcgcgggcgaccgggtctgtgagactgcgacggagtgacgccggccaacgacggcgcgtgggttgcggccggcgcttcgccgttagccagatctgctacgtagcagaagggcaggcacgcgcagatcctctggttgtcctgtcggcctcttctgcagctgttccagggaaacatcatacatgcccagatctatcctccgttgtgccaacagttcagtgcgctgctcgatgagggagggatatacaacttgaagtatttcttagtcaggaaagctaacagattctacaaaccggtagaaaattgcaacatgatcagctttacaaagtggactacggttgaggttgtcctccagatcccccctgcttttccggtttgcacatataacctcactcccatagaccagctgcaaccgcgcatggactacaaggaatatttcactgatgtgctcggtgttgtcagcgtgatctcccaggtttcatcagtacgcacaaggggacgacaggctgaggttatgaagagaacagtcactataagcaatgcaagggataccggtccaaccgttgatgttgtgctttggggcgagcgggccacagctttcccagctgaacaggtccacagggacagtggatcctcaccacagatcataatatttgttggcactctcgtgaggagctacgctgataatgtgtctttgtcgggaggatcgtcatgcaagtggtacataaacgaatcggtcccggaagtaaacgctctcagagctagtgctgaaaccaaccaccaccctgtcatctgggatcagggcaaagcagctgctgagagtacagtaattgcagttcctgaacataagaagctcaaggatattaagtacctccatccttttgaaaataagaagaaggaatggcttgtcatcgtaaaggtgctcaagattgatagctcatggtggtacaacgcatgcaaaaaatgccttaggacaaccaaaccgcacggtgacacatacaagtgcaccaatatttcctgtgacaacataggatcgcctaccccaagaatggcctatgccagtttttgcaagtgtgcttgttttgctgatatagctgaaagaaaagtcgtggaagcaaactatggcaagtcttttcactgcgccctctccccatcaactgcaactcttctggctctaacctatttttttctgcctgctaactccgcaccaggacaaggatcaggtctcacacaaaacaagggggctgccttcatccgcgagccgtcgctgacaccagagagtcacaaagtttcgtctagcgccaagtgtaatttgcagacagccacacatcagggagccaatctgctgctaggaacagaaattattgcttctccgcctaacgtgcagacgccatcaggagctgcttacagtgtgctagatgggtctacaaacaagactcataaaagtgttactggaaaaaggtctcgcacatcgccttccaagaaggttgtcaagaaactttttagagatgatggcacaggagatgacgatgctgctggttccgcagacgttgatgctgagtaacggtatgtccaattctcccctacaacttcatgagatatatgcttccaagtgttccaattgcatgtagtataaggcagtgggtactaggcaaccctaaaccccaatttgcttaatg

SEQ ID NO: 22604 - DNA, 2737 bp, Zea Mays
gtctctctagtactggatcagtccctcttccttttccctctcctcagtccctgtctgctgctgctagacagcacaaactgcggtccggtgcgctctcctcggcggtggagttggagctgcagtgcaggggaagaaccgaagaagcgagctagagccgcaagaatgataggcgccaaggccaacgccgccggcccgtgcccggagtatgcggaggtcgaccccaccggccggtacggacggttcagcgacgttcttggcaagggcgcgtccaagattgtgtaccgggcgttcgacgagtaccaggggatggaggtggcgtggaaccaggtgaagctgcacgacttcctgcagagccccgaggacctggagcggctctactgcgagatccaccttctcaagacgctcaagcaccgcaacatcatgaagttctacacctcctgggtcgacgtctcccgccgcaacatcaacttcatcaccgagatgttcacctccggcaccctccgccagtaccggcagaggcaccggagggtgaacatatgggcggtgaagcactggtgcaggcaaatcctcagcggcctgctgtacctgcatagccacaatccgcccatcatccaccgggacctcaagtgtgacaacatcttcgtgaacggcaaccagggagaggtcaagattggcgacctcggtctcgccgccatcctccgcaagtcccacgccgtccactgcgtagatgtgtcggatcggttggacaggtacaccggagttcatggcgccggaggtgtacgaggaggagtacaacgagctggtggacatctactcgtttggaatgtgcgtgctcgagatggtaacgtttgagtacccgtacagcgagtgtacacaccctgtgcagatctacaagaaagtgatctctggtactaagccagaatctctgtacaaggtgaaagatccaatggtgaggcacttcgtcgagaagtgcctagcaacggcatctcaaagactgtcagcaagagaactgcttgaggatcccttcctacaaagtgatgacgtggttgcttctttggatggtggaaattaccatgtgccggccaattatatacctcagccttcatatttagggcatacctacagcaatggctccatgatgagtaatggattctcagaaagcattgatgaagatgctctcagtgaagactgcgaggatgatgacatgaaaggccaagatggcattgacctgttcaacgagaatgaaggtgagcttcttggcaatgtggatataacaatcaaagggagaaagagtgaggatggaggcatattccttagattgcggatttctgatgatgatggacgggtacgcaacatctattttccttttgacgttgaggctgataccgcactaagtgttgctactgaaatggtagccgaactcgatataactgaccatgaagttactcggattgctgacatgattgatggtgaggtcagtgcactggtaccagattggaggcctggtccgggcatagaggaggctcctgacacttcatactgccacgattgtggatccatcgtgtcatcgtgtggttcactttacgcctacatgtcatcaggccgtcgaggttgccaatgtgcagaggtacatgggcggtttgaggagatcacgttcgaagctgatggagagcagtgtgatttgcaggaatctgcaggcagctctgatgatggaggtggcccaacagagcactatgtcaaaggcaaggagtccactcatgtgaatggccttctacagatgggtagaagagatctttctaatcagctttgcttcagttcattccaagagcaatcatgttcatctaaccattatgagaacgaaactaaccatcacacaaatgggttcgacatgaagcatgaggtaaagattgccaagtacaaagcacggaaaatggcacagttaaagagggctatccatccatctcttgacttcgacaatgcaaatggagtaaataggatgaagccttcactgaacaagctgcaatctttccatattggaaagaaccacagtttccgggtaccgaccggtgaccgaagcccgggtaaagtaagtacggattaccattctaatttgaacagccaattatcgcatagcaggcaccccgatccaggagcccaaagggcctggcattgtgaggtcaatgcagctgggagctctgattgtatgtttacagcaaggcgctactatgccggagctcagttgccaccaaatctcccgcgaacaaaatctgtacccctacatgctgtcgacgtctgaaatgctcttgccctgtaaagtttatagtgtacatctgttttggttctttctgtacccattatgaaacgtagttgctgagagcaggagactgaatgtgacgaggttgcatgtggattacggctgagctgtttgtaaatttccatcttgtgaattcagagaggttagattgttcgagtccaatccacatcatttgcctcactggggcaaccagttttatcctctttactataggcaagagccgatttccgagatgcaaaattgctgttaatcaggcagaaacaaggcatgggactctatccttgcgttggtactagatgccacctacctctcctagttccagttgaatatacatcaaatctgcattgccagcctatgcatttgcattgccaatgccaactgctgcatggacgctgcactaatcaattgacgcttccatgactc

SEQ ID NO: 22605 - DNA, 2706 bp, Zea Mays
gtctctctagtactggatcagtccctcttccttttccctctcctcagtccctgtctgctgctgctagacagcacaaactgcggtccggtgcgctctcctcggcggtggagttggagctgcagtgcaggggaagaaccgaagaagcgagctagagccgcaagaatgataggcgccaaggccaacgccgccggcccgtgcccggagtatgcggaggtcgaccccaccggccggtacggacggcgacgttcttggcaagggcgcgtccaagattgtgtaccgggcgttcgacgagtaccaggggatggaggtggcgtggaaccaggtgaagctgcacgacttcctgcagagccccgaggacctggagcggctctactgcgagatccaccttctcaagacgctcaagcaccgcaacatcatgaagttctacacctcctgggtcgacgtctcccgccgcaacatcaacttcatcaccgagatgttcacctccggcaccctccgccagtaccggcagaggcaccggagggtgaacatatgggcggtgaagcactggtgcaggcaaatcctcagcggcctgctgtacctgcatagccacaatccgcccatcatccaccgggacctcaagtgtgacaacatcttcgtgaacggcaaccagggagaggtcaagattggcgacctcggtctcgccgccatcctccgcaagtcccacgccgtccactgcgtacaccggagttcatggcgccggaggtgtacgaggaggagtacaacgagctggtggacatctactcgtttggaatgtgcgtgctcgagatggtaacgtttgagtacccgtacagcgagtgtacacaccctgtgcagatctacaagaaagtgatctctggtactaagccagaatctctgtacaaggtgaaagatccaatggtgaggcacttcgtcgagaagtgcctagcaacggcatctcaaagactgtcagcaagagaactgcttgaggatcccttcctacaaagtgatgacgtggttgcttctttggatggtggaaattaccatgtgccggccaattatatacctcagccttcatatttagggcatacctacagcaatggctccatgatgagtaatggattctcagaaagcattgatgaagatgctctcagtgaagactgcgaggatgatgacatgaaaggccaagatggcattgacctgttcaacgagaatgaaggtgagcttcttggcaatgtggatataacaatcaaagggagaaagagtgaggatggaggcatattccttagattgcggatttctgatgatgatggacgggtacgcaacatctattttccttttgacgttgaggctgataccgcactaagtgttgctactgaaatggtagccgaactcgatataactgaccatgaagttactcggattgctgacatgattgatggtgaggtcagtgcactggtaccagattggaggcctggtccgggcatagaggaggctcctgacacttcatactgccacgattgtggatccatcgtgtcatcgtgtggttcactttacgcctacatgtcatcaggccgtcgaggttgccaatgtgcagaggtacatgggcggtttgaggagatcacgttcgaagctgatggagagcagtgtgatttgcaggaatctgcaggcagctctgatgatggaggtggcccaacagagcactatgtcaaaggcaaggagtccactcatgtgaatggccttctacagatgggtagaagagatctttctaatcagctttgcttcagttcattccaagagcaatcatgttcatctaaccattatgagaacgaaactaaccatcacacaaatgggttcgacatgaagcatgaggtaaagattgccaagtacaaagcacggaaaatggcacagttaaagagggctatccatccatctcttgacttcgacaatgcaaatggagtaaataggatgaagccttcactgaacaagctgcaatctttccatattggaaagaaccacagtttccgggtaccgaccggtgaccgaagcccgggtaaagtaagtacggattaccattctaatttgaacagccaattatcgcatagcaggcaccccgatccaggagcccaaagggcctggcattgtgaggtcaatgcagctgggagctctgattgtatgtttacagcaaggcgctactatgccggagctcagttgccaccaaatctcccgcgaacaaaatctgtacccctacatgctgtcgacgtctgaaatgctcttgccctgtaaagtttatagtgtacatctgttttggttctttctgtacccattatgaaacgtagttgctgagagcaggagactgaatgtgacgaggttgcatgtggattacggctgagctgtttgtaaatttccatcttgtgaattcagagaggttagattgttcgagtccaatccacatcatttgcctcactggggcaaccagttttatcctctttactataggcaagagccgatttccgagatgcaaaattgctgttaatcaggcagaaacaaggcatgggactctatccttgcgttggtactagatgccacctacctctcctagttccagttgaatatacatcaaatctgcattgccagcctatgcatttgcattgccaatgccaactgctgcatggacgctgcactaatcaattgacgcttccatgactc

SEQ ID NO: 22606 - DNA, 2638 bp, Zea Mays
gtctctctagtactggatcagtccctcttccttttccctctcctcagtccctgtctgctgctgctagacagcacaaactgcggtccggtgcgctctcctcggcggtggagttggagctgcagtgcaggggaagaaccgaagaagcgagctagagccgcaagaatgataggcgccaaggccaacgccgccggcccgtgcccggagtatgcggaggtcgaccccaccggccggtacggacggttcagcgacgttcttggcaagggcgcgtccaagattgtgtaccgggcgttcgacgagtaccaggggatggaggtggcgtggaaccaggtgaagctgcacgacttcctgcagagccccgaggacctggagcggctctactgcgagatccaccttctcaagacgctcaagcaccgcaacatcatgaagttctacacctcctgggtcgacgtctcccgccgcaacatcaacttcatcaccgagatgttcacctccggcaccctccgccagtaccggcagaggcaccggagggtgaacatatgggcggtgaagcactggtgcaggcaaatcctcagcggcctgctgtacctgcatagccacaatccgcccatcatccaccgggacctcaagtgtgacaacatcttcgtgaacggcaaccagggagaggtcaagattggcgacctcggtctcgccgccatcctccgcaagtcccacgccgtccactgcgtaggtacaccggagttcatggcgccggaggtgtacgaggaggagtacaacgagctggtggacatctactcgtttggaatgtgcgtgctcgagatggtaacgtttgagtacccgtacagcgagtgtacacaccctgtgcagatctacaagaaagtgatctctggtactaagccagaatctctgtacaaggtgaaagatccaatggtgaggcacttcgtcgagaagtgcctagcaacggcatctcaaagactgtcagcaagagaactgcttgaggatcccttcctacaaagtgatgacgtggttgcttctttggatggtggaaattaccatgtgccggccaattatatacctcagccttcatatttagggcatacctacagcaatggctccatgatgagtaatggattctcagaaagcattgatgaagatgctctcagtgaagactgcgaggatgatgacatgaaaggccaagatggcattgacctgttcaacgagaatgaaggtgagcttcttggcaatgtggatataacaatcaaagggagaaagagtgaggatggaggcatattccttagattgcggatttctgatgatgatggacgggtacgcaacatctattttccttttgacgttgaggctgataccgcactaagtgttgctactgaaatggtagccgaactcgatataactgaccatgaagttactcggattgctgacatgattgatggtgaggtcagtgcactggtaccagattggaggcctggtccgggcatagaggaggctcctgacacttcatactgccacgattgtggatccatcgtgtcatcgtgtggttcactttacgcctacatgtcatcaggccgtcgaggaatctgcaggcagctctgatgatggaggtggcccaacagagcactatgtcaaaggcaaggagtccactcatgtgaatggccttctacagatgggtagaagagatctttctaatcagctttgcttcagttcattccaagagcaatcatgttcatctaaccattatgagaacgaaactaaccatcacacaaatgggttcgacatgaagcatgaggtaaagattgccaagtacaaagcacggaaaatggcacagttaaagagggctatccatccatctcttgacttcgacaatgcaaatggagtaaataggatgaagccttcactgaacaagctgcaatctttccatattggaaagaaccacagtttccgggtaccgaccggtgaccgaagcccgggtaaagtaagtacggattaccattctaatttgaacagccaattatcgcatagcaggcaccccgatccaggagcccaaagggcctggcattgtgaggtcaatgcagctgggagctctgattgtatgtttacagcaaggcgctactatgccggagctcagttgccaccaaatctcccgcgaacaaaatctgtacccctacatgctgtcgacgtctgaaatgctcttgccctgtaaagtttatagtgtacatctgttttggttctttctgtacccattatgaaacgtagttgctgagagcaggagactgaatgtgacgaggttgcatgtggattacggctgagctgtttgtaaatttccatcttgtgaattcagagaggttagattgttcgagtccaatccacatcatttgcctcactggggcaaccagttttatcctctttactataggcaagagccgatttccgagatgcaaaattgctgttaatcaggcagaaacaaggcatgggactctatccttgcgttggtactagatgccacctacctctcctagttccagttgaatatacatcaaatctgcattgccagcctatgcatttgcattgccaatgccaactgctgcatggacgctgcactaatcaattgacgcttccatgactc

SEQ ID NO: 22607 - DNA, 2503 bp, Zea Mays
gtctctctagtactggatcagtccctcttccttttccctctcctcagtccctgtctgctgctgctagacagcacaaactgcggtccggtgcgctctcctcggcggtggagttggagctgcagtgcaggggaagaaccgaagaagcgagctagagccgcaagaatgataggcgccaaggccaacgccgccggcccgtgcccggagtatgcggaggtcgaccccaccggccggtacggacggttcagcgacgttcttggcaagggcgcgtccaagattgtgtaccgggcgttcgacgagtaccaggggatggaggtggcgtggaaccaggtgaagctgcacgacttcctgcagagccccgaggacctggagcggctctactgcgagatccaccttctcaagacgctcaagcaccgcaacatcatgaagttctacacctcctgggtcgacgtctcccgccgcaacatcaacttcatcaccgagatgttcacctccggcaccctccgccagtaccggcagaggcaccggagggtgaacatatgggcggtgaagcactggtgcaggcaaatcctcagcggcctgctgtacctgcatagccacaatccgcccatcatccaccgggacctcaagtgtgacaacatcttcgtgaacggcaaccagggagaggtcaagattggcgacctcggtctcgccgccatcctccgcaagtcccacgccgtccactgcgtacaccggagttcatggcgccggaggtgtacgaggaggagtacaacgagctggtggacatctactcgtttggaatgtgcgtgctcgagatggtaacgtttgagtacccgtacagcgagtgtacacaccctgtgcagatctacaagaaagtgatctctggtactaagccagaatctctgtacaaggtgaaagatccaatggtgaggcacttcgtcgagaagtgcctagcaacggcatctcaaagactgtcagcaagagaactgcttgaggatcccttcctacaaagtgatgacgtggttgcttctttggatggtggaaattaccatgtgccggccaattatatacctcagccttcatatttagggcatacctacagcaatggctccatgatgagtaatggattctcagaaagcattgatgaagatgctctcagtgaagactgcgaggatgatgacatgaaaggccaagatggcattgacctgttcaacgagaatgaaggtgagcttcttggcaatgtggatataacaatcaaagggagaaagagtgaggatggaggcatattccttagattgcggatttctgatgatgatggacgggtacgcaacatctattttccttttgacgttgaggctgataccgcactaagtgttgctactgaaatggtagccgaactcgatataactgaccatgaagttactcggattgctgacatgattgatggtgaggtcagtgcactggtaccagattggaggcctggtccgggcatagaggaggctcctgacacttcatactgccacgattgtggatccatcgtgtcatcgtgtggttcactttacgcctacatgtcatcaggccgtcgaggaatctgcaggcagctctgatgatggaggtggcccaacagagcactatgtcaaaggcaaggagtccactcatgtgaatggccttctacagatgggtagaagagatctttctaatcagctttgcttcagttcattccaagagcaatcatgttcatctaaccattatgagaacgaaactaaccatcacacaaatgggttcgacatgaagcatgaggtaaagattgccaagtacaaagcacggaaaatggcacagttaaagagggctatccatccatctcttgacttcgacaatgcaaatggagtaaataggatgaagccttcactgaacaagctgcaatctttccatattggaaagaaccacagtttccgggtaccgaccggtgaccgaagcccgggtaaagcgctactatgccggagctcagttgccaccaaatctcccgcgaacaaaatctgtacccctacatgctgtcgacgtctgaaatgctcttgccctgtaaagtttatagtgtacatctgttttggttctttctgtacccattatgaaacgtagttgctgagagcaggagactgaatgtgacgaggttgcatgtggattacggctgagctgtttgtaaatttccatcttgtgaattcagagaggttagattgttcgagtccaatccacatcatttgcctcactggggcaaccagttttatcctctttactataggcaagagccgatttccgagatgcaaaattgctgttaatcaggcagaaacaaggcatgggactctatccttgcgttggtactagatgccacctacctctcctagttccagttgaatatacatcaaatctgcattgccagcctatgcatttgcattgccaatgccaactgctgcatggacgctgcactaatcaattgacgcttccatgactc

SEQ ID NO: 22608 - DNA, 2661 bp, Zea Mays
gtctctctagtactggatcagtccctcttccttttccctctcctcagtccctgtctgctgctgctagacagcacaaactgcggtccggtgcgctctcctcggcggtggagttggagctgcagtgcaggggaagaaccgaagaagcgagctagagccgcaagaatgataggcgccaaggccaacgccgccggcccgtgcccggagtatgcggaggtcgaccccaccggccggtacggacggttcagcgacgttcttggcaagggcgcgtccaagattgtgtaccgggcgttcgacgagtaccaggggatggaggtggcgtggaaccaggtgaagctgcacgacttcctgcagagccccgaggacctggagcggctctactgcgagatccaccttctcaagacgctcaagcaccgcaacatcatgaagttctacacctcctgggtcgacgtctcccgccgcaacatcaacttcatcaccgagatgttcacctccggcaccctccgccattacgcgtctattgatgatttaggtaccggcagaggcaccggagggtgaacatatgggcggtgaagcactggtgcaggcaaatcctcagcggcctgctgtacctgcatagccacaatccgcccatcatccaccgggacctcaagtgtgacaacatcttcgtgaacggcaaccagggagaggtcaagattggcgacctcggtctcgccgccatcctccgcaagtcccacgccgtccactgcgtaggtacaccggagttcatggcgccggaggtgtacgaggaggagtacaacgagctggtggacatctactcgtttggaatgtgcgtgctcgagatggtaacgtttgagtacccgtacagcgagtgtacacaccctgtgcagatctacaagaaagtgatctctggtactaagccagaatctctgtacaaggtgaaagatccaatggtgaggcacttcgtcgagaagtgcctagcaacggcatctcaaagactgtcagcaagagaactgcttgaggatcccttcctacaaagtgatgacgtggttgcttctttggatggtggaaattaccatgtgccggccaattatatacctcagccttcatatttagggcatacctacagcaatggctccatgatgagtaatggattctcagaaagcattgatgaagatgctctcagtgaagactgcgaggatgatgacatgaaaggccaagatggcattgacctgttcaacgagaatgaaggtgagcttcttggcaatgtggatataacaatcaaagggagaaagagtgaggatggaggcatattccttagattgcggatttctgatgatgatggacgggtacgcaacatctattttccttttgacgttgaggctgataccgcactaagtgttgctactgaaatggtagccgaactcgatataactgaccatgaagttactcggattgctgacatgattgatggtgaggtcagtgcactggtaccagattggaggcctggtccgggcatagaggaggctcctgacacttcatactgccacgattgtggatccatcgtgtcatcgtgtggttcactttacgcctacatgtcatcaggccgtcgaggaatctgcaggcagctctgatgatggaggtggcccaacagagcactatgtcaaaggcaaggagtccactcatgtgaatggccttctacagatgggtagaagagatctttctaatcagctttgcttcagttcattccaagagcaatcatgttcatctaaccattatgagaacgaaactaaccatcacacaaatgggttcgacatgaagcatgaggtaaagattgccaagtacaaagcacggaaaatggcacagttaaagagggctatccatccatctcttgacttcgacaatgcaaatggagtaaataggatgaagccttcactgaacaagctgcaatctttccatattggaaagaaccacagtttccgggtaccgaccggtgaccgaagcccgggtaaagtaagtacggattaccattctaatttgaacagccaattatcgcatagcaggcaccccgatccaggagcccaaagggcctggcattgtgaggtcaatgcagctgggagctctgattgtatgtttacagcaaggcgctactatgccggagctcagttgccaccaaatctcccgcgaacaaaatctgtacccctacatgctgtcgacgtctgaaatgctcttgccctgtaaagtttatagtgtacatctgttttggttctttctgtacccattatgaaacgtagttgctgagagcaggagactgaatgtgacgaggttgcatgtggattacggctgagctgtttgtaaatttccatcttgtgaattcagagaggttagattgttcgagtccaatccacatcatttgcctcactggggcaaccagttttatcctctttactataggcaagagccgatttccgagatgcaaaattgctgttaatcaggcagaaacaaggcatgggactctatccttgcgttggtactagatgccacctacctctcctagttccagttgaatatacatcaaatctgcattgccagcctatgcatttgcattgccaatgccaactgctgcatggacgctgcactaatcaattgacgcttccatgactc

SEQ ID NO: 22609 - DNA, 3790 bp, Zea Mays
acactttcttagcaggtaactgcagacggtcactgacgtgtgggcattatctaggcttggtccctaatgtcagtgacggagcaggttccaaatatgaagcttcagtagtgtatcgtgagaacacgtcggtgccaggctgccagcagcaacgaagccgcaccaggccccgcactgcccatggacgcacgcctcccggggctctcgtgtccctgtccgtctcccgtttgccgcctccaccgcaacgcggcgcgcggggtggcggtgctctcgcgatcctcgtgtcgattccagcggcgggggtgccattccctcccctggccgttgcccgcgcctcgcggtcgcgcaccggaaccggagccccgccgcgaatctagggttgcctccgcctcgccccctcctcccgagactcctagcggcaggaattaggacgagggtaacaggcgacagaggctgcgaaggacgccccctcgtcgaatgcgccggcgaccgatccgtggaggagcagccggagcacgcaggagattgttcattagtgttattgtttataaaatggtcaataaagagttgctattaattgagaagagaatctactaatggatgggccatgaaattgcatggtttttatttgcctgaaaagaatggagcctttcttgttgttttctgaatgatataactggacactgtagttgaagggcaagctttgaaaatgtcatccactgtgccgaagtcatcaaatatcttctggcatgattgcctagttggcaagactgatcgccagaagctactcaaccagaaaggctgtgttgtctggatcacaggccttagtggctcaggtaagcaaaccttgttttctctcgaactggtttgttgtgtgcttcttgcattgttgatgcaattgttaaaaaattttaagctaaaactaagataacgtcaactgcagttggtaagataatgtcaactgcagttggtgtctctttctgcttcgtatatatattatatcttctttgtttgcctcttgttggataatttcatctgtcatttatatgtacatggacagatttctatactgcactgttttgcttgaattattgaattctattaaagtcattttggcccaatgaaggattactgttttattcattttagagtacagaaaattgatgctttcacagttttgttactgaacggctttctagttttcctttgtctctgcatccattcaattccatcttcttcacgaatttggcaaaaaaaaaattatatattttttttcagaaaataagttcaactctgttctagatttatcaataagcaacctattcgttttggctttgataaattacataccttgccttaaatatatagtttgctgacatgtactgacactcttctgggcggttactatgctggtttctcgaagtttggttttatttagttgagggaagtgccttgggcaccttgatgaatatcttgtaagctggtgactccagcagaactaaactttgttttctataagttgggatcaatggtctttggtctaaaaaaggtaaatacgcaaagtttccaaaagaactctaatattttttttttcaatttgtatggcatatgcctactctgtttactgtcactgcattccctcttcacagttcttcatgacctgcattgcaatttttttagaataaatcaggatctattttctgttcattcaaaggatagttacatttaaatgataaatctccaatatcatttgtccttcaaattgaatcttttagtttttttaaatggtattcttttaatctaatttcttttcaattttttcatcttgctaaggtaaaagtaccttggcatgtacattaggccgggagctccacacaagagggaagcttgcatatgttcttgacggtgataacttaagacatggtctgaacaaggatcttggctttaaagctgaagatcgtgctgaaaatataaggagagttggtaagtgtctcaccaatatagataaaaaaggacagacctagtgctggtggggaaggaataagacaagccttaccctgcattgcatcgaacccgaacctttggctcagtggaaaggcttcccatcacttcgctaggcctgttcttctgtctcgccaatatagatgtctattatatttcaaggaactcccacgaaagtaaaagcatgataaacaagtcttgcttctgccattattttatctttccagcattctgcagttcacatttttccttgaatacacgggagagctgtgtatctttgtattaggagtgaaaaaagggggtccaatacagactacagaacttcgcctcctgttctggaccaagcagagaggactgccaaaacaaacacgactactgagactaactaatcagacaataactgtaggacctaagtacctaaccaacactgtgaaaactactaactagcccacccctcgaactggactcagttctttaagatgtttggccccggcaaaacaccaaagatggtgttctttagcaaaattgtgcagaggccttctgcatgttgggctgaacaacggcattcctatgctttcaaagagaccaagctcctagaatgatggccgagataactccttgctggaccagttttgagaggtgttcaatgctctccttcaatcagcaaaagaggattcagcttgacttggctcttgaggcaaagcccaagtttgaaagaattttaaaccagaattctctagtgaaaacacaagtggtaataatatgctggacattctcctcttcttggtcacaaacacacattattgagggcgggggaggcctttttttgctaaccggtcagccatccagcacctatttctaattgctagctaggatgatcttgcactttgctggagcacaggttttccaaatccgcctccatgcctcaaaggtcacagatccttggaagattttgcacttagcagttcacattttgtttcaactattttgaacaggtgaagtagcaaagttattttcagacgctggccttgtatgtattgcaagtttgatatctccatataggagagaccgtgaatcttgccgtgcactgttgtcggatggtagctttattgaagttttcttgaatatgtccttggaattatgtgaagcaagggacccaaagggcctctataagcttgctcgtgctgggaaaataaagggttttacaggaatagatgacccttatgaagcaccactgaattgtgagattgagatcaaggaaatagatggtgtatgcccttcgccttctgacatggcggggcaagtggttacttaccttgaggagaaaggcttcctgcacgagtaggctgacgctgaatcgaagctacatccggggaaggtttcaatcagacaagcgcagaataagtcaaaagcgctgccagttaccgtatggttacatagattgatctggatgcctagtatttttctttccgcgcttgctctaccacaagttccattcagtttcattcagatgagcctagatggttcctaatttctttgacctctggaatagattacctgtaatgcaattctgataacagcttggggcagtatcgatttgtcacgggaaggtacgcctaatgttgagagaaactgtattcttgtgctccactttctgcagtgccgacgtgtaccctttccgttttactaaattataattagcttcccttcatttataagtttatttattttttatacactattcttgttacatatctaagtatgtctggatatatagcaaaaaaaaaaaaaa

SEQ ID NO: 22610 - DNA, 2990 bp, Zea Mays
acactttcttagcaggtaactgcagacggtcactgacgtgtgggcattatctaggcttggtccctaatgtcagtgacggagcaggttccaaatatgaagcttcagtagtgtatcgtgagaacacgtcggtgccaggctgccagcagcaacgaagccgcaccaggccccgcactgcccatggacgcacgcctcccggggctctcgtgtccctgtccgtctcccgtttgccgcctccaccgcaacgcggcgcgcggggtggcggtgctctcgcgatcctcgtgtcgattccagcggcgggggtgccattccctcccctggccgttgcccgcgcctcgcggtcgcgcaccggaaccggagccccgccgcgaatctagggttgcctccgcctcgccccctcctcccgagactcctagcggcaggaattaggacgagggtaacaggcgacagaggctgcgaaggacgccccctcgtcgaatgcgccggcgaccgatccgtggaggagcagccggagcacgcaggaggttagtctaggcacgtatcgcctctcaatccctcttcaccctagacggttcgatccaatgtacttgctaattgctgatcgggttacgcggatgcgtgtagattgagcggaattccagatgtactcccatttctacggagtagcagacctcataatcatatctccttgtcttccgcgattttctgcacttgatcgtctttagttggtggcgaaatgcttattctgggtttctacctttacctcgagcgcgacggtggtggacatttttatgcggtcttgaggaggaccaaggaggtgccctatagcttccacggggccaaatgtgcgagagtgacacggtgatgggtggcggggagaaggttttgtccgggtgcctgactcatcaaggatctagagaaagggaagcaggattggagagattgtttggataattcgagtgcgacgtgagtgaggaactgaggatagccggccagttcatttctaaactggtttagggggtgtttgaatgcactgaaattaatagttagttggctaaaaattgttagtggaattagctagctaacaaataactacctattcatgattattaaaacgtcgtttaaacgacgattaagcgtcgtttaaacgctaaaacgcgattagtagataaaacgtccgcacattttaccaaaactgcgtagaacgtccgttctggacgtttaaacgacgtttacacgtcggaacgcacgttctggacgttctatgcgctatatggacgttctatgctcatagcgttcgtgggccagccgctgatccaacgcgcgcagccattgatccatcgccgccagacgccatcgcgcccagccgcccagacgcctgtgctccagccgccgtcgtgcgcgcccaggagctgccagccgccatcgcgcgcgcccaggagccgccagagccagacgccgtcggccgtcctccaccgccctccaggtacgccgccggccccctcctccctcctccctccaccgccacccccaaagccgccaccgccgccagctactgcctctcccgtaccgccgccgccatcgtacgagcaggccgtaggggtgggtggtggccgaagggaggaggatgacgacgagggcgccggggcggtgatacgggcacacctgctctctgacttcaaggccgcggtgcgtgcaggaaaagtactggtgtccgacccgtcgtctggaaagattgttcattagtgttattgtttataaaatggtcaataaagagttgctattaattgagaagagaatctactaatggatgggccatgaaattgcatggtttttatttgcctgaaaagaatggagcctttcttgttgttttctgaatgatataactggacactgtagttgaagggcaagctttgaaaatgtcatccactgtgccgaagtcatcaaatatcttctggcatgattgcctagttggcaagactgatcgccagaagctactcaaccagaaaggctgtgttgtctggatcacaggccttagtggctcaggtaaaagtaccttggcatgtacattaggccgggagctccacacaagagggaagcttgcatatgttcttgacggtgataacttaagacatggtctgaacaaggatcttggctttaaagctgaagatcgtgctgaaaatataaggagagttggtgaagtagcaaagttattttcagacgctggccttgtatgtattgcaagtttgatatctccatataggagagaccgtgaatcttgccgtgcactgttgtcggatggtagctttattgaagttttcttgaatatgtccttggaattatgtgaagcaagggacccaaagggcctctataagcttgctcgtgctgggaaaataaagggttttacaggaatagatgacccttatgaagcaccactgaattgtgagattgagatcaaggaaatagatggtgtatgcccttcgccttctgacatggcggggcaagtggttacttaccttgaggagaaaggcttcctgcacgagtaggctgacgctgaatcgaagctacatccggggaaggtttcaatcagacaagcgcagaataagtcaaaagcgctgccagttaccgtatggttacatagattgatctggatgcctagtatttttctttccgcgcttgctctaccacaagttccattcagtttcattcagatgagcctagatggttcctaatttctttgacctctggaatagattacctgtaatgcaattctgataacagcttggggcagtatcgatttgtcacgggaaggtacgcctaatgttgagagaaactgtattcttgtgctccactttctgcagtgccgacgtgtaccctttccgttttactaaattataattagcttcccttcatttataagtttatttattttttatacactattcttgttacatatctaagtatgtctggatatatagcaaaaaaaaaaaaaa

SEQ ID NO: 22611 - DNA, 4457 bp, Zea Mays
acactttcttagcaggtaactgcagacggtcactgacgtgtgggcattatctaggcttggtccctaatgtcagtgacggagcaggttccaaatatgaagcttcagtagtgtatcgtgagaacacgtcggtgccaggctgccagcagcaacgaagccgcaccaggccccgcactgcccatggacgcacgcctcccggggctctcgtgtccctgtccgtctcccgtttgccgcctccaccgcaacgcggcgcgcggggtggcggtgctctcgcgatcctcgtgtcgattccagcggcgggggtgccattccctcccctggccgttgcccgcgcctcgcggtcgcgcaccggaaccggagccccgccgcgaatctagggttgcctccgcctcgccccctcctcccgagactcctagcggcaggaattaggacgagggtaacaggcgacagaggctgcgaaggacgccccctcgtcgaatgcgccggcgaccgatccgtggaggagcagccggagcacgcaggagccgctgatccaacgcgcgcagccattgatccatcgccgccagacgccatcgcgcccagccgcccagacgcctgtgctccagccgccgtcgtgcgcgcccaggagctgccagccgccatcgcgcgcgcccaggagccgccagagccagacgccgtcggccgtcctccaccgccctccaggtacgccgccggccccctcctccctcctccctccaccgccacccccaaagccgccaccgccgccagctactgcctctcccgtaccgccgccgccatcgtacgagcaggccgtaggggtgggtggtggccgaagggaggaggatgacgacgagggcgccggggcggtgatacgggcacacctgctctctgacttcaaggccgcggtgcgtgcaggaaaagtactggtgtccgacccgtcgtctggaaaggtccccactcgcatcctcttctgattctatagcgaattttggttgagagttcggagttctgcacttcctacttgccctgcaagagtttagtgttgatatttcattgggatagttggtcatttttccattctttctagctgacttatgtatgtcctcattatttttctggttgtattcttgtattgactattgagacatggagataaaagttatgtagtgtataatttttttatatctgcagcgctggtggtttgtttggtaaatggggaatggacaatactctgttggttccctgttaagtgttacattttcaatgcggtcatggaaatggaattagatgttgctgttgtgaagagagatgaccttggaaatgctcatggtcttaatcttgatgagttcgatgatgttgaagggcaagctttgaaaatgtcatccactgtgccgaagtcatcaaatatcttctggcatgattgcctagttggcaagactgatcgccagaagctactcaaccagaaaggctgtgttgtctggatcacaggccttagtggctcaggtaagcaaaccttgttttctctcgaactggtttgttgtgtgcttcttgcattgttgatgcaattgttaaaaaattttaagctaaaactaagataacgtcaactgcagttggtaagataatgtcaactgcagttggtgtctctttctgcttcgtatatatattatatcttctttgtttgcctcttgttggataatttcatctgtcatttatatgtacatggacagatttctatactgcactgttttgcttgaattattgaattctattaaagtcattttggcccaatgaaggattactgttttattcattttagagtacagaaaattgatgctttcacagttttgttactgaacggctttctagttttcctttgtctctgcatccattcaattccatcttcttcacgaatttggcaaaaaaaaaattatatattttttttcagaaaataagttcaactctgttctagatttatcaataagcaacctattcgttttggctttgataaattacataccttgccttaaatatatagtttgctgacatgtactgacactcttctgggcggttactatgctggtttctcgaagtttggttttatttagttgagggaagtgccttgggcaccttgatgaatatcttgtaagctggtgactccagcagaactaaactttgttttctataagttgggatcaatggtctttggtctaaaaaaggtaaatacgcaaagtttccaaaagaactctaatattttttttttcaatttgtatggcatatgcctactctgtttactgtcactgcattccctcttcacagttcttcatgacctgcattgcaatttttttagaataaatcaggatctattttctgttcattcaaaggatagttacatttaaatgataaatctccaatatcatttgtccttcaaattgaatcttttagtttttttaaatggtattcttttaatctaatttcttttcaattttttcatcttgctaaggtaaaagtaccttggcatgtacattaggccgggagctccacacaagagggaagcttgcatatgttcttgacggtgataacttaagacatggtctgaacaaggatcttggctttaaagctgaagatcgtgctgaaaatataaggagagttggtaagtgtctcaccaatatagataaaaaaggacagacctagtgctggtggggaaggaataagacaagccttaccctgcattgcatcgaacccgaacctttggctcagtggaaaggcttcccatcacttcgctaggcctgttcttctgtctcgccaatatagatgtctattatatttcaaggaactcccacgaaagtaaaagcatgataaacaagtcttgcttctgccattattttatctttccagcattctgcagttcacatttttccttgaatacacgggagagctgtgtatctttgtattaggagtgaaaaaagggggtccaatacagactacagaacttcgcctcctgttctggaccaagcagagaggactgccaaaacaaacacgactactgagactaactaatcagacaataactgtaggacctaagtacctaaccaacactgtgaaaactactaactagcccacccctcgaactggactcagttctttaagatgtttggccccggcaaaacaccaaagatggtgttctttagcaaaattgtgcagaggccttctgcatgttgggctgaacaacggcattcctatgctttcaaagagaccaagctcctagaatgatggccgagataactccttgctggaccagttttgagaggtgttcaatgctctccttcaatcagcaaaagaggattcagcttgacttggctcttgaggcaaagcccaagtttgaaagaattttaaaccagaattctctagtgaaaacacaagtggtaataatatgctggacattctcctcttcttggtcacaaacacacattattgagggcgggggaggcctttttttgctaaccggtcagccatccagcacctatttctaattgctagctaggatgatcttgcactttgctggagcacaggttttccaaatccgcctccatgcctcaaaggtcacagatccttggaagattttgcacttagcagttcacattttgtttcaactattttgaacaggtgaagtagcaaagttattttcagacgctggccttgtatgtattgcaagtttgatatctccatataggagagaccgtgaatcttgccgtgcactgttgtcggatggtagctttattgaagttttcttgaatatgtccttggaattatgtgaagcaagggacccaaagggcctctataagcttgctcgtgctgggaaaataaagggttttacaggaatagatgacccttatgaagcaccactgaattgtgagattgagatcaaggaaatagatggtgtatgcccttcgccttctgacatggcggggcaagtggttacttaccttgaggagaaaggcttcctgcacgagtaggctgacgctgaatcgaagctacatccggggaaggtttcaatcagacaagcgcagaataagtcaaaagcgctgccagttaccgtatggttacatagattgatctggatgcctagtatttttctttccgcgcttgctctaccacaagttccattcagtttcattcagatgagcctagatggttcctaatttctttgacctctggaatagattacctgtaatgcaattctgataacagcttggggcagtatcgatttgtcacgggaaggtacgcctaatgttgagagaaactgtattcttgtgctccactttctgcagtgccgacgtgtaccctttccgttttactaaattataattagcttcccttcatttataagtttatttattttttatacactattcttgttacatatctaagtatgtctggatatatagcaaaaaaaaaaaaaa

SEQ ID NO: 22612 - DNA, 2793 bp, Zea Mays
acactttcttagcaggtaactgcagacggtcactgacgtgtgggcattatctaggcttggtccctaatgtcagtgacggagcaggttccaaatatgaagcttcagtagtgtatcgtgagaacacgtcggtgccaggctgccagcagcaacgaagccgcaccaggccccgcactgcccatggacgcacgcctcccggggctctcgtgtccctgtccgtctcccgtttgccgcctccaccgcaacgcggcgcgcggggtggcggtgctctcgcgatcctcgtgtcgattccagcggcgggggtgccattccctcccctggccgttgcccgcgcctcgcggtcgcgcaccggaaccggagccccgccgcgaatctagggttgcctccgcctcgccccctcctcccgagactcctagcggcaggaattaggacgagggtaacaggcgacagaggctgcgaaggacgccccctcgtcgaatgcgccggcgaccgatccgtggaggagcagccggagcacgcaggagattgttcattagtgttattgtttataaaatggtcaataaagagttgctattaattgagaagagaatctactaatggatgggccatgaaattgcatggtttttatttgcctgaaaagaatggagcctttcttgttgttttctgaatgatataactggacactgtagttgaagggcaagctttgaaaatgtcatccactgtgccgaagtcatcaaatatcttctggcatgattgcctagttggcaagactgatcgccagaagctactcaaccagaaaggctgtgttgtctggatcacaggccttagtggctcaggtaaaagtaccttggcatgtacattaggccgggagctccacacaagagggaagcttgcatatgttcttgacggtgataacttaagacatggtctgaacaaggatcttggctttaaagctgaagatcgtgctgaaaatataaggagagttggtaagtgtctcaccaatatagataaaaaaggacagacctagtgctggtggggaaggaataagacaagccttaccctgcattgcatcgaacccgaacctttggctcagtggaaaggcttcccatcacttcgctaggcctgttcttctgtctcgccaatatagatgtctattatatttcaaggaactcccacgaaagtaaaagcatgataaacaagtcttgcttctgccattattttatctttccagcattctgcagttcacatttttccttgaatacacgggagagctgtgtatctttgtattaggagtgaaaaaagggggtccaatacagactacagaacttcgcctcctgttctggaccaagcagagaggactgccaaaacaaacacgactactgagactaactaatcagacaataactgtaggacctaagtacctaaccaacactgtgaaaactactaactagcccacccctcgaactggactcagttctttaagatgtttggccccggcaaaacaccaaagatggtgttctttagcaaaattgtgcagaggccttctgcatgttgggctgaacaacggcattcctatgctttcaaagagaccaagctcctagaatgatggccgagataactccttgctggaccagttttgagaggtgttcaatgctctccttcaatcagcaaaagaggattcagcttgacttggctcttgaggcaaagcccaagtttgaaagaattttaaaccagaattctctagtgaaaacacaagtggtaataatatgctggacattctcctcttcttggtcacaaacacacattattgagggcgggggaggcctttttttgctaaccggtcagccatccagcacctatttctaattgctagctaggatgatcttgcactttgctggagcacaggttttccaaatccgcctccatgcctcaaaggtcacagatccttggaagattttgcacttagcagttcacattttgtttcaactattttgaacaggtgaagtagcaaagttattttcagacgctggccttgtatgtattgcaagtttgatatctccatataggagagaccgtgaatcttgccgtgcactgttgtcggatggtagctttattgaagttttcttgaatatgtccttggaattatgtgaagcaagggacccaaagggcctctataagcttgctcgtgctgggaaaataaagggttttacaggaatagatgacccttatgaagcaccactgaattgtgagattgagatcaaggaaatagatggtgtatgcccttcgccttctgacatggcggggcaagtggttacttaccttgaggagaaaggcttcctgcacgagtaggctgacgctgaatcgaagctacatccggggaaggtttcaatcagacaagcgcagaataagtcaaaagcgctgccagttaccgtatggttacatagattgatctggatgcctagtatttttctttccgcgcttgctctaccacaagttccattcagtttcattcagatgagcctagatggttcctaatttctttgacctctggaatagattacctgtaatgcaattctgataacagcttggggcagtatcgatttgtcacgggaaggtacgcctaatgttgagagaaactgtattcttgtgctccactttctgcagtgccgacgtgtaccctttccgttttactaaattataattagcttcccttcatttataagtttatttattttttatacactattcttgttacatatctaagtatgtctggatatatagcaaaaaaaaaaaaaa

SEQ ID NO: 22613 - DNA, 1465 bp, Zea Mays
acactttcttagcaggtaactgcagacggtcactgacgtgtgggcattatctaggcttggtccctaatgtcagtgacggagcaggttccaaatatgaagcttcagtagtgtatcgtgagaacacgtcggtgccaggctgccagcagcaacgaagccgcaccaggccccgcactgcccatggacgcacgcctcccggggctctcgtgtccctgtccgtctcccgtttgccgcctccaccgcaacgcggcgcgcggggtggcggtgctctcgcgatcctcgtgtcgattccagcggcgggggtgccattccctcccctggccgttgcccgcgcctcgcggtcgcgcaccggaaccggagccccgccgcgaatctagggttgcctccgcctcgccccctcctcccgagactcctagcggcaggaattaggacgagggtaacaggcgacagaggctgcgaaggacgccccctcgtcgaatgcgccggcgaccgatccgtggaggagcagccggagcacgcaggagttgaagggcaagctttgaaaatgtcatccactgtgccgaagtcatcaaatatcttctggcatgattgcctagttggcaagactgatcgccagaagctactcaaccagaaaggctgtgttgtctggatcacaggccttagtggctcaggtgaagtagcaaagttattttcagacgctggccttgtatgtattgcaagtttgatatctccatataggagagaccgtgaatcttgccgtgcactgttgtcggatggtagctttattgaagttttcttgaatatgtccttggaattatgtgaagcaagggacccaaagggcctctataagcttgctcgtgctgggaaaataaagggttttacaggaatagatgacccttatgaagcaccactgaattgtgagattgagatcaaggaaatagatggtgtatgcccttcgccttctgacatggcggggcaagtggttacttaccttgaggagaaaggcttcctgcacgagtaggctgacgctgaatcgaagctacatccggggaaggtttcaatcagacaagcgcagaataagtcaaaagcgctgccagttaccgtatggttacatagattgatctggatgcctagtatttttctttccgcgcttgctctaccacaagttccattcagtttcattcagatgagcctagatggttcctaatttctttgacctctggaatagattacctgtaatgcaattctgataacagcttggggcagtatcgatttgtcacgggaaggtacgcctaatgttgagagaaactgtattcttgtgctccactttctgcagtgccgacgtgtaccctttccgttttactaaattataattagcttcccttcatttataagtttatttattttttatacactattcttgttacatatctaagtatgtctggatatatagcaaaaaaaaaaaaaa

SEQ ID NO: 22614 - DNA, 3695 bp, Zea Mays
acactttcttagcaggtaactgcagacggtcactgacgtgtgggcattatctaggcttggtccctaatgtcagtgacggagcaggttccaaatatgaagcttcagtagtgtatcgtgagaacacgtcggtgccaggctgccagcagcaacgaagccgcaccaggccccgcactgcccatggacgcacgcctcccggggctctcgtgtccctgtccgtctcccgtttgccgcctccaccgcaacgcggcgcgcggggtggcggtgctctcgcgatcctcgtgtcgattccagcggcgggggtgccattccctcccctggccgttgcccgcgcctcgcggtcgcgcaccggaaccggagccccgccgcgaatctagggttgcctccgcctcgccccctcctcccgagactcctagcggcaggaattaggacgagggtaacaggcgacagaggctgcgaaggacgccccctcgtcgaatgcgccggcgaccgatccgtggaggagcagccggagcacgcaggagttgaagggcaagctttgaaaatgtcatccactgtgccgaagtcatcaaatatcttctggcatgattgcctagttggcaagactgatcgccagaagctactcaaccagaaaggctgtgttgtctggatcacaggccttagtggctcaggtaagcaaaccttgttttctctcgaactggtttgttgtgtgcttcttgcattgttgatgcaattgttaaaaaattttaagctaaaactaagataacgtcaactgcagttggtaagataatgtcaactgcagttggtgtctctttctgcttcgtatatatattatatcttctttgtttgcctcttgttggataatttcatctgtcatttatatgtacatggacagatttctatactgcactgttttgcttgaattattgaattctattaaagtcattttggcccaatgaaggattactgttttattcattttagagtacagaaaattgatgctttcacagttttgttactgaacggctttctagttttcctttgtctctgcatccattcaattccatcttcttcacgaatttggcaaaaaaaaaattatatattttttttcagaaaataagttcaactctgttctagatttatcaataagcaacctattcgttttggctttgataaattacataccttgccttaaatatatagtttgctgacatgtactgacactcttctgggcggttactatgctggtttctcgaagtttggttttatttagttgagggaagtgccttgggcaccttgatgaatatcttgtaagctggtgactccagcagaactaaactttgttttctataagttgggatcaatggtctttggtctaaaaaaggtaaatacgcaaagtttccaaaagaactctaatattttttttttcaatttgtatggcatatgcctactctgtttactgtcactgcattccctcttcacagttcttcatgacctgcattgcaatttttttagaataaatcaggatctattttctgttcattcaaaggatagttacatttaaatgataaatctccaatatcatttgtccttcaaattgaatcttttagtttttttaaatggtattcttttaatctaatttcttttcaattttttcatcttgctaaggtaaaagtaccttggcatgtacattaggccgggagctccacacaagagggaagcttgcatatgttcttgacggtgataacttaagacatggtctgaacaaggatcttggctttaaagctgaagatcgtgctgaaaatataaggagagttggtaagtgtctcaccaatatagataaaaaaggacagacctagtgctggtggggaaggaataagacaagccttaccctgcattgcatcgaacccgaacctttggctcagtggaaaggcttcccatcacttcgctaggcctgttcttctgtctcgccaatatagatgtctattatatttcaaggaactcccacgaaagtaaaagcatgataaacaagtcttgcttctgccattattttatctttccagcattctgcagttcacatttttccttgaatacacgggagagctgtgtatctttgtattaggagtgaaaaaagggggtccaatacagactacagaacttcgcctcctgttctggaccaagcagagaggactgccaaaacaaacacgactactgagactaactaatcagacaataactgtaggacctaagtacctaaccaacactgtgaaaactactaactagcccacccctcgaactggactcagttctttaagatgtttggccccggcaaaacaccaaagatggtgttctttagcaaaattgtgcagaggccttctgcatgttgggctgaacaacggcattcctatgctttcaaagagaccaagctcctagaatgatggccgagataactccttgctggaccagttttgagaggtgttcaatgctctccttcaatcagcaaaagaggattcagcttgacttggctcttgaggcaaagcccaagtttgaaagaattttaaaccagaattctctagtgaaaacacaagtggtaataatatgctggacattctcctcttcttggtcacaaacacacattattgagggcgggggaggcctttttttgctaaccggtcagccatccagcacctatttctaattgctagctaggatgatcttgcactttgctggagcacaggttttccaaatccgcctccatgcctcaaaggtcacagatccttggaagattttgcacttagcagttcacattttgtttcaactattttgaacaggtgaagtagcaaagttattttcagacgctggccttgtatgtattgcaagtttgatatctccatataggagagaccgtgaatcttgccgtgcactgttgtcggatggtagctttattgaagttttcttgaatatgtccttggaattatgtgaagcaagggacccaaagggcctctataagcttgctcgtgctgggaaaataaagggtgtcagaacggcaatttgtaggttagctcaaagtgttctctagtcgagaaatggaaaagcagaaaatgagttttacaggaatagatgacccttatgaagcaccactgaattgtgagattgagatcaaggaaatagatggtgtatgcccttcgccttctgacatggcggggcaagtggttacttaccttgaggagaaaggcttcctgcacgagtaggctgacgctgaatcgaagctacatccggggaaggtttcaatcagacaagcgcagaataagtcaaaagcgctgccagttaccgtatggttacatagattgatctggatgcctagtatttttctttccgcgcttgctctaccacaagttccattcagtttcattcagatgagcctagatggttcctaatttctttgacctctggaatagattacctgtaatgcaattctgataacagcttggggcagtatcgatttgtcacgggaaggtacgcctaatgttgagagaaactgtattcttgtgctccactttctgcagtgccgacgtgtaccctttccgttttactaaattataattagcttcccttcatttataagtttatttattttttatacactattcttgttacatatctaagtatgtctggatatatagcaaaaaaaaaaaaaa

SEQ ID NO: 22615 - DNA, 3460 bp, Zea Mays
acactttcttagcaggtaactgcagacggtcactgacgtgtgggcattatctaggcttggtccctaatgtcagtgacggagcaggttccaaatatgaagcttcagtagtgtatcgtgagaacacgtcggtgccaggctgccagcagcaacgaagccgcaccaggccccgcactgcccatggacgcacgcctcccggggctctcgtgtccctgtccgtctcccgtttgccgcctccaccgcaacgcggcgcgcggggtggcggtgctctcgcgatcctcgtgtcgattccagcggcgggggtgccattccctcccctggccgttgcccgcgcctcgcggtcgcgcaccggaaccggagccccgccgcgaatctagggttgcctccgcctcgccccctcctcccgagactcctagcggcaggaattaggacgagggtaacaggcgacagaggctgcgaaggacgccccctcgtcgaatgcgccggcgaccgatccgtggaggagcagccggagcacgcaggagccgctgatccaacgcgcgcagccattgatccatcgccgccagacgccatcgcgcccagccgcccagacgcctgtgctccagccgccgtcgtgcgcgcccaggagctgccagccgccatcgcgcgcgcccaggagccgccagagccagacgccgtcggccgtcctccaccgccctccaggtacgccgccggccccctcctccctcctccctccaccgccacccccaaagccgccaccgccgccagctactgcctctcccgtaccgccgccgccatcgtacgagcaggccgtaggggtgggtggtggccgaagggaggaggatgacgacgagggcgccggggcggtgatacgggcacacctgctctctgacttcaaggccgcggtgcgtgcaggaaaagtactggtgtccgacccgtcgtctggaaaggtccccactcgcatcctcttctgattctatagcgaattttggttgagagttcggagttctgcacttcctacttgccctgcaagagtttagtgttgatatttcattgggatagttggtcatttttccattctttctagctgacttatgtatgtcctcattatttttctggttgtattcttgtattgactattgagacatggagataaaagttatgtagtgtataatttttttatatctgcagcgctggtggtttgtttggtaaatggggaatggacaatactctgttggttccctgttaagtgttacattttcaatgcggtcatggaaatggaattagatgttgctgttgtgaagagagatgaccttggaaatgctcatggtcttaatcttgatgagttcgatgatgttgaagggcaagctttgaaaatgtcatccactgtgccgaagtcatcaaatatcttctggcatgattgcctagttggcaagactgatcgccagaagctactcaaccagaaaggctgtgttgtctggatcacaggccttagtggctcaggtaaaagtaccttggcatgtacattaggccgggagctccacacaagagggaagcttgcatatgttcttgacggtgataacttaagacatggtctgaacaaggatcttggctttaaagctgaagatcgtgctgaaaatataaggagagttggtaagtgtctcaccaatatagataaaaaaggacagacctagtgctggtggggaaggaataagacaagccttaccctgcattgcatcgaacccgaacctttggctcagtggaaaggcttcccatcacttcgctaggcctgttcttctgtctcgccaatatagatgtctattatatttcaaggaactcccacgaaagtaaaagcatgataaacaagtcttgcttctgccattattttatctttccagcattctgcagttcacatttttccttgaatacacgggagagctgtgtatctttgtattaggagtgaaaaaagggggtccaatacagactacagaacttcgcctcctgttctggaccaagcagagaggactgccaaaacaaacacgactactgagactaactaatcagacaataactgtaggacctaagtacctaaccaacactgtgaaaactactaactagcccacccctcgaactggactcagttctttaagatgtttggccccggcaaaacaccaaagatggtgttctttagcaaaattgtgcagaggccttctgcatgttgggctgaacaacggcattcctatgctttcaaagagaccaagctcctagaatgatggccgagataactccttgctggaccagttttgagaggtgttcaatgctctccttcaatcagcaaaagaggattcagcttgacttggctcttgaggcaaagcccaagtttgaaagaattttaaaccagaattctctagtgaaaacacaagtggtaataatatgctggacattctcctcttcttggtcacaaacacacattattgagggcgggggaggcctttttttgctaaccggtcagccatccagcacctatttctaattgctagctaggatgatcttgcactttgctggagcacaggttttccaaatccgcctccatgcctcaaaggtcacagatccttggaagattttgcacttagcagttcacattttgtttcaactattttgaacaggtgaagtagcaaagttattttcagacgctggccttgtatgtattgcaagtttgatatctccatataggagagaccgtgaatcttgccgtgcactgttgtcggatggtagctttattgaagttttcttgaatatgtccttggaattatgtgaagcaagggacccaaagggcctctataagcttgctcgtgctgggaaaataaagggttttacaggaatagatgacccttatgaagcaccactgaattgtgagattgagatcaaggaaatagatggtgtatgcccttcgccttctgacatggcggggcaagtggttacttaccttgaggagaaaggcttcctgcacgagtaggctgacgctgaatcgaagctacatccggggaaggtttcaatcagacaagcgcagaataagtcaaaagcgctgccagttaccgtatggttacatagattgatctggatgcctagtatttttctttccgcgcttgctctaccacaagttccattcagtttcattcagatgagcctagatggttcctaatttctttgacctctggaatagattacctgtaatgcaattctgataacagcttggggcagtatcgatttgtcacgggaaggtacgcctaatgttgagagaaactgtattcttgtgctccactttctgcagtgccgacgtgtaccctttccgttttactaaattataattagcttcccttcatttataagtttatttattttttatacactattcttgttacatatctaagtatgtctggatatatagcaaaaaaaaaaaaaa

SEQ ID NO: 22616 - DNA, 2825 bp, Zea Mays
acactttcttagcaggtaactgcagacggtcactgacgtgtgggcattatctaggcttggtccctaatgtcagtgacggagcaggttccaaatatgaagcttcagtagtgtatcgtgagaacacgtcggtgccaggctgccagcagcaacgaagccgcaccaggccccgcactgcccatggacgcacgcctcccggggctctcgtgtccctgtccgtctcccgtttgccgcctccaccgcaacgcggcgcgcggggtggcggtgctctcgcgatcctcgtgtcgattccagcggcgggggtgccattccctcccctggccgttgcccgcgcctcgcggtcgcgcaccggaaccggagccccgccgcgaatctagggttgcctccgcctcgccccctcctcccgagactcctagcggcaggaattaggacgagggtaacaggcgacagaggctgcgaaggacgccccctcgtcgaatgcgccggcgaccgatccgtggaggagcagccggagcacgcaggaggttagtctaggcacgtatcgcctctcaatccctcttcaccctagacggttcgatccaatgtacttgctaattgctgatcgggttacgcggatgcgtgtagattgagcggaattccagatgtactcccatttctacggagtagcagacctcataatcatatctccttgtcttccgcgattttctgcacttgatcgtctttagttggtggcgaaatgcttattctgggtttctacctttacctcgagcgcgacggtggtggacatttttatgcggtcttgaggaggaccaaggaggtgccctatagcttccacggggccaaatgtgcgagagtgacacggtgatgggtggcggggagaaggttttgtccgggtgcctgactcatcaaggatctagagaaagggaagcaggattggagagattgtttggataattcgagtgcgacgtgagtgaggaactgaggatagccggccagttcatttctaaactggtttagggggtgtttgaatgcactgaaattaatagttagttggctaaaaattgttagtggaattagctagctaacaaataactacctattcatgattattaaaacgtcgtttaaacgacgattaagcgtcgtttaaacgctaaaacgcgattagtagataaaacgtccgcacattttaccaaaactgcgtagaacgtccgttctggacgtttaaacgacgtttacacgtcggaacgcacgttctggacgttctatgcgctatatggacgttctatgctcatagcgttcgtgggccagccgctgatccaacgcgcgcagccattgatccatcgccgccagacgccatcgcgcccagccgcccagacgcctgtgctccagccgccgtcgtgcgcgcccaggagctgccagccgccatcgcgcgcgcccaggagccgccagagccagacgccgtcggccgtcctccaccgccctccaggtacgccgccggccccctcctccctcctccctccaccgccacccccaaagccgccaccgccgccagctactgcctctcccgtaccgccgccgccatcgtacgagcaggccgtaggggtgggtggtggccgaagggaggaggatgacgacgagggcgccggggcggtgatacgggcacacctgctctctgacttcaaggccgcggtgcgtgcaggaaaagtactggtgtccgacccgtcgtctggaaagttgaagggcaagctttgaaaatgtcatccactgtgccgaagtcatcaaatatcttctggcatgattgcctagttggcaagactgatcgccagaagctactcaaccagaaaggctgtgttgtctggatcacaggccttagtggctcaggtaaaagtaccttggcatgtacattaggccgggagctccacacaagagggaagcttgcatatgttcttgacggtgataacttaagacatggtctgaacaaggatcttggctttaaagctgaagatcgtgctgaaaatataaggagagttggtgaagtagcaaagttattttcagacgctggccttgtatgtattgcaagtttgatatctccatataggagagaccgtgaatcttgccgtgcactgttgtcggatggtagctttattgaagttttcttgaatatgtccttggaattatgtgaagcaagggacccaaagggcctctataagcttgctcgtgctgggaaaataaagggttttacaggaatagatgacccttatgaagcaccactgaattgtgagattgagatcaaggaaatagatggtgtatgcccttcgccttctgacatggcggggcaagtggttacttaccttgaggagaaaggcttcctgcacgagtaggctgacgctgaatcgaagctacatccggggaaggtttcaatcagacaagcgcagaataagtcaaaagcgctgccagttaccgtatggttacatagattgatctggatgcctagtatttttctttccgcgcttgctctaccacaagttccattcagtttcattcagatgagcctagatggttcctaatttctttgacctctggaatagattacctgtaatgcaattctgataacagcttggggcagtatcgatttgtcacgggaaggtacgcctaatgttgagagaaactgtattcttgtgctccactttctgcagtgccgacgtgtaccctttccgttttactaaattataattagcttcccttcatttataagtttatttattttttatacactattcttgttacatatctaagtatgtctggatatatagcaaaaaaaaaaaaaa

SEQ ID NO: 22617 - DNA, 1625 bp, Zea Mays
acactttcttagcaggtaactgcagacggtcactgacgtgtgggcattatctaggcttggtccctaatgtcagtgacggagcaggttccaaatatgaagcttcagtagtgtatcgtgagaacacgtcggtgccaggctgccagcagcaacgaagccgcaccaggccccgcactgcccatggacgcacgcctcccggggctctcgtgtccctgtccgtctcccgtttgccgcctccaccgcaacgcggcgcgcggggtggcggtgctctcgcgatcctcgtgtcgattccagcggcgggggtgccattccctcccctggccgttgcccgcgcctcgcggtcgcgcaccggaaccggagccccgccgcgaatctagggttgcctccgcctcgccccctcctcccgagactcctagcggcaggaattaggacgagggtaacaggcgacagaggctgcgaaggacgccccctcgtcgaatgcgccggcgaccgatccgtggaggagcagccggagcacgcaggaggttagtctagttgaagggcaagctttgaaaatgtcatccactgtgccgaagtcatcaaatatcttctggcatgattgcctagttggcaagactgatcgccagaagctactcaaccagaaaggctgtgttgtctggatcacaggccttagtggctcaggtaaaagtaccttggcatgtacattaggccgggagctccacacaagagggaagcttgcatatgttcttgacggtgataacttaagacatggtctgaacaaggatcttggctttaaagctgaagatcgtgctgaaaatataaggagagttggtgaagtagcaaagttattttcagacgctggccttgtatgtattgcaagtttgatatctccatataggagagaccgtgaatcttgccgtgcactgttgtcggatggtagctttattgaagttttcttgaatatgtccttggaattatgtgaagcaagggacccaaagggcctctataagcttgctcgtgctgggaaaataaagggttttacaggaatagatgacccttatgaagcaccactgaattgtgagattgagatcaaggaaatagatggtgtatgcccttcgccttctgacatggcggggcaagtggttacttaccttgaggagaaaggcttcctgcacgagtaggctgacgctgaatcgaagctacatccggggaaggtttcaatcagacaagcgcagaataagtcaaaagcgctgccagttaccgtatggttacatagattgatctggatgcctagtatttttctttccgcgcttgctctaccacaagttccattcagtttcattcagatgagcctagatggttcctaatttctttgacctctggaatagattacctgtaatgcaattctgataacagcttggggcagtatcgatttgtcacgggaaggtacgcctaatgttgagagaaactgtattcttgtgctccactttctgcagtgccgacgtgtaccctttccgttttactaaattataattagcttcccttcatttataagtttatttattttttatacactattcttgttacatatctaagtatgtctggatatatagcaaaaaaaaaaaaaa

SEQ ID NO: 22618 - DNA, 3033 bp, Zea Mays
acactttcttagcaggtaactgcagacggtcactgacgtgtgggcattatctaggcttggtccctaatgtcagtgacggagcaggttccaaatatgaagcttcagtagtgtatcgtgagaacacgtcggtgccaggctgccagcagcaacgaagccgcaccaggccccgcactgcccatggacgcacgcctcccggggctctcgtgtccctgtccgtctcccgtttgccgcctccaccgcaacgcggcgcgcggggtggcggtgctctcgcgatcctcgtgtcgattccagcggcgggggtgccattccctcccctggccgttgcccgcgcctcgcggtcgcgcaccggaaccggagccccgccgcgaatctagggttgcctccgcctcgccccctcctcccgagactcctagcggcaggaattaggacgagggtaacaggcgacagaggctgcgaaggacgccccctcgtcgaatgcgccggcgaccgatccgtggaggagcagccggagcacgcaggagccattgatccatcgccgccagacgccatcgcgcccagccgcccagacgcctgtgctccagccgccgtcgtgcgcgcccaggagctgccagccgccatcgcgcgcgcccaggagccgccagagccagacgccgtcggccgtcctccaccgccctccaggtacgccgccggccccctcctccctcctccctccaccgccacccccaaagccgccaccgccgccagctactgcctctcccgtaccgccgccgccatcgtacgagcaggccgtaggggtgggtggtggccgaagggaggaggatgacgacgagggcgccggggcggtgatacgggcacacctgctctctgacttcaaggccgcggtgcgtgcaggaaaagtactggtgtccgacccgtcgtctggaaagttgaagggcaagctttgaaaatgtcatccactgtgccgaagtcatcaaatatcttctggcatgattgcctagttggcaagactgatcgccagaagctactcaaccagaaaggctgtgttgtctggatcacaggccttagtggctcaggtaaaagtaccttggcatgtacattaggccgggagctccacacaagagggaagcttgcatatgttcttgacggtgataacttaagacatggtctgaacaaggatcttggctttaaagctgaagatcgtgctgaaaatataaggagagttggtaagtgtctcaccaatatagataaaaaaggacagacctagtgctggtggggaaggaataagacaagccttaccctgcattgcatcgaacccgaacctttggctcagtggaaaggcttcccatcacttcgctaggcctgttcttctgtctcgccaatatagatgtctattatatttcaaggaactcccacgaaagtaaaagcatgataaacaagtcttgcttctgccattattttatctttccagcattctgcagttcacatttttccttgaatacacgggagagctgtgtatctttgtattaggagtgaaaaaagggggtccaatacagactacagaacttcgcctcctgttctggaccaagcagagaggactgccaaaacaaacacgactactgagactaactaatcagacaataactgtaggacctaagtacctaaccaacactgtgaaaactactaactagcccacccctcgaactggactcagttctttaagatgtttggccccggcaaaacaccaaagatggtgttctttagcaaaattgtgcagaggccttctgcatgttgggctgaacaacggcattcctatgctttcaaagagaccaagctcctagaatgatggccgagataactccttgctggaccagttttgagaggtgttcaatgctctccttcaatcagcaaaagaggattcagcttgacttggctcttgaggcaaagcccaagtttgaaagaattttaaaccagaattctctagtgaaaacacaagtggtaataatatgctggacattctcctcttcttggtcacaaacacacattattgagggcgggggaggcctttttttgctaaccggtcagccatccagcacctatttctaattgctagctaggatgatcttgcactttgctggagcacaggttttccaaatccgcctccatgcctcaaaggtcacagatccttggaagattttgcacttagcagttcacattttgtttcaactattttgaacaggtgaagtagcaaagttattttcagacgctggccttgtatgtattgcaagtttgatatctccatataggagagaccgtgaatcttgccgtgcactgttgtcggatggtagctttattgaagttttcttgaatatgtccttggaattatgtgaagcaagggacccaaagggcctctataagcttgctcgtgctgggaaaataaagggttttacaggaatagatgacccttatgaagcaccactgaattgtgagattgagatcaaggaaatagatggtgtatgcccttcgccttctgacatggcggggcaagtggttacttaccttgaggagaaaggcttcctgcacgagtaggctgacgctgaatcgaagctacatccggggaaggtttcaatcagacaagcgcagaataagtcaaaagcgctgccagttaccgtatggttacatagattgatctggatgcctagtatttttctttccgcgcttgctctaccacaagttccattcagtttcattcagatgagcctagatggttcctaatttctttgacctctggaatagattacctgtaatgcaattctgataacagcttggggcagtatcgatttgtcacgggaaggtacgcctaatgttgagagaaactgtattcttgtgctccactttctgcagtgccgacgtgtaccctttccgttttactaaattataattagcttcccttcatttataagtttatttattttttatacactattcttgttacatatctaagtatgtctggatatatagcaaaaaaaaaaaaaa

SEQ ID NO: 22619 - DNA, 4928 bp, Zea Mays
acactttcttagcaggtaactgcagacggtcactgacgtgtgggcattatctaggcttggtccctaatgtcagtgacggagcaggttccaaatatgaagcttcagtagtgtatcgtgagaacacgtcggtgccaggctgccagcagcaacgaagccgcaccaggccccgcactgcccatggacgcacgcctcccggggctctcgtgtccctgtccgtctcccgtttgccgcctccaccgcaacgcggcgcgcggggtggcggtgctctcgcgatcctcgtgtcgattccagcggcgggggtgccattccctcccctggccgttgcccgcgcctcgcggtcgcgcaccggaaccggagccccgccgcgaatctagggttgcctccgcctcgccccctcctcccgagactcctagcggcaggaattaggacgagggtaacaggcgacagaggctgcgaaggacgccccctcgtcgaatgcgccggcgaccgatccgtggaggagcagccggagcacgcaggagattgagcggaattccagatgtactcccatttctacggagtagcagacctcataatcatatctccttgtcttccgcgattttctgcacttgatcgtctttagttggtggcgaaatgcttattctgggtttctacctttacctcgagcgcgacggtggtggacatttttatgcggtcttgaggaggaccaaggaggtgccctatagcttccacggggccaaatgtgcgagagtgacacggtgatgggtggcggggagaaggttttgtccgggtgcctgactcatcaaggatctagagaaagggaagcaggattggagagattgtttggataattcgagtgcgacgtgagtgaggaactgaggatagccggccagttcatttctaaactggtttagggggtgtttgaatgcactgaaattaatagttagttggctaaaaattgttagtggaattagctagctaacaaataactacctattcatgattattaaaacgtcgtttaaacgacgattaagcgtcgtttaaacgctaaaacgcgattagtagataaaacgtccgcacattttaccaaaactgcgtagaacgtccgttctggacgtttaaacgacgtttacacgtcggaacgcacgttctggacgttctatgcgctatatggacgttctatgctcatagcgttcgtgggccagccgctgatccaacgcgcgcagccattgatccatcgccgccagacgccatcgcgcccagccgcccagacgcctgtgctccagccgccgtcgtgcgcgcccaggagctgccagccgccatcgcgcgcgcccaggagccgccagagccagacgccgtcggccgtcctccaccgccctccaggaaaagtactggtgtccgacccgtcgtctggaaaggtccccactcgcatcctcttctgattctatagcgaattttggttgagagttcggagttctgcacttcctacttgccctgcaagagtttagtgttgatatttcattgggatagttggtcatttttccattctttctagctgacttatgtatgtcctcattatttttctggttgtattcttgtattgactattgagacatggagataaaagttatgtagtgtataatttttttatatctgcagcgctggtggtttgtttggtaaatggggaatggacaatactctgttggttccctgttaagtgttacattttcaatgcggtcatggaaatggaattagatgttgctgttgtgaagagagatgaccttggaaatgctcatggtcttaatcttgatgagttcgatgatgttgaagggcaagctttgaaaatgtcatccactgtgccgaagtcatcaaatatcttctggcatgattgcctagttggcaagactgatcgccagaagctactcaaccagaaaggctgtgttgtctggatcacaggccttagtggctcaggtaagcaaaccttgttttctctcgaactggtttgttgtgtgcttcttgcattgttgatgcaattgttaaaaaattttaagctaaaactaagataacgtcaactgcagttggtaagataatgtcaactgcagttggtgtctctttctgcttcgtatatatattatatcttctttgtttgcctcttgttggataatttcatctgtcatttatatgtacatggacagatttctatactgcactgttttgcttgaattattgaattctattaaagtcattttggcccaatgaaggattactgttttattcattttagagtacagaaaattgatgctttcacagttttgttactgaacggctttctagttttcctttgtctctgcatccattcaattccatcttcttcacgaatttggcaaaaaaaaaattatatattttttttcagaaaataagttcaactctgttctagatttatcaataagcaacctattcgttttggctttgataaattacataccttgccttaaatatatagtttgctgacatgtactgacactcttctgggcggttactatgctggtttctcgaagtttggttttatttagttgagggaagtgccttgggcaccttgatgaatatcttgtaagctggtgactccagcagaactaaactttgttttctataagttgggatcaatggtctttggtctaaaaaaggtaaatacgcaaagtttccaaaagaactctaatattttttttttcaatttgtatggcatatgcctactctgtttactgtcactgcattccctcttcacagttcttcatgacctgcattgcaatttttttagaataaatcaggatctattttctgttcattcaaaggatagttacatttaaatgataaatctccaatatcatttgtccttcaaattgaatcttttagtttttttaaatggtattcttttaatctaatttcttttcaattttttcatcttgctaaggtaaaagtaccttggcatgtacattaggccgggagctccacacaagagggaagcttgcatatgttcttgacggtgataacttaagacatggtctgaacaaggatcttggctttaaagctgaagatcgtgctgaaaatataaggagagttggtaagtgtctcaccaatatagataaaaaaggacagacctagtgctggtggggaaggaataagacaagccttaccctgcattgcatcgaacccgaacctttggctcagtggaaaggcttcccatcacttcgctaggcctgttcttctgtctcgccaatatagatgtctattatatttcaaggaactcccacgaaagtaaaagcatgataaacaagtcttgcttctgccattattttatctttccagcattctgcagttcacatttttccttgaatacacgggagagctgtgtatctttgtattaggagtgaaaaaagggggtccaatacagactacagaacttcgcctcctgttctggaccaagcagagaggactgccaaaacaaacacgactactgagactaactaatcagacaataactgtaggacctaagtacctaaccaacactgtgaaaactactaactagcccacccctcgaactggactcagttctttaagatgtttggccccggcaaaacaccaaagatggtgttctttagcaaaattgtgcagaggccttctgcatgttgggctgaacaacggcattcctatgctttcaaagagaccaagctcctagaatgatggccgagataactccttgctggaccagttttgagaggtgttcaatgctctccttcaatcagcaaaagaggattcagcttgacttggctcttgaggcaaagcccaagtttgaaagaattttaaaccagaattctctagtgaaaacacaagtggtaataatatgctggacattctcctcttcttggtcacaaacacacattattgagggcgggggaggcctttttttgctaaccggtcagccatccagcacctatttctaattgctagctaggatgatcttgcactttgctggagcacaggttttccaaatccgcctccatgcctcaaaggtcacagatccttggaagattttgcacttagcagttcacattttgtttcaactattttgaacaggtgaagtagcaaagttattttcagacgctggccttgtatgtattgcaagtttgatatctccatataggagagaccgtgaatcttgccgtgcactgttgtcggatggtagctttattgaagttttcttgaatatgtccttggaattatgtgaagcaagggacccaaagggcctctataagcttgctcgtgctgggaaaataaagggttttacaggaatagatgacccttatgaagcaccactgaattgtgagattgagatcaaggaaatagatggtgtatgcccttcgccttctgacatggcggggcaagtggttacttaccttgaggagaaaggcttcctgcacgagtaggctgacgctgaatcgaagctacatccggggaaggtttcaatcagacaagcgcagaataagtcaaaagcgctgccagttaccgtatggttacatagattgatctggatgcctagtatttttctttccgcgcttgctctaccacaagttccattcagtttcattcagatgagcctagatggttcctaatttctttgacctctggaatagattacctgtaatgcaattctgataacagcttggggcagtatcgatttgtcacgggaaggtacgcctaatgttgagagaaactgtattcttgtgctccactttctgcagtgccgacgtgtaccctttccgttttactaaattataattagcttcccttcatttataagtttatttattttttatacactattcttgttacatatctaagtatgtctggatatatagcaaaaaaaaaaaaaa

SEQ ID NO: 22620 - DNA, 2628 bp, Zea Mays
acactttcttagcaggtaactgcagacggtcactgacgtgtgggcattatctaggcttggtccctaatgtcagtgacggagcaggttccaaatatgaagcttcagtagtgtatcgtgagaacacgtcggtgccaggctgccagcagcaacgaagccgcaccaggccccgcactgcccatggacgcacgcctcccggggctctcgtgtccctgtccgtctcccgtttgccgcctccaccgcaacgcggcgcgcggggtggcggtgctctcgcgatcctcgtgtcgattccagcggcgggggtgccattccctcccctggccgttgcccgcgcctcgcggtcgcgcaccggaaccggagccccgccgcgaatctagggttgcctccgcctcgccccctcctcccgagactcctagcggcaggaattaggacgagggtaacaggcgacagaggctgcgaaggacgccccctcgtcgaatgcgccggcgaccgatccgtggaggagcagccggagcacgcaggagttgaagggcaagctttgaaaatgtcatccactgtgccgaagtcatcaaatatcttctggcatgattgcctagttggcaagactgatcgccagaagctactcaaccagaaaggctgtgttgtctggatcacaggccttagtggctcaggtaaaagtaccttggcatgtacattaggccgggagctccacacaagagggaagcttgcatatgttcttgacggtgataacttaagacatggtctgaacaaggatcttggctttaaagctgaagatcgtgctgaaaatataaggagagttggtaagtgtctcaccaatatagataaaaaaggacagacctagtgctggtggggaaggaataagacaagccttaccctgcattgcatcgaacccgaacctttggctcagtggaaaggcttcccatcacttcgctaggcctgttcttctgtctcgccaatatagatgtctattatatttcaaggaactcccacgaaagtaaaagcatgataaacaagtcttgcttctgccattattttatctttccagcattctgcagttcacatttttccttgaatacacgggagagctgtgtatctttgtattaggagtgaaaaaagggggtccaatacagactacagaacttcgcctcctgttctggaccaagcagagaggactgccaaaacaaacacgactactgagactaactaatcagacaataactgtaggacctaagtacctaaccaacactgtgaaaactactaactagcccacccctcgaactggactcagttctttaagatgtttggccccggcaaaacaccaaagatggtgttctttagcaaaattgtgcagaggccttctgcatgttgggctgaacaacggcattcctatgctttcaaagagaccaagctcctagaatgatggccgagataactccttgctggaccagttttgagaggtgttcaatgctctccttcaatcagcaaaagaggattcagcttgacttggctcttgaggcaaagcccaagtttgaaagaattttaaaccagaattctctagtgaaaacacaagtggtaataatatgctggacattctcctcttcttggtcacaaacacacattattgagggcgggggaggcctttttttgctaaccggtcagccatccagcacctatttctaattgctagctaggatgatcttgcactttgctggagcacaggttttccaaatccgcctccatgcctcaaaggtcacagatccttggaagattttgcacttagcagttcacattttgtttcaactattttgaacaggtgaagtagcaaagttattttcagacgctggccttgtatgtattgcaagtttgatatctccatataggagagaccgtgaatcttgccgtgcactgttgtcggatggtagctttattgaagttttcttgaatatgtccttggaattatgtgaagcaagggacccaaagggcctctataagcttgctcgtgctgggaaaataaagggttttacaggaatagatgacccttatgaagcaccactgaattgtgagattgagatcaaggaaatagatggtgtatgcccttcgccttctgacatggcggggcaagtggttacttaccttgaggagaaaggcttcctgcacgagtaggctgacgctgaatcgaagctacatccggggaaggtttcaatcagacaagcgcagaataagtcaaaagcgctgccagttaccgtatggttacatagattgatctggatgcctagtatttttctttccgcgcttgctctaccacaagttccattcagtttcattcagatgagcctagatggttcctaatttctttgacctctggaatagattacctgtaatgcaattctgataacagcttggggcagtatcgatttgtcacgggaaggtacgcctaatgttgagagaaactgtattcttgtgctccactttctgcagtgccgacgtgtaccctttccgttttactaaattataattagcttcccttcatttataagtttatttattttttatacactattcttgttacatatctaagtatgtctggatatatagcaaaaaaaaaaaaaa

SEQ ID NO: 22621 - DNA, 1318 bp, Zea Mays
acactttcttagcaggtaactgcagacggtcactgacgtgtgggcattatctaggcttggtccctaatgtcagtgacggagcaggttccaaatatgaagcttcagtagtgtatcgtgagaacacgtcggtgccaggctgccagcagcaacgaagccgcaccaggccccgcactgcccatggacgcacgcctcccggggctctcgtgtccctgtccgtctcccgtttgccgcctccaccgcaacgcggcgcgcggggtggcggtgctctcgcgatcctcgtgtcgattccagcggcgggggtgccattccctcccctggccgttgcccgcgcctcgcggtcgcgcaccggaaccggagccccgccgcgaatctagggttgcctccgcctcgccccctcctcccgagactcctagcggcaggaattaggacgagggtaacaggcgacagaggctgcgaaggacgccccctcgtcgaatgcgccggcgaccgatccgtggaggagcagccggagcacgcaggaggtgaagtagcaaagttattttcagacgctggccttgtatgtattgcaagtttgatatctccatataggagagaccgtgaatcttgccgtgcactgttgtcggatggtagctttattgaagttttcttgaatatgtccttggaattatgtgaagcaagggacccaaagggcctctataagcttgctcgtgctgggaaaataaagggttttacaggaatagatgacccttatgaagcaccactgaattgtgagattgagatcaaggaaatagatggtgtatgcccttcgccttctgacatggcggggcaagtggttacttaccttgaggagaaaggcttcctgcacgagtaggctgacgctgaatcgaagctacatccggggaaggtttcaatcagacaagcgcagaataagtcaaaagcgctgccagttaccgtatggttacatagattgatctggatgcctagtatttttctttccgcgcttgctctaccacaagttccattcagtttcattcagatgagcctagatggttcctaatttctttgacctctggaatagattacctgtaatgcaattctgataacagcttggggcagtatcgatttgtcacgggaaggtacgcctaatgttgagagaaactgtattcttgtgctccactttctgcagtgccgacgtgtaccctttccgttttactaaattataattagcttcccttcatttataagtttatttattttttatacactattcttgttacatatctaagtatgtctggatatatagcaaaaaaaaaaaaaa

SEQ ID NO: 22622 - DNA, 2675 bp, Zea Mays
acactttcttagcaggtaactgcagacggtcactgacgtgtgggcattatctaggcttggtccctaatgtcagtgacggagcaggttccaaatatgaagcttcagtagtgtatcgtgagaacacgtcggtgccaggctgccagcagcaacgaagccgcaccaggccccgcactgcccatggacgcacgcctcccggggctctcgtgtccctgtccgtctcccgtttgccgcctccaccgcaacgcggcgcgcggggtggcggtgctctcgcgatcctcgtgtcgattccagcggcgggggtgccattccctcccctggccgttgcccgcgcctcgcggtcgcgcaccggaaccggagccccgccgcgaatctagggttgcctccgcctcgccccctcctcccgagactcctagcggcaggaattaggacgagggtaacaggcgacagaggctgcgaaggacgccccctcgtcgaatgcgccggcgaccgatccgtggaggagcagccggagcacgcaggaggttagtctaggcacgtatcgcctctcaatccctcttcaccctagacggttcgatccaatgtacttgctaattgctgatcgggttacgcggatgcgtgtagattgagcggaattccagatgtactcccatttctacggagtagcagacctcataatcatatctccttgtcttccgcgattttctgcacttgatcgtctttagttggtggcgaaatgcttattctgggtttctacctttacctcgagcgcgacggtggtggacatttttatgcggtcttgaggaggaccaaggaggtgccctatagcttccacggggccaaatgtgcgagagtgacacggtgatgggtggcggggagaaggttttgtccgggtgcctgactcatcaaggatctagagaaagggaagcaggattggagagattgtttggataattcgagtgcgacgtgagtgaggaactgaggatagccggccagttcatttctaaactggtttagggggtgtttgaatgcactgaaattaatagttagttggctaaaaattgttagtggaattagctagctaacaaataactacctattcatgattattaaaacgtcgtttaaacgacgattaagcgtcgtttaaacgctaaaacgcgattagtagataaaacgtccgcacattttaccaaaactgcgtagaacgtccgttctggacgtttaaacgacgtttacacgtcggaacgcacgttctggacgttctatgcgctatatggacgttctatgctcatagcgttcgtgggccagccgctgatccaacgcgcgcagccattgatccatcgccgccagacgccatcgcgcccagccgcccagacgcctgtgctccagccgccgtcgtgcgcgcccaggagctgccagccgccatcgcgcgcgcccaggagccgccagagccagacgccgtcggccgtcctccaccgccctccaggtacgccgccggccccctcctccctcctccctccaccgccacccccaaagccgccaccgccgccagctactgcctctcccgtaccgccgccgccatcgtacgagcaggccgtaggggtgggtggtggccgaagggaggaggatgacgacgagggcgccggggcggtgatacgggcacacctgctctctgacttcaaggccgcggtgcgtgcaggaaaagtactggtgtccgacccgtcgtctggaaagttgaagggcaagctttgaaaatgtcatccactgtgccgaagtcatcaaatatcttctggcatgattgcctagttggcaagactgatcgccagaagctactcaaccagaaaggctgtgttgtctggatcacaggccttagtggctcaggtgaagtagcaaagttattttcagacgctggccttgtatgtattgcaagtttgatatctccatataggagagaccgtgaatcttgccgtgcactgttgtcggatggtagctttattgaagttttcttgaatatgtccttggaattatgtgaagcaagggacccaaagggcctctataagcttgctcgtgctgggaaaataaagggttttacaggaatagatgacccttatgaagcaccactgaattgtgagattgagatcaaggaaatagatggtgtatgcccttcgccttctgacatggcggggcaagtggttacttaccttgaggagaaaggcttcctgcacgagtaggctgacgctgaatcgaagctacatccggggaaggtttcaatcagacaagcgcagaataagtcaaaagcgctgccagttaccgtatggttacatagattgatctggatgcctagtatttttctttccgcgcttgctctaccacaagttccattcagtttcattcagatgagcctagatggttcctaatttctttgacctctggaatagattacctgtaatgcaattctgataacagcttggggcagtatcgatttgtcacgggaaggtacgcctaatgttgagagaaactgtattcttgtgctccactttctgcagtgccgacgtgtaccctttccgttttactaaattataattagcttcccttcatttataagtttatttattttttatacactattcttgttacatatctaagtatgtctggatatatagcaaaaaaaaaaaaaa

SEQ ID NO: 22623 - DNA, 3625 bp, Zea Mays
acactttcttagcaggtaactgcagacggtcactgacgtgtgggcattatctaggcttggtccctaatgtcagtgacggagcaggttccaaatatgaagcttcagtagtgtatcgtgagaacacgtcggtgccaggctgccagcagcaacgaagccgcaccaggccccgcactgcccatggacgcacgcctcccggggctctcgtgtccctgtccgtctcccgtttgccgcctccaccgcaacgcggcgcgcggggtggcggtgctctcgcgatcctcgtgtcgattccagcggcgggggtgccattccctcccctggccgttgcccgcgcctcgcggtcgcgcaccggaaccggagccccgccgcgaatctagggttgcctccgcctcgccccctcctcccgagactcctagcggcaggaattaggacgagggtaacaggcgacagaggctgcgaaggacgccccctcgtcgaatgcgccggcgaccgatccgtggaggagcagccggagcacgcaggagttgaagggcaagctttgaaaatgtcatccactgtgccgaagtcatcaaatatcttctggcatgattgcctagttggcaagactgatcgccagaagctactcaaccagaaaggctgtgttgtctggatcacaggccttagtggctcaggtaagcaaaccttgttttctctcgaactggtttgttgtgtgcttcttgcattgttgatgcaattgttaaaaaattttaagctaaaactaagataacgtcaactgcagttggtaagataatgtcaactgcagttggtgtctctttctgcttcgtatatatattatatcttctttgtttgcctcttgttggataatttcatctgtcatttatatgtacatggacagatttctatactgcactgttttgcttgaattattgaattctattaaagtcattttggcccaatgaaggattactgttttattcattttagagtacagaaaattgatgctttcacagttttgttactgaacggctttctagttttcctttgtctctgcatccattcaattccatcttcttcacgaatttggcaaaaaaaaaattatatattttttttcagaaaataagttcaactctgttctagatttatcaataagcaacctattcgttttggctttgataaattacataccttgccttaaatatatagtttgctgacatgtactgacactcttctgggcggttactatgctggtttctcgaagtttggttttatttagttgagggaagtgccttgggcaccttgatgaatatcttgtaagctggtgactccagcagaactaaactttgttttctataagttgggatcaatggtctttggtctaaaaaaggtaaatacgcaaagtttccaaaagaactctaatattttttttttcaatttgtatggcatatgcctactctgtttactgtcactgcattccctcttcacagttcttcatgacctgcattgcaatttttttagaataaatcaggatctattttctgttcattcaaaggatagttacatttaaatgataaatctccaatatcatttgtccttcaaattgaatcttttagtttttttaaatggtattcttttaatctaatttcttttcaattttttcatcttgctaaggtaaaagtaccttggcatgtacattaggccgggagctccacacaagagggaagcttgcatatgttcttgacggtgataacttaagacatggtctgaacaaggatcttggctttaaagctgaagatcgtgctgaaaatataaggagagttggtaagtgtctcaccaatatagataaaaaaggacagacctagtgctggtggggaaggaataagacaagccttaccctgcattgcatcgaacccgaacctttggctcagtggaaaggcttcccatcacttcgctaggcctgttcttctgtctcgccaatatagatgtctattatatttcaaggaactcccacgaaagtaaaagcatgataaacaagtcttgcttctgccattattttatctttccagcattctgcagttcacatttttccttgaatacacgggagagctgtgtatctttgtattaggagtgaaaaaagggggtccaatacagactacagaacttcgcctcctgttctggaccaagcagagaggactgccaaaacaaacacgactactgagactaactaatcagacaataactgtaggacctaagtacctaaccaacactgtgaaaactactaactagcccacccctcgaactggactcagttctttaagatgtttggccccggcaaaacaccaaagatggtgttctttagcaaaattgtgcagaggccttctgcatgttgggctgaacaacggcattcctatgctttcaaagagaccaagctcctagaatgatggccgagataactccttgctggaccagttttgagaggtgttcaatgctctccttcaatcagcaaaagaggattcagcttgacttggctcttgaggcaaagcccaagtttgaaagaattttaaaccagaattctctagtgaaaacacaagtggtaataatatgctggacattctcctcttcttggtcacaaacacacattattgagggcgggggaggcctttttttgctaaccggtcagccatccagcacctatttctaattgctagctaggatgatcttgcactttgctggagcacaggttttccaaatccgcctccatgcctcaaaggtcacagatccttggaagattttgcacttagcagttcacattttgtttcaactattttgaacaggtgaagtagcaaagttattttcagacgctggccttgtatgtattgcaagtttgatatctccatataggagagaccgtgaatcttgccgtgcactgttgtcggatggtagctttattgaagttttcttgaatatgtccttggaattatgtgaagcaagggacccaaagggcctctataagcttgctcgtgctgggaaaataaagggttttacaggaatagatgacccttatgaagcaccactgaattgtgagattgagatcaaggaaatagatggtgtatgcccttcgccttctgacatggcggggcaagtggttacttaccttgaggagaaaggcttcctgcacgagtaggctgacgctgaatcgaagctacatccggggaaggtttcaatcagacaagcgcagaataagtcaaaagcgctgccagttaccgtatggttacatagattgatctggatgcctagtatttttctttccgcgcttgctctaccacaagttccattcagtttcattcagatgagcctagatggttcctaatttctttgacctctggaatagattacctgtaatgcaattctgataacagcttggggcagtatcgatttgtcacgggaaggtacgcctaatgttgagagaaactgtattcttgtgctccactttctgcagtgccgacgtgtaccctttccgttttactaaattataattagcttcccttcatttataagtttatttattttttatacactattcttgttacatatctaagtatgtctggatatatagcaaaaaaaaaaaaaa

SEQ ID NO: 22624 - DNA, 2447 bp, Zea Mays
acactttcttagcaggtaactgcagacggtcactgacgtgtgggcattatctaggcttggtccctaatgtcagtgacggagcaggttccaaatatgaagcttcagtagtgtatcgtgagaacacgtcggtgccaggctgccagcagcaacgaagccgcaccaggccccgcactgcccatggacgcacgcctcccggggctctcgtgtccctgtccgtctcccgtttgccgcctccaccgcaacgcggcgcgcggggtggcggtgctctcgcgatcctcgtgtcgattccagcggcgggggtgccattccctcccctggccgttgcccgcgcctcgcggtcgcgcaccggaaccggagccccgccgcgaatctagggttgcctccgcctcgccccctcctcccgagactcctagcggcaggaattaggacgagggtaacaggcgacagaggctgcgaaggacgccccctcgtcgaatgcgccggcgaccgatccgtggaggagcagccggagcacgcaggagccgctgatccaacgcgcgcagccattgatccatcgccgccagacgccatcgcgcccagccgcccagacgcctgtgctccagccgccgtcgtgcgcgcccaggagctgccagccgccatcgcgcgcgcccaggagccgccagagccagacgccgtcggccgtcctccaccgccctccaggtacgccgccggccccctcctccctcctccctccaccgccacccccaaagccgccaccgccgccagctactgcctctcccgtaccgccgccgccatcgtacgagcaggccgtaggggtgggtggtggccgaagggaggaggatgacgacgagggcgccggggcggtgatacgggcacacctgctctctgacttcaaggccgcggtgcgtgcaggaaaagtactggtgtccgacccgtcgtctggaaaggtccccactcgcatcctcttctgattctatagcgaattttggttgagagttcggagttctgcacttcctacttgccctgcaagagtttagtgttgatatttcattgggatagttggtcatttttccattctttctagctgacttatgtatgtcctcattatttttctggttgtattcttgtattgactattgagacatggagataaaagttatgtagtgtataatttttttatatctgcagcgctggtggtttgtttggtaaatggggaatggacaatactctgttggttccctgttaagtgttacattttcaatgcggtcatggaaatggaattagatgttgctgttgtgaagagagatgaccttggaaatgctcatggtcttaatcttgatgagttcgatgatgttgaagggcaagctttgaaaatgtcatccactgtgccgaagtcatcaaatatcttctggcatgattgcctagttggcaagactgatcgccagaagctactcaaccagaaaggctgtgttgtctggatcacaggccttagtggctcaggtaaaagtaccttggcatgtacattaggccgggagctccacacaagagggaagcttgcatatgttcttgacggtgataacttaagacatggtctgaacaaggatcttggctttaaagctgaagatcgtgctgaaaatataaggagagttggtgaagtagcaaagttattttcagacgctggccttgtatgtattgcaagtttgatatctccatataggagagaccgtgaatcttgccgtgcactgttgtcggatggtagctttattgaagttttcttgaatatgtccttggaattatgtgaagcaagggacccaaagggcctctataagcttgctcgtgctgggaaaataaagggttttacaggaatagatgacccttatgaagcaccactgaattgtgagattgagatcaaggaaatagatggtgtatgcccttcgccttctgacatggcggggcaagtggttacttaccttgaggagaaaggcttcctgcacgagtaggctgacgctgaatcgaagctacatccggggaaggtttcaatcagacaagcgcagaataagtcaaaagcgctgccagttaccgtatggttacatagattgatctggatgcctagtatttttctttccgcgcttgctctaccacaagttccattcagtttcattcagatgagcctagatggttcctaatttctttgacctctggaatagattacctgtaatgcaattctgataacagcttggggcagtatcgatttgtcacgggaaggtacgcctaatgttgagagaaactgtattcttgtgctccactttctgcagtgccgacgtgtaccctttccgttttactaaattataattagcttcccttcatttataagtttatttattttttatacactattcttgttacatatctaagtatgtctggatatatagcaaaaaaaaaaaaaa

SEQ ID NO: 22625 - DNA, 2494 bp, Zea Mays
gcgagaaccgcctccgcaacacccttccccaaacccattctccccacgcgcggcgcctccgcaacagcaaccgccgcgcccgagcccctccaccatgtcccattcccaccgctaccaatggcgcccgagcccgagcccaaacccacgcgctgcggcggccgagatcctgccttcaacgacgcgaaccccatcccccacgcgccgcggcggccgagatcccgccttcaacgacgcgaacgccaacggagcccgagcccacctcgccttcaacgcccctgcctccctctttctcctcctcccccgcatgcttccactgcttctctccagcggcgccgccaccgtccctctcgctccagcgagatccagatccggcgcggctcagagtggcaacgcgccgcaaccgcggccgcgccccacacgtgccctatccaaccaccatggagctcttccccatccatccaccacgccgagcgggaggtcgaagtgcgagcgctggccgaccaggcggcccacatagaggccgaggcgcgggccgtcgcgtgcaagaaggtcttccgctcctaccaggcgcttggcggacaccgcgccagcaacgtgcgcggcggcagaggcggctgctgcgcgcctcccgtggctcctccggccccacccccgcagccccagccgccgctgtcgccattgccggagcaccgtgacggaggcgaggacgatgacatgaacgcaaagcagcagccgcgcgagtgtccccactgcggccgcgtgttcttggggcaggctctcggggagcacatcatgcagtcccatgtgtgcgcctcgtcgccgcttgccggcaccgccaccgcctccaccacctcagccgccactcctgcgtcaccgaccaacagtccctccatgatcgatctgaacgtggcgccgcagtccgaggaggtggagcactctgccgtgtcagatccccgcttcaatccaggtgcctgaagctgaagcaggcagatcagcgccctcattctggatagttccgttgctcggaggtgattctaggttgagctttctcttgaagctgcaaatttagcacagggaaatgcaactctaggaataagtgactcttcagcagtatctgcaacaagagccagggcactggctgaggatgcatttttccatccatccattatgtcaatcagttatgcttcagtagagcactatttcgccatttacatgccatttttcgcaccagtttccttgcatgtgctgctggcggcaatcaaagagctgaaacgttacaaggcagagcgagcaaaatattcggcatttcttgcttcccaggcgacatcctcctgatctggtggtgattagggtttagggtttagggtttagggtttaggcaagtactacgagaagaaggggctcatcgctgaagcttgggaatccttcaatcgacccagaccatgccatgagtcatctttgttgaccttacccccacctcttagcgagagaattcttgtgattttcttgatttttgttgttcatgtttgatgtcactaattttatttgttgttgttgttgtgcagatttgagatcgagcgaagctaagcttttcatcaagatggcgcttgtaagtgtttattcaattagtagttgtttaagtagcctctatctcttacttttttatatgctagaggtgtgtttaagttgattgcattggtgagattattttattgtagtttcgacttgtggtgtggcatgtcatgatggcctcaaatcatcaggtaaattacttctctactgttgtaatggaaaacctgggccaagggagtaatttcgacttgcgtagtaatggaaaaaattaccttctctctttgagggttccaatccatttcgttctctatgattgtcacctacctttcctgagcctacttttgttgctactataagaataagtcaatgaaaaaaatcttcatctctatttgtttccgctatgtattgtgtagcttagagttgtctctcttagaggttaatttgtcatcatgctaatatttggtttgaaatctatgtatttctgcagtgttacaggtggccaccacaagcgaggggtctgcttcaacttcttgacagagacagatcggaggctttcttggcaatggaaagttttgttggtagtagtattagctttatagggggacatgtcattagggttgatcttgtgcttttgaggccttgcttacaggcacggtactactgaaatagttagcaaaagatggcaatactgatgtaatccagaatgtagcagtacatatcaactgccgtcttagtttcagttcatgaagtgaataatgcataccaaactatgtcccagttcaaagcatctagaacagtgaagtattatgtctgtcgcgttttctcattctgataattcatatcaactgcttgtgatgctttgccattatggaattgagtatgctgtgagttcagatcactttacaggatcattatggaattg

SEQ ID NO: 22626 - DNA, 2157 bp, Zea Mays
gcgagaaccgcctccgcaacacccttccccaaacccattctccccacgcgcggcgcctccgcaacagcaaccgccgcgcccgagcccctccaccatgtcccattcccaccgctaccaatggcgcccgagcccgagcccaaacccacgcgctgcggcggccgagatcctgccttcaacgacgcgaaccccatcccccacgcgccgcggcggccgagatcccgccttcaacgacgcgaacgccaacggagcccgagcccacctcgccttcaacgcccctgcctccctctttctcctcctcccccgcatgcttccactgcttctctccagcggcgccgccaccgtccctctcgctccagcgagatccagatccggcgcggctcagagtggcaacgcgccgcaaccgcggccgcgccccacacgtgccctatccaaccaccatggagctcttccccatccatccaccacgccgagcgggaggtcgaagtgcgagcgctggccgaccaggcggcccacatagaggccgaggcgcgggccgtcgcgtgcaagaaggtcttccgctcctaccaggcgcttggcggacaccgcgccagcaacgtgcgcggcggcagaggcggctgctgcgcgcctcccgtggctcctccggccccacccccgcagccccagccgccgctgtcgccattgccggagcaccgtgacggaggcgaggacgatgacatgaacgcaaagcagcagccgcgcgagtgtccccactgcggccgcgtgttcttggggcaggctctcggggagcacatcatgcagtcccatgtgtgcgcctcgtcgccgcttgccggcaccgccaccgcctccaccacctcagccgccactcctgcgtcaccgaccaacagtccctccatgatcgatctgaacgtggcgccgcagtccgaggaggtggagcactctgccgtgtcagatccccgcttcaatccaggtgcctgaagctgaagcaggcagatcagcgccctcattctggatagttccgttgctcggaggtgattctaggttgagctttctcttgaagctgcaaatttagcacagggaaatgcaactctaggaataagtgactcttcagcagtatctgcaacaagagccagggcactggctgaggatgcatttttccatccatccattatgtcaatcagttatgcttcagtagagcactatttcgccatttacatggtcagtacactattgcagacttgcatcagtttccaaaattttaaaatggcgctcataattttgtttccatgtgcatgttaatcagtacagtactacattaaaaactccatacttcctgcagccatttttcgcaccagtttccttgcatgtgctgctggcggcaatcaaagagctgaaacgttacaaggcagagcgagcaaaatattcggcatttcttgcttcccaggcgacatcctcctgatctggtggtgattagggtttagggtttagggtttagggtttaggcaagtactacgagaagaaggggctcatcgctgaagcttgggaatccttcaatcgacccagaccatgccatgagtcatctttgttgaccttacccccacctcttagcgagagaattcttgtgattttcttgatttttgttgttcatgtttgatgtcactaattttatttgttgttgttgttgtgcagatttgagatcgagcgaagctaagcttttcatcaagatggcgcttgtggccaccacaagcgaggggtctgcttcaacttcttgacagagacagatcggaggctttcttggcaatggaaagttttgttggtagtagtattagctttatagggggacatgtcattagggttgatcttgtgcttttgaggccttgcttacaggcacggtactactgaaatagttagcaaaagatggcaatactgatgtaatccagaatgtagcagtacatatcaactgccgtcttagtttcagttcatgaagtgaataatgcataccaaactatgtcccagttcaaagcatctagaacagtgaagtattatgtctgtcgcgttttctcattctgataattcatatcaactgcttgtgatgctttgccattatggaattgagtatgctgtgagttcagatcactttacaggatcattatggaattg

SEQ ID NO: 22627 - DNA, 2017 bp, Zea Mays
cccaaacccattctccccacgcgcggcgcctccgcaacagcaaccgccgcgcccgagcccctccaccatgtcccattcccaccgctaccaatggcgcccgagcccgagcccaaacccacgcgctgcggcggccgagatcctgccttcaacgacgcgaaccccatcccccacgcgccgcggcggccgagatcccgccttcaacgacgcgaacgccaacggagcccgagcccacctcgccttcaacgcccctgcctccctctttctcctcctcccccgcatgcttccactgcttctctccagcggcgccgccaccgtccctctcgctccagcgagatccagatccggcgcggctcagagtggcaacgcgccgcaaccgcggccgcgccccacacgtgccctatccaaccaccatggagctcttccccatccatccaccacgccgagcgggaggtcgaagtgcgagcgctggccgaccaggcggcccacatagaggccgaggcgcgggccgtcgcgtgcaagaaggtcttccgctcctaccaggcgcttggcggacaccgcgccagcaacgtgcgcggcggcagaggcggctgctgcgcgcctcccgtggctcctccggccccacccccgcagccccagccgccgctgtcgccattgccggagcaccgtgacggaggcgaggacgatgacatgaacgcaaagcagcagccgcgcgagtgtccccactgcggccgcgtgttcttggggcaggctctcggggagcacatcatgcagtcccatgtgtgcgcctcgtcgccgcttgccggcaccgccaccgcctccaccacctcagccgccactcctgcgtcaccgaccaacagtccctccatgatcgatctgaacgtggcgccgcagtccgaggaggtggagcactctgccgtgtcagatccccgcttcaatccaggtgcctgaagctgaagcaggcagatcagcgccctcattctggatagttccgttgctcggaggtgattctaggttgagctttctcttgaagctgcaaatttagcacagggaaatgcaactctaggaataagtgactcttcagcagtatctgcaacaagagccagggcactggctgaggatgcatttttccatccatccattatgtcaatcagttatgcttcagtagagcactatttcgccatttacatgccatttttcgcaccagtttccttgcatgtgctgctggcggcaatcaaagagctgaaacgttacaaggcagagcgagcaaaatattcggcatttcttgcttcccaggcgacatcctcctgatctggtggtgattagggtttagggtttagggtttagggtttaggcaagtactacgagaagaaggggctcatcgctgaagcttgggaatccttcaatcgacccagaccatgccatgagtcatctttgttgaccttacccccacctcttagcgagagaattcttgtgattttcttgatttttgttgttcatgtttgatgtcactaattttatttgttgttgttgttgtgcagatttgagatcgagcgaagctaagcttttcatcaagatggcgctttgttacaggtggccaccacaagcgaggggtctgcttcaacttcttgacagagacagatcggaggctttcttggcaatggaaagttttgttggtagtagtattagctttatagggggacatgtcattagggttgatcttgtgcttttgaggccttgcttacaggcacggtactactgaaatagttagcaaaagatggcaatactgatgtaatccagaatgtagcagtacatatcaactgccgtcttagtttcagttcatgaagtgaataatgcataccaaactatgtcccagttcaaagcatctagaacagtgaagtattatgtctgtcgcgttttctcattctgataattcatatcaactgcttgtgatgctttgccattatggaattgagtatgctgtgagttcagatcactttacaggatcattatggaattg

SEQ ID NO: 22628 - DNA, 2170 bp, Zea Mays
ccaaacccattctccccacgcgcggcgcctccgcaacagcaaccgccgcgcccgagcccctccaccatgtcccattcccaccgctaccaatggcgcccgagcccgagcccaaacccacgcgctgcggcggccgagatcctgccttcaacgacgcgaaccccatcccccacgcgccgcggcggccgagatcccgccttcaacgacgcgaacgccaacggagcccgagcccacctcgccttcaacgcccctgcctccctctttctcctcctcccccgcatgcttccactgcttctctccagcggcgccgccaccgtccctctcgctccagcgagatccagatccggcgcggctcagagtggcaacgcgccgcaaccgcggccgcgccccacacgtgccctatccaaccaccatggagctcttccccatccatccaccacgccgagcgggaggtcgaagtgcgagcgctggccgaccaggcggcccacatagaggccgaggcgcgggccgtcgcgtgcaagaaggtcttccgctcctaccaggcgcttggcggacaccgcgccagcaacgtgcgcggcggcagaggcggctgctgcgcgcctcccgtggctcctccggccccacccccgcagccccagccgccgctgtcgccattgccggagcaccgtgacggaggcgaggacgatgacatgaacgcaaagcagcagccgcgcgagtgtccccactgcggccgcgtgttcttggggcaggctctcggggagcacatcatgcagtcccatgtgtgcgcctcgtcgccgcttgccggcaccgccaccgcctccaccacctcagccgccactcctgcgtcaccgaccaacagtccctccatgatcgatctgaacgtggcgccgcagtccgaggaggtggagcactctgccgtgtcagatccccgcttcaatccaggtgcctgaagctgaagcaggcagatcagcgccctcattctggatagttccgttgctcggaggtgattctaggttgagctttctcttgaagctgcaaatttagcacagggaaatgcaactctaggaataagtgactcttcagcagtatctgcaacaagagccagggcactggctgaggatgcatttttccatccatccattatgtcaatcagttatgcttcagtagagcactatttcgccatttacatgccatttttcgcaccagtttccttgcatgtgctgctggcggcaatcaaagagctgaaacgttacaaggcagagcgagcaaaatattcggcatttcttgcttcccaggcgacatcctcctgatctggtggtgattagggtttagggtttagggtttagggtttaggcaagtactacgagaagaaggggctcatcgctgaagcttgggaatccttcaatcgacccagaccatgccatgagtcatctttgttgaccttacccccacctcttagcgagagaattcttgtgattttcttgatttttgttgttcatgtttgatgtcactaattttatttgttgttgttgttgtgcagatttgagatcgagcgaagctaagcttttcatcaagatggcgcttgtaagtgtttattcaattagtagttgtttaagtagcctctatctcttacttttttatatgctagaggtgtgtttaagttgattgcattggtgagattattttattgtagtttcgacttgtggtgtggcatgtcatgatggcctcaaatcatcagtgttacaggtggccaccacaagcgaggggtctgcttcaacttcttgacagagacagatcggaggctttcttggcaatggaaagttttgttggtagtagtattagctttatagggggacatgtcattagggttgatcttgtgcttttgaggccttgcttacaggcacggtactactgaaatagttagcaaaagatggcaatactgatgtaatccagaatgtagcagtacatatcaactgccgtcttagtttcagttcatgaagtgaataatgcataccaaactatgtcccagttcaaagcatctagaacagtgaagtattatgtctgtcgcgttttctcattctgataattcatatcaactgcttgtgatgctttgccattatggaattgagtatgctgtgagttcagatcactttacaggatcattatggaattg

SEQ ID NO: 22629 - DNA, 2377 bp, Zea Mays
gcggcgcctccgcaacagcaaccgccgcgcccgagcccctccaccatgtcccattcccaccgctaccaatggcgcccgagcccgagcccaaacccacgcgctgcggcggccgagatcctgccttcaacgacgcgaaccccatcccccacgcgccgcggcggccgagatcccgccttcaacgacgcgaacgccaacggagcccgagcccacctcgccttcaacgcccctgcctccctctttctcctcctcccccgcatgcttccactgcttctctccagcggcgccgccaccgtccctctcgctccagcgagatccagatccggcgcggctcagagtggcaacgcgccgcaaccgcggccgcgccccacacgtgccctatccaaccaccatggagctcttccccatccatccaccacgccgagcgggaggtcgaagtgcgagcgctggccgaccaggcggcccacatagaggccgaggcgcgggccgtcgcgtgcaagaaggtcttccgctcctaccaggcgcttggcggacaccgcgccagcaacgtgcgcggcggcagaggcggctgctgcgcgcctcccgtggctcctccggccccacccccgcagccccagccgccgctgtcgccattgccggagcaccgtgacggaggcgaggacgatgacatgaacgcaaagcagcagccgcgcgagtgtccccactgcggccgcgtgttcttggggcaggctctcggggagcacatcatgcagtcccatgtgtgcgcctcgtcgccgcttgccggcaccgccaccgcctccaccacctcagccgccactcctgcgtcaccgaccaacagtccctccatgatcgatctgaacgtggcgccgcagtccgaggaggtggagcactctgccgtgtcagatccccgcttcaatccaggtgcctgaagctgaagcaggcagatcagcgccctcattctggatagttccgttgctcggaggtgattctaggtgagcatcgtcagggggagataaaggttgagctttctcttgaagctgcaaatttagcacagggaaatgcaactctaggaataagtgactcttcagcagtatctgcaacaagagccagggcactggctgaggatgcatttttccatccatccattatgtcaatcagttatgcttcagtagagcactatttcgccatttacatgccatttttcgcaccagtttccttgcatgtgctgctggcggcaatcaaagagctgaaacgttacaaggcagagcgagcaaaatattcggcatttcttgcttcccaggcgacatcctcctgatctggtggtgattagggtttagggtttagggtttagggtttaggcaagtactacgagaagaaggggctcatcgctgaagcttgggaatccttcaatcgacccagaccatgccatgagtcatctttgttgaccttacccccacctcttagcgagagaattcttgtgattttcttgatttttgttgttcatgtttgatgtcactaattttatttgttgttgttgttgtgcagatttgagatcgagcgaagctaagcttttcatcaagatggcgcttattattttattgtagtttcgacttgtggtgtggcatgtcatgatggcctcaaatcatcaggtaaattacttctctactgttgtaatggaaaacctgggccaagggagtaatttcgacttgcgtagtaatggaaaaaattaccttctctctttgagggttccaatccatttcgttctctatgattgtcacctacctttcctgagcctacttttgttgctactataagaataagtcaatgaaaaaaatcttcatctctatttgtttccgctatgtattgtgtagcttagagttgtctctcttagaggttaatttgtcatcatgctaatatttggtttgaaatctatgtatttctgcagtgttacaggtggccaccacaagcgaggggtctgcttcaacttcttgacagagacagatcggaggctttcttggcaatggaaagttttgttggtagtagtattagctttatagggggacatgtcattagggttgatcttgtgcttttgaggccttgcttacaggcacggtactactgaaatagttagcaaaagatggcaatactgatgtaatccagaatgtagcagtacatatcaactgccgtcttagtttcagttcatgaagtgaataatgcataccaaactatgtcccagttcaaagcatctagaacagtgaagtattatgtctgtcgcgttttctcattctgataattcatatcaactgcttgtgatgctttgccattatggaattgagtatgctgtgagttcagatcactttacaggatcattatggaattg

SEQ ID NO: 22630 - DNA, 1656 bp, Zea Mays
cagcaaccgccgcgcccgagcccctccaccatgtcccattcccaccgctaccaatggcgcccgagcccgagcccaaacccacgcgctgcggcggccgagatcctgccttcaacgacgcgaaccccatcccccacgcgccgcggcggccgagatcccgccttcaacgacgcgaacgccaacggagcccgagcccacctcgccttcaacgcccctgcctccctctttctcctcctcccccgcatgcttccactgcttctctccagcggcgccgccaccgtccctctcgctccagcgagatccagatccggcgcggctcagagtggcaacgcgccgcaaccgcggccgcgccccacacgtgccctatccaaccaccatggagctcttccccatccatccaccacgccgagcgggaggtcgaagtgcgagcgctggccgaccaggcggcccacatagaggccgaggcgcgggccgtcgcgtgcaagaaggtcttccgctcctaccaggcgcttggcggacaccgcgccagcaacgtgcgcggcggcagaggcggctgctgcgcgcctcccgtggctcctccggccccacccccgcagccccagccgccgctgtcgccattgccggagcaccgtgacggaggcgaggacgatgacatgaacgcaaagcagcagccgcgcgagtgtccccactgcggccgcgtgttcttggggcaggctctcggggagcacatcatgcagtcccatgtgtgcgcctcgtcgccgcttgccggcaccgccaccgcctccaccacctcagccgccactcctgcgtcaccgaccaacagtccctccatgatcgatctgaacgtggcgccgcagtccgaggaggtggagcactctgccgtgtcagatccccgcttcaatccaggtgcctgaagctgaagcaggcagatcagcgccctcattctggatagttccgttgctcggaggtgattctaggtgagcatcgtcagggggagataaaggttgagctttctcttgaagctgcaaatttagcacagggaaatgcaactctaggaataagtgactcttcagcagtatctgcaacaagagccagggcactggctgaggatgcatttttccatccatccattatgtcaatcagttatgcttcagtagagcactatttcgccatttacatgatttgagatcgagcgaagctaagcttttcatcaagatggcgctttgttacaggtggccaccacaagcgaggggtctgcttcaacttcttgacagagacagatcggaggctttcttggcaatggaaagttttgttggtagtagtattagctttatagggggacatgtcattagggttgatcttgtgcttttgaggccttgcttacaggcacggtactactgaaatagttagcaaaagatggcaatactgatgtaatccagaatgtagcagtacatatcaactgccgtcttagtttcagttcatgaagtgaataatgcataccaaactatgtcccagttcaaagcatctagaacagtgaagtattatgtctgtcgcgttttctcattctgataattcatatcaactgcttgtgatgctttgccattatggaattgagtatgctgtgagttcagatcactttacaggatcattatggaattg

SEQ ID NO: 22631 - DNA, 1755 bp, Zea Mays
gagtgctattgccatccatcctgaccagagtcccatggaatatccatggcattcgctgcattgaacgctacttcgctagcatcagcagaagcaaaaagctccgtggattatagcaatgtagacgaagaggaggagcaagcagctagctgcttgcttttccactgaaagagccacagaagttgagctttctcttgaagctgcaaatttagcacagggaaatgcaactctaggaataagtgactcttcagcagtatctgcaacaagagccagggcactggctgaggatgcatttttccatccatccattatgtcaatcagttatgcttcagtagagcactatttcgccatttacatggtcagtacactattgcagacttgcatcagtttccaaaattttaaaatggcgctcataattttgtttccatgtgcatgttaatcagtacagtactacattaaaaactccatacttcctgcagccatttttcgcaccagtttccttgcatgtgctgctggcggcaatcaaagagctgaaacgttacaaggcagagcgagcaaaatattcggcatttcttgcttcccaggcgacatcctcctgatctggtggtgattagggtttagggtttagggtttagggtttaggcaagtactacgagaagaaggggctcatcgctgaagcttgggaatccttcaatcgacccagaccatgccatgagtcatctttgttgaccttacccccacctcttagcgagagaattcttgtgattttcttgatttttgttgttcatgtttgatgtcactaattttatttgttgttgttgttgtgcagatttgagatcgagcgaagctaagcttttcatcaagatggcgcttgtaagtgtttattcaattagtagttgtttaagtagcctctatctcttacttttttatatgctagaggtgtgtttaagttgattgcattggtgagattattttattgtagtttcgacttgtggtgtggcatgtcatgatggcctcaaatcatcaggtaaattacttctctactgttgtaatggaaaacctgggccaagggagtaatttcgacttgcgtagtaatggaaaaaattaccttctctctttgagggttccaatccatttcgttctctatgattgtcacctacctttcctgagcctacttttgttgctactataagaataagtcaatgaaaaaaatcttcatctctatttgtttccgctatgtattgtgtagcttagagttgtctctcttagaggttaatttgtcatcatgctaatatttggtttgaaatctatgtatttctgcagtgttacaggtggccaccacaagcgaggggtctgcttcaacttcttgacagagacagatcggaggctttcttggcaatggaaagttttgttggtagtagtattagctttatagggggacatgtcattagggttgatcttgtgcttttgaggccttgcttacaggcacggtactactgaaatagttagcaaaagatggcaatactgatgtaatccagaatgtagcagtacatatcaactgccgtcttagtttcagttcatgaagtgaataatgcataccaaactatgtcccagttcaaagcatctagaacagtgaagtattatgtctgtcgcgttttctcattctgataattcatatcaactgcttgtgatgctttgccattatggaattgagtatgctgtgagttcagatcactttacaggatcattatggaattg

SEQ ID NO: 22632 - DNA, 509 bp, Zea Mays
cacctccccactcgagccagccagccagccagccagccgcttgggcgccatctctctagagcttcgtaccctcgaagagagatccggcgcggcccaataaacacccggctcactacagactcgcagatggccggcctcaggatgaagttcgtcgccgtcgccgccatggccgccgcgctcgtggcgtccgccgcagccgccgaggcccccgccccggctcccgcgtccgacgccgcggccgccgtacccctcgccgcggcctccctcgccgccgccgccttcggctacctcttctgctagatccgcgctggatacgtggttcctgctccaaaatatgattcgtctggtctggcgcgcgtgagtccagctcgtgtgtcgtgtgcgcgtggtgggtggtacgtgcttcgacgcgccactgtttgtcgcggcgatcatgtactaccctgctgcgttttctggttatcaatgagatgatttatttgattcttttcaggcctgggcactaataa

SEQ ID NO: 22633 - DNA, 1390 bp, Zea Mays
tgtctgcaagcttgcgcacacggtccagggattcttggtgttcaatgctgttggtggtggtactggctctggacttggttcactgctgttggagcgcctttcagttgattatggcaagaagtctaagcttggtttcaccatttatccttccccacaggtgtcaacagctgttgtagagccatacaacagtgtcctctcgacccactccttgctcgagcacactgatgttgcagtcctcctggacaacgaggctatctatgacatatgcaggaggtcccttgacatcgaaaggccaacctataccaacttgaacaggctgatctcacagatcatatcatcacttaccacctccctgaggtttgatggggctatcaatgtggatgttactgagttccagaccaaccttgttccatacccacgtattcatttcatgctttcctcatatgcccctgtaatatctgctgagaaggcctaccatgagcagctctctgtgcctgaaatcaccaatgctgtatttgagccctcaagcatgatggccaagtgtgacccaaggcacggaaagtacatggcttgctgcttgatgtaccgcggtgatgttgttcctaaggatgtcaacgctgcagttgcaaccatcaagaccaagagaactgtccagtttgtggactggtgccccactggattcaagtgtggcatcaactatcagccaccctctgttgtccctggaggtgacctggcaaaggtccagcgtgccgtgtgcatgatcagcaacaacaccgccgttgccgaggtgttctcacgcatcgaccacaagtttgaccttatgtacgccaagcgtgcattcgttcactggtatgtcggtgagggtatggaagagggtgagttctcagaagcccgtgaggacttggctgctcttgagaaggactatgaggaagtcggtgcagagggtgccgatgatgagggtgacgagggagacgactattgagtagctggctaataagtagttctctggtggttaatggttgggttattttgagtatatactctatggttccactccattggatactgctgctgtgtgtttccattttgtactatgtagtaaattgttcgtagccccctattggccatgattgttcatatcatccttctttggtttgcaacgctattcgtccaatttcggtgtatatgctataatgctattatgttgcaagtgtgctgtgctcaaccattgggttttatttatatttagaaacagaaggcattattactctgcgctgcagcttgtttctggatcatgggaacattgagatttgagaagttttgatagcagtctatcactgtgagggcctaaggaggcccacggaggggctgcggtagcagcagccatggg

SEQ ID NO: 22634 - DNA, 1257 bp, Zea Mays
cgacgaagatggccctgggcacatgatgccttcaacacgttcttcagcgagactggttccggcaagcatgtgcccagggccatcttcgtcgaccttgagcccactgtcatcgacgaggctatctatgacatatgcaggaggtcccttgacatcgaaaggccaacctataccaacttgaacaggctgatctcacagatcatatcatcacttaccacctccctgaggtttgatggggctatcaatgtggatgttactgagttccagaccaaccttgttccatacccacgtattcatttcatgctttcctcatatgcccctgtaatatctgctgagaaggcctaccatgagcagctctctgtgcctgaaatcaccaatgctgtatttgagccctcaagcatgatggccaagtgtgacccaaggcacggaaagtacatggcttgctgcttgatgtaccgcggtgatgttgttcctaaggatgtcaacgctgcagttgcaaccatcaagaccaagagaactgtccagtttgtggactggtgccccactggattcaagtgtggcatcaactatcagccaccctctgttgtccctggaggtgacctggcaaaggtccagcgtgccgtgtgcatgatcagcaacaacaccgccgttgccgaggtgttctcacgcatcgaccacaagtttgaccttatgtacgccaagcgtgcattcgttcactggtatgtcggtgagggtatggaagagggtgagttctcagaagcccgtgaggacttggctgctcttgagaaggactatgaggaagtcggtgcagagggtgccgatgatgagggtgacgagggagacgactattgagtagctggctaataagtagttctctggtggttaatggttgggttattttgagtatatactctatggttccactccattggatactgctgctgtgtgtttccattttgtactatgtagtaaattgttcgtagccccctattggccatgattgttcatatcatccttctttggtttgcaacgctattcgtccaatttcggtgtatatgctataatgctattatgttgcaagtgtgctgtgctcaaccattgggttttatttatatttagaaacagaaggcattattactctgcgctgcagcttgtttctggatcatgggaacattgagatttgagaagttttgatagcagtctatcactgtgagggcctaaggaggcccacggaggggctgcggtagcagcagccatggg

SEQ ID NO: 22635 - DNA, 1266 bp, Zea Mays
gtccatgtgatgtggtccattcagcttgttcatgtgtcaacagctgttgtagagccatacaacagtgtcctctcgacccactccttgctcgagcacactgatgttgcagtcctcctggacaacgaggctatctatgacatatgcaggaggtcccttgacatcgaaaggccaacctataccaacttgaacaggctgatctcacagatcatatcatcacttaccacctccctgaggtttgatggggctatcaatgtggatgttactgagttccagaccaaccttgttccatacccacgtattcatttcatgctttcctcatatgcccctgtaatatctgctgagaaggcctaccatgagcagctctctgtgcctgaaatcaccaatgctgtatttgagccctcaagcatgatggccaagtgtgacccaaggcacggaaagtacatggcttgctgcttgatgtaccgcggtgatgttgttcctaaggatgtcaacgctgcagttgcaaccatcaagaccaagagaactgtccagtttgtggactggtgccccactggattcaagtgtggcatcaactatcagccaccctctgttgtccctggaggtgacctggcaaaggtccagcgtgccgtgtgcatgatcagcaacaacaccgccgttgccgaggtgttctcacgcatcgaccacaagtttgaccttatgtacgccaagcgtgcattcgttcactggtatgtcggtgagggtatggaagagggtgagttctcagaagcccgtgaggacttggctgctcttgagaaggactatgaggaagtcggtgcagagggtgccgatgatgagggtgacgagggagacgactattgagtagctggctaataagtagttctctggtggttaatggttgggttattttgagtatatactctatggttccactccattggatactgctgctgtgtgtttccattttgtactatgtagtaaattgttcgtagccccctattggccatgattgttcatatcatccttctttggtttgcaacgctattcgtccaatttcggtgtatatgctataatgctattatgttgcaagtgtgctgtgctcaaccattgggttttatttatatttagaaacagaaggcattattactctgcgctgcagcttgtttctggatcatgggaacattgagatttgagaagttttgatagcagtctatcactgtgagggcctaaggaggcccacggaggggctgcggtagcagcagccatggg

SEQ ID NO: 22636 - DNA, 1585 bp, Zea Mays
gcagccacaggataacacgcccacggctctcgtcagtcgtcacccgccttgtcttgtttcgctgtcttgtttcgcgctcccccacccccctcccaaccccactacggccttccccccatggctcccctggcctcccttcctctcccgcccagtactgccgtcaccgctcgcttcctcgccgcccccgccatccgcgtgatcagcccatcgcggcccgcgctgccgctcctctcatccgcctccgcaggcggcttccctcacgcctctcgcgctccctgcagtgccgcccgcgagcaccgccgcggcaccgtgcgggaatgctctcgagctgatgctgctggagcagctccattatcaaagacactgttagacctcaaggattcctgctggagatttttaaggccacatacaatccgaggaactgctttaggatccatagcattggttgcgagagccttgatagagaattcccatctgataaactggtggttgatattcaaagcattctatggacttggggcattgatatttggcaatggttacatagttgggattaatcagatctatgatgttgctattgacaaggtaaacaagccatatttacccattgctgctggtgatctctcaattcagtcagcatggttgttggtgatattatttgcagctgcaggtttttcaattgttatatcaaactttggacctttcattacctctctatactgccttggcctatttcttggcactatatattctgttcctccattcagactgaagagatatccggttgctgcttttcttatcattgcaacggttcgtggtttccttctcaactttggcgtgtactatgctactagggctgcactaggtcttacattccaatggagctcccctgttgctttcattacatgcttcgtgacactatttgctttggtcattgctataaccaaagatctccctgatgttgaaggagatcgcaagtatcaaatatcaactttggcaacaaagcttggtgtcagaaatattgcattccttggatctggtttattattagcaaactatattgctgctattgctgtagcttttaccatgcctcaggatttcaggtgcactgtaatggttcctgtgcatgctgtccttgctggtggtttaattttccagacatgggttctggagcaagcgaagtacagaaaggatgctatttcgcagtactatcggttcatctggaatctcttctatgctgaatatatcttcttcccgttaatatagagaggtggcggtggaacggccaagacaagcttgtttcatgccactcgaggtcgaggctaaaccactacggcgtgctcttccatgaaacgcagaaaactaaggaaatggctatatatatggtgcaatacgttgtatattttctgagtttcagctcgtatatatagtaggaacctcaacttttaccccatcgattggaagactgaaacttcttgcatgcgtatgtatgcctgtgggtatgtaaaaaccttggcccgcacaaagctacatgttacagaactttcagctcgatggatcggtgaaaaaagtgtcctattttgcg

SEQ ID NO: 22637 - DNA, 1937 bp, Zea Mays
aagctttgctcgctgctccctgagagaaaaaaaaatcctaggcgttcttctgtctttgctcttgttctccgatttcaaggcttttcttgagagcttctgagaagtgttcctggcttacagcttagtcagatccttgggcacaaggatatgtggtccaagaaactacatggcgtgtttacccttcttatgctcatggttttcaatgtttcaggggcatttgttggtatcactattggcaatgacatgtcgaacataccaccagcaacagatatagtgtctatcctcaaagcaaagaagattcagcatgttcgcctgcttgattcagaccatcagatgttgactgcccttgcaaatactggaatagaagtgatggttggggttccaaatgatcagctacttcgtgtgggccaatctcgttccacagctgctgattggattaataagaatgtcaatgcttacattccggccactaacatcacatatattgctgtgggtaatgaggtccttactaccattcccaatgcagcacttgttctcatacctgcactgcaattcctccagtcagcacttttggctgcaaacctcgatactcaagtgaaaatttcgagtcctcattcaatggatgtgatctcgaaggcgtttcctccctctgctgccactttcaattcgacatggagctcaataatgtctcagtatcttcagtttctcaagaataccgaatcttcgtttatgctgaatgcccaaccatactatggctatgtcggaggacaaggcgtattccccttggagtatgcactgttccgctcacttaatccgaacagtcaaatttcagatcctaacaccaatctcttttataccaatatgtttgatgctataattgatgctacctacaactcaattcaagcaataaatttcacggggattcctgttttagttacagcttctggctggccatggcgtggtgggccaagtgagaaggctgctactgttgataatgctttggcctacaatacaaacctcatacatcatgtactgaacaattctggtactcccagccaaccgaataatcagtcgagcacctacatctttgagctgttcaacgaggataatcggtcagggcctgtatcagagcaaaattgggggatcatgtttcccaatgcaaccactatatactctctatcatttgaggacgtggccacaactattcctgaatcaccagctttacgtggggtgttttgtgttgcaaatccaagtgcaccccatagtgcactgaagcatagtttggattgggcatgtggccctggttctgcaaactgcagtgcaattcaacctgggaaaccatgctatgcatcagatgatattgtagctgttgcttcttatgctttcaatgattattaccatagaacacagtctagtggcggtacatgcaacttcaacggcaccgcaatgataacatcaactgatccaagccatggttcatgcgttttcgctggaagcactggcgccaacggcggaacggcctctgggcctgtaagcccagacagttttgcttcaaaatccaaaacctgctggttgactcacctagtagccacattgttgctgcccattctatttgtagtgatgtaaaacattgtaaccatgtcacattttggatgagatgcccgcaatttatcgtggatcttgtcattagatactgtagtgactagtgacccatttgggtctgctgtattcaggtagatgccatgtaatcttatcccaagatttgttggcctaggaatcagtatttcgtcaaatcatcaattttgactgtcaactcggaaaattgagctgtgacaatccgagacctctctgaaatgttgaaacttggaagttccaaatgatttgtacacctgcatagtatttagattttcagccgtatgcatatggtttaagtgaac

SEQ ID NO: 22638 - DNA, 2049 bp, Zea Mays
ctctgatgcttctagttttaaggggatttcacagttctatgttattctgtcccttggtcatttttaattttaggctttattgaacttccccagaccccgccatagtacgggaagcctacgacactggatagaggttgatgcaagtgagcttggacgcggcagggtggtagtacaccgtcgagccggaggaagcttttcttgagagcttctgagaagtgttcctggcttacagcttagtcagatccttgggcacaaggatatgtggtccaagaaactacatggcgtgtttacccttcttatgctcatggttttcaatgtttcaggggcatttgttggtatcactattggcaatgacatgtcgaacataccaccagcaacagatatagtgtctatcctcaaagcaaagaagattcagcatgttcgcctgcttgattcagaccatcagatgttgactgcccttgcaaatactggaatagaagtgatggttggggttccaaatgatcagctacttcgtgtgggccaatctcgttccacagctgctgattggattaataagaatgtcaatgcttacattccggccactaacatcacatatattgctgtgggtaatgaggtccttactaccattcccaatgcagcacttgttctcatacctgcactgcaattcctccagtcagcacttttggctgcaaacctcgatactcaagtgaaaatttcgagtcctcattcaatggatgtgatctcgaaggcgtttcctccctctgctgccactttcaattcgacatggagctcaataatgtctcagtatcttcagtttctcaagaataccgaatcttcgtttatgctgaatgcccaaccatactatggctatgtcggaggacaaggcgtattccccttggagtatgcactgttccgctcacttaatccgaacagtcaaatttcagatcctaacaccaatctcttttataccaatatgtttgatgctataattgatgctacctacaactcaattcaagcaataaatttcacggggattcctgttttagttacagcttctggctggccatggcgtggtgggccaagtgagaaggctgctactgttgataatgctttggcctacaatacaaacctcatacatcatgtactgaacaattctggtactcccagccaaccgaataatcagtcgagcacctacatctttgagctgttcaacgaggataatcggtcagggcctgtatcagagcaaaattgggggatcatgtttcccaatgcaaccactatatactctctatcatttgaggacgtggccacaactattcctgaatcaccagctttacgtggggtgttttgtgttgcaaatccaagtgcaccccatagtgcactgaagcatagtttggattgggcatgtggccctggttctgcaaactgcagtgcaattcaacctgggaaaccatgctatgcatcagatgatattgtagctgttgcttcttatgctttcaatgattattaccatagaacacagtctagtggcggtacatgcaacttcaacggcaccgcaatgataacatcaactgatccaagccatggttcatgcgttttcgctggaagcactggcgccaacggcggaacggcctctgggcctgtaagcccagacagttttgcttcaaaatccaaaacctgctggttgactcacctagtagccacattgttgctgcccattctatttgtagtgatgtaaaacattgtaaccatgtcacattttggatgagatgcccgcaatttatcgtggatcttgtcattagatactgtagtgactagtgacccatttgggtctgctgtattcaggtagatgccatgtaatcttatcccaagatttgttggcctaggaatcagtatttcgtcaaatcatcaattttgactgtcaactcggaaaattgagctgtgacaatccgagacctctctgaaatgttgaaacttggaagttccaaatgatttgtacacctgcatagtatttagattttcagccgtatgcatatggtttaagtgaac

SEQ ID NO: 22639 - DNA, 2599 bp, Zea Mays
cgacatcaaattttcctaggcggcatacacacgcaaaatcctggagcatgcagatatggcaaattgcaatccatgccatactcccatggagctcgcctgaacctggcttacagaggcgccagtggatgccactgagtatcgaggcctttttggctatctccggtacatggtgcatactcgaccagacatcgcctttgttgttggctatgtcaatcgatttatggagaaccccaccactgagcacctcaacgcggtgaagcggatcctacactaaatcgcgggcacgattgactatgaatgctactacaagcgcgaagggaaggaattgaagctgcccaggcacgacgacgctggcatgagcgacgacattgatataatgaagagcatcatcggcgtgcttttcttcctcggctcttgccttgtgacttggcagtctcagaaggatgtctttacgttatcgtcctgcaaagcggaatacattgtaggaacaaggacagattgtcaaggtgtgtggttggcacaatttctcgcaaagctgaagagcgagcaatgcacaaccttcctatcgaagatggatagccaattggctataaccctcaataagaatccgatcgaagcaaacatatagatgtgagattttatttcatttgggagctgctctcacgtgatcgtttctgtgaactgtgtgtaatgttgcacgtcgtcaagatcggcaaggaacttcagacttaggggatgaaaccttttcttgagagcttctgagaagtgttcctggcttacagcttagtcagatccttgggcacaaggatatgtggtccaagaaactacatggcgtgtttacccttcttatgctcatggttttcaatgtttcaggggcatttgttggtatcactattggcaatgacatgtcgaacataccaccagcaacagatatagtgtctatcctcaaagcaaagaagattcagcatgttcgcctgcttgattcagaccatcagatgttgactgcccttgcaaatactggaatagaagtgatggttggggttccaaatgatcagctacttcgtgtgggccaatctcgttccacagctgctgattggattaataagaatgtcaatgcttacattccggccactaacatcacatatattgctgtgggtaatgaggtccttactaccattcccaatgcagcacttgttctcatacctgcactgcaattcctccagtcagcacttttggctgcaaacctcgatactcaagtgaaaatttcgagtcctcattcaatggatgtgatctcgaaggcgtttcctccctctgctgccactttcaattcgacatggagctcaataatgtctcagtatcttcagtttctcaagaataccgaatcttcgtttatgctgaatgcccaaccatactatggctatgtcggaggacaaggcgtattccccttggagtatgcactgttccgctcacttaatccgaacagtcaaatttcagatcctaacaccaatctcttttataccaatatgtttgatgctataattgatgctacctacaactcaattcaagcaataaatttcacggggattcctgttttagttacagcttctggctggccatggcgtggtgggccaagtgagaaggctgctactgttgataatgctttggcctacaatacaaacctcatacatcatgtactgaacaattctggtactcccagccaaccgaataatcagtcgagcacctacatctttgagctgttcaacgaggataatcggtcagggcctgtatcagagcaaaattgggggatcatgtttcccaatgcaaccactatatactctctatcatttgaggacgtggccacaactattcctgaatcaccagctttacgtggggtgttttgtgttgcaaatccaagtgcaccccatagtgcactgaagcatagtttggattgggcatgtggccctggttctgcaaactgcagtgcaattcaacctgggaaaccatgctatgcatcagatgatattgtagctgttgcttcttatgctttcaatgattattaccatagaacacagtctagtggcggtacatgcaacttcaacggcaccgcaatgataacatcaactgatccaagccatggttcatgcgttttcgctggaagcactggcgccaacggcggaacggcctctgggcctgtaagcccagacagttttgcttcaaaatccaaaacctgctggttgactcacctagtagccacattgttgctgcccattctatttgtagtgatgtaaaacattgtaaccatgtcacattttggatgagatgcccgcaatttatcgtggatcttgtcattagatactgtagtgactagtgacccatttgggtctgctgtattcaggtagatgccatgtaatcttatcccaagatttgttggcctaggaatcagtatttcgtcaaatcatcaattttgactgtcaactcggaaaattgagctgtgacaatccgagacctctctgaaatgttgaaacttggaagttccaaatgatttgtacacctgcatagtatttagattttcagccgtatgcatatggtttaagtgaac

SEQ ID NO: 22640 - DNA, 658 bp, Zea Mays
gtaaataccactctagtcttgggtttccattccacccaatgtcttcacgggtggaaacccaatgcctttgggtgggaacgctggcagccattagatcttctttcgacggtggatttcgacagtaaagtcccgcgggccgcggtgacttgccggtgggcatgtcctcgtcctcttccttccccacctcccgcttccccttcgccgccggcgccagggcccccggcagcagacgcggtgccggtggaggcgggagcagcgtgcggccgtgggggtcgaccggcgggacgtcggtgtcttcatctgggaaacggatacagaaggagctgctggacctcaacgcctccgactgctccgcggggcccaagggcgacaacctgtaccactggctctccaccatcttcgggccccaaggatcgccatatgaacgagggatatttttccttgacatcgtgtttcctcgtgattatcccttcaaacctcccatggtaactttcaaaacaaggatttaccattgcaatattgattccactggtaaagtgcatttggacattctgaaggatggttggagtccagctttcactatttcaaaggtgttattggccatcaaagacatcatcaacaatccagatccatgctaaagttatgatctttgtctgtg

SEQ ID NO: 22641 - DNA, 3279 bp, Zea Mays
aacccaatgcctttgggtgggaacgctggcagccattagatcttctttcgacggtggatttcgacagtaaagtcccgcgggccgcggtgacttgccggtgggcatgtcctcgtcctcttccttccccacctcccgcttccccttcgccgccggcgccagggcccccggcagcagacgcggtgccggtggaggcgggagcagcgtgcggccgtgggggtcgaccggcgggacgtcggtgtcttcatctgggaaacggatacagaaggagctgctggacctcaacgcctccgactgctccgcggggcccaagggcgacaacctgtaccactggctctccaccatcttcgggccccaaggatcgccatatgaacgagggatatttttccttgacatcgtgtttcctcgtgattatcccttcaaacctcccatggtaactttcaaaacaaggatttaccattgcaatattgattccactggtaaagtgcatttggacattctgaaggatggttggagtccagctttcactatttcaaaggtgttattggccatcaaagacatcatcaacaatccagatccatacaccccgcttgtgatgagcatttcacgtcagtatctgactgatagagctaaacatgatgaaacagcagctgagtggacaatgagatttgcaagatagaggattctgtttgcatctaagcacgattgaccttgtaaaaaaatcttaatgtggcctgacgcctgaaatggtgaatgttggcaaaggagccatcagccatgtattatttgatgtgagttgtgacataaaggtgtactttatgcttgagtgttctttaatcgctgcttttaggtggagaataatctttttcgattttgcacttctgccaaagttgcaccctgaactcttcagaacttttcttccgagtttatttctaaaaatggtttctattgaaactggcctcgtgtgctgctgtcctggttgaggatgtcagtttcatatactgaaaggaaaaagaaacataaatcatggaaatattcagaaaccaatagcttttaacggtacagctgtacaaacgatcgattacttatttacttttctgcagacaaagtatgtaaagcatgccattcatatctttcacttgaaacaaaatcctgctggttatcattcaggtagtgttgttggacaaggcttcaattacacagggatgataaagctgccatgacaggcactgatcttacaaatgaccaaactggacttcacctctgaagttgacgcctcaccagttcactgattcccagtacagactgctcaatttatcacatctggtacagaccttataactccacccagagaagatgcaaacccacactttctggtgctctggtgctcttactcttcagaccatagacaatggccaccgaactagatgtgagcaagtctcgccgcttcgacattgccatgtcgaggcgaactcggcgatcaacaagcctggtagcctgcttccaagatcagtatacaccgtccctggcacatcatcgccaccaagagctgaaggcatttctgcaacgccaagatgaagagctgaagtcactccagcaatgccaagaggaagagctgaaggcactccagcaatgtgaggatgcagagcagaagacactgtgtttgaatgaggatgaggatctgaagattccacaagcaccactgcagtatgaagatggtgaacaaaagacaccggagcaatatgaagatgagcacaaggaatcacagcagtgttcagacgaagagcaggagataccagatacatatcaagatgatgagaagaaaccagaccaggaccagtatctaaatgaagacaagatgccagagcagtatcgagctaaagatgagttaccatcacaataccaaaaccaggagcttatgacaccaaacctacctgagaaggagactgcatcagagcgattccaagaagcggagcagctggtgacaccaaacctacctgaagaagatgaggagactgcaccaaagcaattccaagacgaggagcagaagggacttcaacaacaccaagagccggatgagcaggcatcgcaacctgaagagcagaagtctcagcaggaatgccatcagaaggcaccggagcaattccaaaccttgaagaagctaggcgcgccaccacgtcttgctgacaacgtgccccggttctcccttcaggagcttatacaacagaagcagcttccgactggcgatgcgatgcttgccagcaagcaaggcagccgtggagagagtgtcctcgctgatcacagtgtttcaggaccaggagcagcagcaggcggcacgacactggccatggtgataaagcgacccgagggagggaagaagtcgatgggggtgatacgccggtgcgtgaaggccctgaacgggatgatcaaggccaagcacggttccaagaagaacttgcatttctagctttcaacagaatccaggagaccaggagtacatacatacatacatacataagcactgatgagtaagtgtggtccagagtttcttagtagaccgcacatctctgaataatgcattcgcagttgcgcagaaccaaaattttgagcatgatgcagggtgtgcaagatctggcgagaaactccagggctttttacgccctggtctacactgtctacctatagcaataaactgtggtagttttattagctgaatatcacaaatctgttcctcctatgcgagaagatggtctgctaagtccaagagtagagatcaggctctgatcatgtgctgttgacttcctctgcaaaagcctgtttgcttttagaagtgtatgggtgtgattagaaaaggtgaaaatgatcggttctactcctaccgacacctgccccccaggtcggcagcggttttggtgcagtctccttttctgcctttctgtgccgcgtcccgtttcggtttggtgcgtcacttgaatgctgagaaaacaagttagtgcaaaagaaaaggcgatggagctgaagcctgtgaagcttcttgtgaattattggttgaggacgcagcgcatggtacgccatcgcatatctcttcttcgtttatgatcactctctgtttactcgatttgaacgcttgtgttgttggggttgggacctgggcatgtttatgatctgaagttctaaacatttactactgtatttttctggaaattgaacagatagtgtttcttcatcttctatgagactatttttttttcttgttttacccaatgaagaaccaagatgtgt

SEQ ID NO: 22642 - DNA, 2930 bp, Zea Mays
agatcttctttcgacggtggatttcgacagtaaagtcccgcgggccgcggtgacttgccggtgggcatgtcctcgtcctcttccttccccacctcccgcttccccttcgccgccggcgccagggcccccggcagcagacgcggtgccggtggaggcgggagcagcgtgcggccgtgggggtcgaccggcgggacgtcggtgtcttcatctgggaaacggatacagaaggagctgctggacctcaacgcctccgactgctccgcggggcccaagggcgacaacctgtaccactggctctccaccatcttcgggccccaaggatcgccatatgaacgagggatatttttccttgacatcgtgtttcctcgtgattatcccttcaaacctcccatggtaactttcaaaacaaggatttaccattgcaatattgattccactggtaaagtgcatttggacattctgaaggatggttggagtccagctttcactatttcaaaggtgttattggccatcaaagacatcatcaacaatccagatccatacaccccgcttgtgatgagcatttcacgtcagtatctgactgatagagctaaacatgatgaaacagcagctgagtggacaatgagatttgcaagatagaggattctgtttgcatctaagcacgattgaccttgtaaaaaaatcttaatgtggcctgacgcctgaaatggtgaatgttggcaaaggagccatcagccatgtattatttgatacaaagtatgtaaagcatgccattcatatctttcacttgaaacaaaatcctgctggttatcattcaggtagtgttgttggacaaggcttcaattacacagggatgataaagctgccatgacaggcactgatcttacaaatgaccaaactggacttcacctctgaagttgacgcctcaccagttcactgattcccagtacagactgctcaatttatcacatctggtacagaccttataactccacccagagaagatgcaaacccacactttctggtgctctggtgctcttactcttcagaccatagacaatggccaccgaactagatgtgagcaagtctcgccgcttcgacattgccatgtcgaggcgaactcggcgatcaacaagcctggtagcctgcttccaagatcagtatacaccgtccctggcacatcatcgccaccaagagctgaaggcatttctgcaacgccaagatgaagagctgaagtcactccagcaatgccaagaggaagagctgaaggcactccagcaatgtgaggatgcagagcagaagacactgtgtttgaatgaggatgaggatctgaagattccacaagcaccactgcagtatgaagatggtgaacaaaagacaccggagcaatatgaagatgagcacaaggaatcacagcagtgttcagacgaagagcaggagataccagatacatatcaagatgatgagaagaaaccagaccaggaccagtatctaaatgaagacaagatgccagagcagtatcgagctaaagatgagttaccatcacaataccaaaaccaggagcttatgacaccaaacctacctgagaaggagactgcatcagagcgattccaagaagcggagcagctggtgacaccaaacctacctgaagaagatgaggagactgcaccaaagcaattccaagacgaggagcagaagggacttcaacaacaccaagagccggatgagcaggcatcgcaacctgaagagcagaagtctcagcaggaatgccatcagaaggcaccggagcaattccaaaccttgaagaagctaggcgcgccaccacgtcttgctgacaacgtgccccggttctcccttcaggagcttatacaacagaagcagcttccgactggcgatgcgatgcttgccagcaagcaaggcagccgtggagagagtgtcctcgctgatcacagtgtttcaggaccaggagcagcagcaggcggcacgacactggccatggtgataaagcgacccgagggagggaagaagtcgatgggggtgatacgccggtgcgtgaaggccctgaacgggatgatcaaggccaagcacggttccaagaagaacttgcatttctagctttcaacagaatccaggagaccaggagtacatacatacatacatacataagcactgatgagtaagtgtggtccagagtttcttagtagaccgcacatctctgaataatgcattcgcagttgcgcagaaccaaaattttgagcatgatgcagggtgtgcaagatctggcgagaaactccagggctttttacgccctggtctacactgtctacctatagcaataaactgtggtagttttattagctgaatatcacaaatctgttcctcctatgcgagaagatggtctgctaagtccaagagtagagatcaggctctgatcatgtgctgttgacttcctctgcaaaagcctgtttgcttttagaagtgtatgggtgtgattagaaaaggtgaaaatgatcggttctactcctaccgacacctgccccccaggtcggcagcggttttggtgcagtctccttttctgcctttctgtgccgcgtcccgtttcggtttggtgcgtcacttgaatgctgagaaaacaagttagtgcaaaagaaaaggcgatggagctgaagcctgtgaagcttcttgtgaattattggttgaggacgcagcgcatggtacgccatcgcatatctcttcttcgtttatgatcactctctgtttactcgatttgaacgcttgtgttgttggggttgggacctgggcatgtttatgatctgaagttctaaacatttactactgtatttttctggaaattgaacagatagtgtttcttcatcttctatgagactatttttttttcttgttttacccaatgaagaaccaagatgtgt

SEQ ID NO: 22643 - DNA, 2830 bp, Zea Mays
agatcttctttcgacggtggatttcgacagtaaagtcccgcgggccgcggtgacttgccggtgggcatgtcctcgtcctcttccttccccacctcccgcttccccttcgccgccggcgccagggcccccggcagcagacgcggtgccggtggaggcgggagcagcgtgcggccgtgggggtcgaccggcgggacgtcggtgtcttcatctgggaaacggatacagaaggagctgctggacctcaacgcctccgactgctccgcggggcccaagggcgacaacctgtaccactggctctccaccatcttcgggccccaaggatcgccatatgaacgagggatatttttccttgacatcgtgtttcctcgtgattatcccttcaaacctcccatggtaactttcaaaacaaggatttaccattgcaatattgattccactggtaaagtgcatttggacattctgaaggatggttggagtccagctttcactatttcaaaggtgttattggccatcaaagacatcatcaacaatccagatccatacaccccgcttgtgatgagcatttcacgtcagtatctgactgatagagctaaacatgatgaaacagcagctgagtggacaatgagatttgcaagatagaggattctgtttgcatctaagcacgattgaccttgtaaaaaaatcttaatgtggcctgacgcctgaaatggtgaatgttggcaaaggagccatcagccatgtattatttgatggatgataaagctgccatgacaggcactgatcttacaaatgaccaaactggacttcacctctgaagttgacgcctcaccagttcactgattcccagtacagactgctcaatttatcacatctggtacagaccttataactccacccagagaagatgcaaacccacactttctggtgctctggtgctcttactcttcagaccatagacaatggccaccgaactagatgtgagcaagtctcgccgcttcgacattgccatgtcgaggcgaactcggcgatcaacaagcctggtagcctgcttccaagatcagtatacaccgtccctggcacatcatcgccaccaagagctgaaggcatttctgcaacgccaagatgaagagctgaagtcactccagcaatgccaagaggaagagctgaaggcactccagcaatgtgaggatgcagagcagaagacactgtgtttgaatgaggatgaggatctgaagattccacaagcaccactgcagtatgaagatggtgaacaaaagacaccggagcaatatgaagatgagcacaaggaatcacagcagtgttcagacgaagagcaggagataccagatacatatcaagatgatgagaagaaaccagaccaggaccagtatctaaatgaagacaagatgccagagcagtatcgagctaaagatgagttaccatcacaataccaaaaccaggagcttatgacaccaaacctacctgagaaggagactgcatcagagcgattccaagaagcggagcagctggtgacaccaaacctacctgaagaagatgaggagactgcaccaaagcaattccaagacgaggagcagaagggacttcaacaacaccaagagccggatgagcaggcatcgcaacctgaagagcagaagtctcagcaggaatgccatcagaaggcaccggagcaattccaaaccttgaagaagctaggcgcgccaccacgtcttgctgacaacgtgccccggttctcccttcaggagcttatacaacagaagcagcttccgactggcgatgcgatgcttgccagcaagcaaggcagccgtggagagagtgtcctcgctgatcacagtgtttcaggaccaggagcagcagcaggcggcacgacactggccatggtgataaagcgacccgagggagggaagaagtcgatgggggtgatacgccggtgcgtgaaggccctgaacgggatgatcaaggccaagcacggttccaagaagaacttgcatttctagctttcaacagaatccaggagaccaggagtacatacatacatacatacataagcactgatgagtaagtgtggtccagagtttcttagtagaccgcacatctctgaataatgcattcgcagttgcgcagaaccaaaattttgagcatgatgcagggtgtgcaagatctggcgagaaactccagggctttttacgccctggtctacactgtctacctatagcaataaactgtggtagttttattagctgaatatcacaaatctgttcctcctatgcgagaagatggtctgctaagtccaagagtagagatcaggctctgatcatgtgctgttgacttcctctgcaaaagcctgtttgcttttagaagtgtatgggtgtgattagaaaaggtgaaaatgatcggttctactcctaccgacacctgccccccaggtcggcagcggttttggtgcagtctccttttctgcctttctgtgccgcgtcccgtttcggtttggtgcgtcacttgaatgctgagaaaacaagttagtgcaaaagaaaaggcgatggagctgaagcctgtgaagcttcttgtgaattattggttgaggacgcagcgcatggtacgccatcgcatatctcttcttcgtttatgatcactctctgtttactcgatttgaacgcttgtgttgttggggttgggacctgggcatgtttatgatctgaagttctaaacatttactactgtatttttctggaaattgaacagatagtgtttcttcatcttctatgagactatttttttttcttgttttacccaatgaagaaccaagatgtgt

SEQ ID NO: 22644 - DNA, 724 bp, Zea Mays
atttctgacctgttgtctcctggagtatttgagtgttggcagttggcactgtttcgaagatacctcgaaggaaagcaaaacacaaaagcctgttgttgcattcattgctggacttacagcacccccgggccgtcgcatgggtcatgctggagctatcgtggcaggaggaaagggtactgcccaggacaaaatcaaggcactcagagaggcaggtgttaccgttgtcgagtcaccagcgaagattggctctaccatgtttgaaatcttcaagcagcgtggaatggtagaatagacgatggtacagtagagacattgagaaaccgcattttgatgctcatgggcaattgcgagcaattccttccatggcctcaaacaaaactaatgaggctaccttttcttacgtgccttctgtttggaagatggcctgacttcacctggatcaccttccaatgagctcatttccaataagacgtttcagagccatggacatgtttggagtcaatgtgaatgcctaatttcgaatttttattgtttacacatgtcaatctaggtttacctatctgtttccttgtattatattgtgcggtaaattgccccacaactgaggacgattgctttgctcggtgtcatgtttgagaaaatttcttatttggccctgattgaaacctgtctttctttcttggcccttgtcctgaaataaaatttcttacctattcgccctcac

SEQ ID NO: 22645 - DNA, 2804 bp, Zea Mays
acctgtttcgtccctcacctctgcccccaaatccgagccaccactgcctgccgctcttcgtcgtcctccggacgcccatgctgtcgccctctccccaacaccgtcgtcctaccccgctggagatcccagccgtggtccatggaggacgtgcggcgcgacgaggaggtcctgcagcgggccaatgttgtcgtgcgcggggacgaggtgacggcggcgttctacgcgcattggtgatggcttctccaccgtgttccgcacgcacttctactgcgccgtccgcggggagctccgcaccgatgccaaggtggccggcttcgacgggatcgtaatctccaggagctatgctgcctccacgccaccgtcaagcgcatcctcggcatctgcttcggccaccagcataagaaacacgactcttacgaagctcctatcaaatctaaggagcctttgattttcaatgttggattccggcaatttacggccattgttttcatccgacaacatcaactgcaataaacataagatggagagatttctgcaccatggctggttttccgttgcctctgtatatgcttcaatttccttccttccacttcctctaatagttttgaagaacagagatggcgagcaatctaccattgcagctgtaggttcgctaaaaagtgtggatccaaatcggatcattctaaagaaaattgttctgactaggtaagcttgggtgcatctatcttcacaaggaaattttagttatgcagaattgtgttgttcgttaagatgaaaaccaactcgagttggtttcatcaagatatttttgttatttgtgagcttcaatgtattcatttattgatttaggaaacaaccaaattatttgtgagcttcaatgtattggtgagcttcaatgtgttcatgtactttagggacggtctgatggttaatatgagggacaatgactcatcaagcgacgcacaattggacgagccattaggacgggtatcgatactctcttacggttctgggcatatgctcaacgacatcacatcgtcttgttggtttacctatttgcttgtgttcttgacagatctgggacttagtccaggtgatgccgctattgtgatgctttctggacaattggcggatggcttcacaacaatctttgttggggaattgatggatcgctttggacatttcaaactgtggcatgcaggaggatctattttagtggcaatttccttctcgtctgtttttggtagctgtgttccttgcaaacttatgggaattaatacatctactttggagactgttggatacagcacatttgctgctatttttaatgttggttgggcagttactcaagtcgctcacatgtctatggtaaactgcattacatcaaatccaactagccgggtttcacttgtaagctgtcgtaatgccttcacgatggttgcgaatcttagcctgtatggcgttgctttggtgatatttactctattgcagtcagtgaatgtactagttcagtatcggtggattgcttaggtgtccatttccctcggatcttgctttgttgtcatcttcttgattggaaccaaagagccaggatcaattcggcactgtttggataagagtccttccagaatttcatgggactactggttcaagagagtattgtactaccaagttgctctagtctatactctgactagattggtgaccaatgtttcacaggcatttcttgctttctatgtaataaatgatttagaaatgaatcaatcctccaaagcattggtacctgctattatctacatctgcagtttgatagtatctgtaatattacaggagactagatggtcaagttggcgtcttaagctttacttttcagctggagcagtgctttggatattgtcaggtcttggaattgttcttctaccgagcagaatgcacaacctcatgtatgccatttcaatcgtaataggagctgcgaatgcacttatgacagtgacaagtattagcatggaaggtgttctagtaggagaagatctaaatggttgtgcttttgtgtatggctcattaagttttgttgacaaagtttcatgtggaatagctctctatgttctcgagtcctatcaaggaagtacaaagatcagatcaaatttaggaacaacatctggctattcagttacaagacttggcttgggcttagttccagctgcttgttcgctgctttcagctatagcagcttataccatggagctccctgatactcagaaaggacctttggtggaaccccttctagcataacttcactggtggcagtgttacagtttcaccgtgagatttcacagtaattgctcgatggaatgacactgctgctcgagcctgaagatgttagcgacctggtcaattcgttttgacttcgtatatatagtctgaataaattatgacggaggggatatactgagacacgtttgaatagggattagaagtgacataggggggctaggggcaagaagatctgtgttgatcatactgagctttacaagtcattctgcaatccaatgtaaatataacttagcttcatttcgaaagcatcaaaactgccaactaggcacatgtagcgacgatgggcaaggaaaagaatatctctggtccttgttctacgctataatttcattgtatatgtagcatcatgattgaaaagaaatatcttatatttatattgatgggtgaaatagtgtcgcctatgctcatgtaaattgtttctgacatttagaaattaaatatgcttgagaagagagcactaatctgtctaa

SEQ ID NO: 22646 - DNA, 2070 bp, Zea Mays
gacagttgcgtacttgcgtcgcgttgcgtccccgcttccgttactccctccgcgccccgctcctcccgcctgtcctccacgcgacgttccttgtatccccgtcgccttccttgggcagttgggctgagtcctcccgtctctcgcccctgcagatatagttgcggcggggtttccttcttcgagaaagttccgaaccagagggagccgcgcggaaagccggaggcgtcccatgctgctggcagtcttgctaacttcagctgatggttaatatgagggacaatgactcatcaagcgacgcacaattggacgagccattaggacgggtatcgatactctcttacggttctgggcatatgctcaacgacatcacatcgtcttgttggtttacctatttgcttgtgttcttgacagatctgggacttagtccaggtgatgccgctattgtgatgctttctggacaattggcggatggcttcacaacaatctttgttggggaattgatggatcgctttggacatttcaaactgtggcatgcaggaggatctattttagtggcaatttccttctcgtctgtttttggtagctgtgttccttgcaaacttatgggaattaatacatctactttggagactgttggatacagcacatttgctgctatttttaatgttggttgggcagttactcaagtcgctcacatgtctatggtaaactgcattacatcaaatccaactagccgggtttcacttgtaagctgtcgtaatgccttcacgatggttgcgaatcttagcctgtatggcgttgctttggtgatatttactctattgcagtcagtgaatgtactagttcagtatcggtggattgcttaggtgtccatttccctcggatcttgctttgttgtcatcttcttgattggaaccaaagagccaggatcaattcggcactgtttggataagagtccttccagaatttcatgggactactggttcaagagagtattgtactaccaagttgctctagtctatactctgactagattggtgaccaatgtttcacaggcatttcttgctttctatgtaataaatgatttagaaatgaatcaatcctccaaagcattggtacctgctattatctacatctgcagtttgatagtatctgtaatattacaggtcttggaattgttcttctaccgagcagaatgcacaacctcatgtatgccatttcaatcgtaataggagctgcgaatgcacttatgacagtgacaagtattagcatggaaggtgttctagtaggagaagatctaaatggttgtgcttttgtgtatggctcattaagttttgttgacaaagtttcatgtggaatagctctctatgttctcgagtcctatcaaggaagtacaaagatcagatcaaatttaggaacaacatctggctattcagttacaagacttggcttgggcttagttccagctgcttgttcgctgctttcagctatagcagcttataccatggagctccctgatactcagaaaggacctttggtggaaccccttctagcataacttcactggtggcagtgttacagtttcaccgtgagatttcacagtaattgctcgatggaatgacactgctgctcgagcctgaagatgttagcgacctggtcaattcgttttgacttcgtatatatagtctgaataaattatgacggaggggatatactgagacacgtttgaatagggattagaagtgacataggggggctaggggcaagaagatctgtgttgatcatactgagctttacaagtcattctgcaatccaatgtaaatataacttagcttcatttcgaaagcatcaaaactgccaactaggcacatgtagcgacgatgggcaaggaaaagaatatctctggtccttgttctacgctataatttcattgtatatgtagcatcatgattgaaaagaaatatcttatatttatattgatgggtgaaatagtgtcgcctatgctcatgtaaattgtttctgacatttagaaattaaatatgcttgagaagagagcactaatctgtctaa

SEQ ID NO: 22647 - DNA, 2110 bp, Zea Mays
cttgcgtcgcgttgcgtccccgcttccgttactccctccgcgccccgctcctcccgcctgtcctccacgcgacgttccttgtatccccgtcgccttccttgggcagttgggctgagtcctcccgtctctcgcccctgcagatatagttgcggcggggtttccttcttcgagaaagttccgaaccagagggagccgcgcggaaagccggaggcgtcccatgctgctggcagtcttgctaacttcagctgatggttaatatgagggacaatgactcatcaagcgacgcacaattggacgagccattaggacgggtatcgatactctcttacggttctgggcatatgctcaacgacatcacatcgtcttgttggtttacctatttgcttgtgttcttgacagatctgggacttagtccaggtgatgccgctattgtgatgctttctggacaattggcggatggcttcacaacaatctttgttggggaattgatggatcgctttggacatttcaaactgtggcatgcaggaggatctattttagtggcaatttccttctcgtctgtttttggtagctgtgttccttgcaaacttatgggaattaatacatctactttggagactgttggatacagcacatttgctgctatttttaatgttggttgggcagttactcaagtcgctcacatgtctatggtaaactgcattacatcaaatccaactagccgggtttcacttgtaagctgtcgtaatgccttcacgatggttgcgaatcttagcctgtatggcgttgctttggtgatatttactctattgcagtcagtgaatgtactagttcaggtgtccatttccctcggatcttgctttgttgtcatcttcttgattggaaccaaagagccaggatcaattcggcactgtttggataagagtccttccagaatttcatgggactactggttcaagagagtattgtactaccaagttgctctagtctatactctgactagattggtgaccaatgtttcacaggcatttcttgctttctatgtaataaatgatttagaaatgaatcaatcctccaaagcattggtacctgctattatctacatctgcagtttgatagtatctgtaatattacaggagactagatggtcaagttggcgtcttaagctttacttttcagctggagcagtgctttggatattgtcaggtcttggaattgttcttctaccgagcagaatgcacaacctcatgtatgccatttcaatcgtaataggagctgcgaatgcacttatgacagtgacaagtattagcatggaaggtgttctagtaggagaagatctaaatggttgtgcttttgtgtatggctcattaagttttgttgacaaagtttcatgtggaatagctctctatgttctcgagtcctatcaaggaagtacaaagatcagatcaaatttaggaacaacatctggctattcagttacaagacttggcttgggcttagttccagctgcttgttcgctgctttcagctatagcagcttataccatggagctccctgatactcagaaaggacctttggtggaaccccttctagcataacttcactggtggcagtgttacagtttcaccgtgagatttcacagtaattgctcgatggaatgacactgctgctcgagcctgaagatgttagcgacctggtcaattcgttttgacttcgtatatatagtctgaataaattatgacggaggggatatactgagacacgtttgaatagggattagaagtgacataggggggctaggggcaagaagatctgtgttgatcatactgagctttacaagtcattctgcaatccaatgtaaatataacttagcttcatttcgaaagcatcaaaactgccaactaggcacatgtagcgacgatgggcaaggaaaagaatatctctggtccttgttctacgctataatttcattgtatatgtagcatcatgattgaaaagaaatatcttatatttatattgatgggtgaaatagtgtcgcctatgctcatgtaaattgtttctgacatttagaaattaaatatgcttgagaagagagcactaatctgtctaa

SEQ ID NO: 22648 - DNA, 1882 bp, Zea Mays
gttgcgtccccgcttccgttactccctccgcgccccgctcctcccgcctgtcctccacgcgacgttccttgtatccccgtcgccttccttgggcagttgggctgagtcctcccgtctctcgcccctgcagatatagttgcggcggggtttccttcttcgagaaagttccgaaccagagggagccgcgcggaaagccggaggcgtcccatgctgctggcagtcttgctaacttcagctgatggttaatatgagggacaatgactcatcaagcgacgcacaattggacgagccattaggacgggtatcgatactctcttacggttctgggcatatgctcaacgacatcacatcgtcttgttggtttacctatttgcttgtgttcttgacagatctgggacttagtccaggtgatgccgctattgtgatgctttctggacaattggcggatggcttcacaacaatcttttcctctggtgttaaatgttacagatctcaaaattacttattcatttctgtattataaatgtaaatatatacatttgtttcaacagacagtagtgtgttaaaatgtaccttcagaacatcctagactgagtgaatgcttattatacattgtagtttgttcatattttggagccatgaatgttacccattaccatttatgtttattggacaaatgaacaaacttcttctgcttattatcacaatgttctggtgtacatagtctttcattaccattttgcttggagcttcaaccagatgaccagtcagtgataacatttcatttatctgaacaggcatttcttgctttctatgtaataaatgatttagaaatgaatcaatcctccaaagcattggtacctgctattatctacatctgcagtttgatagtatctgtaatattacaggagactagatggtcaagttggcgtcttaagctttacttttcagctggagcagtgctttggatattgtcaggtcttggaattgttcttctaccgagcagaatgcacaacctcatgtatgccatttcaatcgtaataggagctgcgaatgcacttatgacagtgacaagtattagcatggaaggtgttctagtaggagaagatctaaatggttgtgcttttgtgtatggctcattaagttttgttgacaaagtttcatgtggaatagctctctatgttctcgagtcctatcaaggaagtacaaagatcagatcaaatttaggaacaacatctggctattcagttacaagacttggcttgggcttagttccagctgcttgttcgctgctttcagctatagcagcttataccatggagctccctgatactcagaaaggacctttggtggaaccccttctagcataacttcactggtggcagtgttacagtttcaccgtgagatttcacagtaattgctcgatggaatgacactgctgctcgagcctgaagatgttagcgacctggtcaattcgttttgacttcgtatatatagtctgaataaattatgacggaggggatatactgagacacgtttgaatagggattagaagtgacataggggggctaggggcaagaagatctgtgttgatcatactgagctttacaagtcattctgcaatccaatgtaaatataacttagcttcatttcgaaagcatcaaaactgccaactaggcacatgtagcgacgatgggcaaggaaaagaatatctctggtccttgttctacgctataatttcattgtatatgtagcatcatgattgaaaagaaatatcttatatttatattgatgggtgaaatagtgtcgcctatgctcatgtaaattgtttctgacatttagaaattaaatatgcttgagaagagagcactaatctgtctaa

SEQ ID NO: 22649 - DNA, 2104 bp, Zea Mays
gtccccgcttccgttactccctccgcgccccgctcctcccgcctgtcctccacgcgacgttccttgtatccccgtcgccttccttgggcagttgggctgagtcctcccgtctctcgcccctgcagatatagttgcggcggggtttccttcttcgagaaagttccgaaccagagggagccgcgcggaaagccggaggcgtcccatgctgctggcagtcttgctaacttcagctgatggttaatatgagggacaatgactcatcaagcgacgcacaattggacgagccattaggacgggtatcgatactctcttacggttctgggcatatgctcaacgacatcacatcgtcttgttggtttacctatttgcttgtgttcttgacagatctgggacttagtccaggtgatgccgctattgtgatgctttctggacaattggcggatggcttcacaacaatctttgttggggaattgatggatcgctttggacatttcaaactgtggcatgcaggaggatctattttagtggcaatttccttctcgtctgtttttggtagctgtgttccttgcaaacttatgggaattaatacatctactttggagactgttggatacagcacatttgctgctatttttaatgttggttgggcagttactcaagtcgctcacatcattacatttatggatatcttttatatgctcctaaggtctatggtaaactgcattacatcaaatccaactagccgggtttcacttgttgcgaatcttagcctgtatggcgttgctttggtgatatttactctattgcagtcagtgaatgtactagttcaggtgtccatttccctcggatcttgctttgttgtcatcttcttgattggaaccaaagagccaggatcaattcggcactgtttggataagagtccttccagaatttcatgggactactggttcaagagagtattgtactaccaagttgctctagtctatactctgactagattggtgaccaatgtttcacaggcatttcttgctttctatgtaataaatgatttagaaatgaatcaatcctccaaagcattggtacctgctattatctacatctgcagtttgatagtatctgtaatattacaggagactagatggtcaagttggcgtcttaagctttacttttcagctggagcagtgctttggatattgtcaggtcttggaattgttcttctaccgagcagaatgcacaacctcatgtatgccatttcaatcgtaataggagctgcgaatgcacttatgacagtgacaagtattagcatggaaggtgttctagtaggagaagatctaaatggttgtgcttttgtgtatggctcattaagttttgttgacaaagtttcatgtggaatagctctctatgttctcgagtcctatcaaggaagtacaaagatcagatcaaatttaggaacaacatctggctattcagttacaagacttggcttgggcttagttccagctgcttgttcgctgctttcagctatagcagcttataccatggagctccctgatactcagaaaggacctttggtggaaccccttctagcataacttcactggtggcagtgttacagtttcaccgtgagatttcacagtaattgctcgatggaatgacactgctgctcgagcctgaagatgttagcgacctggtcaattcgttttgacttcgtatatatagtctgaataaattatgacggaggggatatactgagacacgtttgaatagggattagaagtgacataggggggctaggggcaagaagatctgtgttgatcatactgagctttacaagtcattctgcaatccaatgtaaatataacttagcttcatttcgaaagcatcaaaactgccaactaggcacatgtagcgacgatgggcaaggaaaagaatatctctggtccttgttctacgctataatttcattgtatatgtagcatcatgattgaaaagaaatatcttatatttatattgatgggtgaaatagtgtcgcctatgctcatgtaaattgtttctgacatttagaaattaaatatgcttgagaagagagcactaatctgtctaa

SEQ ID NO: 22650 - DNA, 1925 bp, Zea Mays
gtccccgcttccgttactccctccgcgccccgctcctcccgcctgtcctccacgcgacgttccttgtatccccgtcgccttccttgggcagttgggctgagtcctcccgtctctcgcccctgcagatatagttgcggcggggtttccttcttcgagaaagttccgaaccagagggagccgcgcggaaagccggaggcgtcccatgctgctggcagtgatgccgctattgtgatgctttctggacaattggcggatggcttcacaacaatctttgttggggaattgatggatcgctttggacatttcaaactgtggcatgcaggaggatctattttagtggcaatttccttctcgtctgtttttggtagctgtgttccttgcaaacttatgggaattaatacatctactttggagactgttggatacagcacatttgctgctatttttaatgttggttgggcagttactcaagtcgctcacatgtctatggtaaactgcattacatcaaatccaactagccgggtttcacttgtaagctgtcgtaatgccttcacgatggttgcgaatcttagcctgtatggcgttgctttggtgatatttactctattgcagtcagtgaatgtactagttcagtatcggtggattgcttaggtgtccatttccctcggatcttgctttgttgtcatcttcttgattggaaccaaagagccaggatcaattcggcactgtttggataagagtccttccagaatttcatgggactactggttcaagagagtattgtactaccaagttgctctagtctatactctgactagattggtgaccaatgtttcacaggcatttcttgctttctatgtaataaatgatttagaaatgaatcaatcctccaaagcattggtacctgctattatctacatctgcagtttgatagtatctgtaatattacaggagactagatggtcaagttggcgtcttaagctttacttttcagctggagcagtgctttggatattgtcaggtcttggaattgttcttctaccgagcagaatgcacaacctcatgtatgccatttcaatcgtaataggagctgcgaatgcacttatgacagtgacaagtattagcatggaaggtgttctagtaggagaagatctaaatggttgtgcttttgtgtatggctcattaagttttgttgacaaagtttcatgtggaatagctctctatgttctcgagtcctatcaaggaagtacaaagatcagatcaaatttaggaacaacatctggctattcagttacaagacttggcttgggcttagttccagctgcttgttcgctgctttcagctatagcagcttataccatggagctccctgatactcagaaaggacctttggtggaaccccttctagcataacttcactggtggcagtgttacagtttcaccgtgagatttcacagtaattgctcgatggaatgacactgctgctcgagcctgaagatgttagcgacctggtcaattcgttttgacttcgtatatatagtctgaataaattatgacggaggggatatactgagacacgtttgaatagggattagaagtgacataggggggctaggggcaagaagatctgtgttgatcatactgagctttacaagtcattctgcaatccaatgtaaatataacttagcttcatttcgaaagcatcaaaactgccaactaggcacatgtagcgacgatgggcaaggaaaagaatatctctggtccttgttctacgctataatttcattgtatatgtagcatcatgattgaaaagaaatatcttatatttatattgatgggtgaaatagtgtcgcctatgctcatgtaaattgtttctgacatttagaaattaaatatgcttgagaagagagcactaatctgtctaa

SEQ ID NO: 22651 - DNA, 969 bp, Zea Mays
atgattaaaaataccgtggccacgctgatggtgcgcctccaccacctgcccctgccccgcgccgcgcccgctcccacctaccgttgcggccgccacctcgccctcgcgccccctctccctcggctgcgggcatcggccgccgtcatgtcaacggcggcggaacagacgatcgccgaccagaagcgcacgctgcgcgccgaggtgcgcagggcgctgaaggccctctctgccgaccagcgcgccagcgaagatctggctattcaaactacaatactggattcctcttggttcaaagcaagcaaacggttgtgcgcttatataagctgtcagcagttgcgagaagttgatacatcaaaaatactagcagagtgtctaccgtcgaatcctggacaagaggaactggcaaaggatctttatgttcctcgagtggaggataagaaccgtaacatgaggatgctcaaaatcaccaccatggatgatttagttaagaattcaatgaacattctggaaccatcgcctgtggatgctactgggaacaatcgtgaagatgtattgtcatcattgtctcctgttgatctttttttattgccgggacaagcttttgatagaactggtcgaagactggggcgtggtggagggtactatgacacattcttgctgaagtaccaagaacttgcaaaagagaaagggtggaaccagcctctcttagtgctgcggcgttgcagaggatgcaatgaagttgattggcctctgtagccatgctttcacaacaagcaccttcttctgatccctggttgcactagcaaatacaccagcagatcaaggaaactgtctcttttttccccctcgtggctcctctcttgtatcatcttttacgttttaacagggtgaactggacgtctacatcttattccagccacttcagatttatttttgttgaggcatctgtagacaaatcttatttaggct

SEQ ID NO: 22652 - DNA, 1072 bp, Zea Mays
atgattaaaaataccgtggccacgctgatggtgcgcctccaccacctgcccctgccccgcgccgcgcccgctcccacctaccgttgcggccgccacctcgccctcgcgccccctctccctcggctgcgggcatcggccgccgtcatgtcaacggcggcggaacagacgatcgccgaccagaagcgcacgctgcgcgccgaggtgcgcagggcgctgaaggccctctctgccgaccagcgcgccagcgaagatctggctattcaaactacaatactggattcctcttggttcaaagcaagcaaacggttgtgcgcttatataagctgtcagcagttgcgagaagttgatacatcaaaaatactagcagagtgtctaccgtcgaatcctgaggaactggcaaaggatctttatgttcctcgagtggaggataagaaccgtaacatgaggatgctcaaaatcaccaccatggatgatttagttaagaattcaatgaacattctggaaccatcgcctgtggatgctactgggaacaatcgtgaagatgtattgtcatcattgtctcctgttgatctttttttattgccgggacaagcttttgatagaactggtcgaagactggggcgtggtggagggtactatgacacattcttgctgaagtaccaagaacttgcaaaagagaaagggtggaaccagcctctcttagttgctctttcgtactcggtgcaaattatggacgagggcatcatcccagtcaattcaactgatgttcctattgatgctctggtctcatcgtccggtgttattccaataagtgctgcggcgttgcagaggatgcaatgaagttgattggcctctgtagccatgctttcacaacaagcaccttcttctgatccctggttgcactagcaaatacaccagcagatcaaggaaactgtctcttttttccccctcgtggctcctctcttgtatcatcttttacgttttaacagggtgaactggacgtctacatcttattccagccacttcagatttatttttgttgaggcatctgtagacaaatcttatttaggct

SEQ ID NO: 22653 - DNA, 840 bp, Zea Mays
ggcgttttgagttcaagggggtttagagtttaagacatttaaaaaataaaataattttggccaacctctagtagaaacttacaagtgctccgcaactgaaattttgttaaccgaaattgcttggaaggacatagcgttcggcaagagaagatagggttcataatttgatacgatatttcatacttttggaattcgaactaaacagccccattccatcaaggtacagagctacagctagtatacatcacatgacgatttggatatattcctcgaacccaagttcgacgggcgacggcctgacaaagtcacaacaggtccgacaatagagtacgcagtcacctcaaattctcagttctgcctatgggcgatatagttggccagatgcaacagaggcgctgccttctccttgtcgaagcaagcaagctgctctacggcatcagagagcaactcctccgcgaactcccgcgacttttctagccccagcagcttcggcccgatcgacctcgcgtacttccgcagcctctcgatctgctcgtccgtgccgcctccgatgatcgccccaatcaccaccgaggcctcgagcaatgcggcggtcttgtggaggtggatgtactcgaggcgttcgaggggcaccgtctctgatgtgcccgtcatctcgagatcgacaacctggagagggcatgtggagcattttttcagctgatttgagagctagtgctagtgattttcaatttataattccagtgagtgcagacaatttgagcatcgaccgcgtcgccgttaggaagatgctccatataaaataaagaatgccaggataagcaattgtccggttttttt

SEQ ID NO: 22654 - DNA, 212 bp, Zea Mays
agtggacgcgcgaggcggccagcgggtggaagtggaacgacatggccatgggtggcgagttgggggggacggcgtcgctggagattgggggagggccccgacaggttacggcctccttatctttgaggtgaaaggatgctttggcgctgggcgcgtcagtgcagcaggggaggaagtggagtggccgcccgggcggtggtggtgcttgctgc

SEQ ID NO: 22655 - DNA, 1737 bp, Zea Mays
caaaaaccctgggtctctccttcgaggcttcaacctaaacctcgtctcgcctccttcagtccatcccctcaaccccggcggccaaaagccggcgcaccgaagcggcgggccggcggcaagcggtggccatggcggagctaaagcggctgtcagagagccgggacctgacgcggatcgagcgcatcggcgcgcactcccacatccgggggctagggctggactcctccatggaggcgcgcgacgcctcggagggcatggtcgggcagctgcccgcgcgccgcgccgcggggctcatactccagctcatccgccagggcaagatcgccggccgcgccgttctcctcgcgggccagcccggcaccggcaagaccgcgctcgccatgggcatcgccaagtcgctcggcgcggagacgcccttcgcctccgtcgccgcctcggagctcttctcgctcgacctctccaagacggaggcgctcacgcaggccttccgccgcgccatcggcgtgcgcatcaaggaggagacggaaatcatcgagggcgaggtcgtggagatcttgatcgaccgccctttgtcggcctctgccgctggcggcagctcggctgcccctacaggtgctactgcggctggtaagtcgggtcggctcacgctgaagaccacggacatggaaacggtgtacgagctcgggggaaagatgattgaggctcttgggaaggagaaggtgcagagcggggatgtgattgcgcttgacaaggcctccgggaaggtcaccaagcttggacgctccattgggaggtcgcgggattatgatgccgttggcccgcacaccaagtttgtcaagtgtcctgatggcgagctccagaagcgcaaggagatcgtgcactgtgttaccttacatgagattgatgtcattaatagcagattgacacaaaagtcgcagagtggagagaggaaggaaaagctgatattgtccctggtgttctgttcatcgatgaagttcacatgctagacattgagtgcttctccttcctcaaccgagcattggaaaatgacatggctccgatcctagtaatcgcaacaaacagagggatcacatccattcgtgggacaaactaccgctcgccacacgggatcccgccagacttccttgaccggttactgatcatcacgacgcagccctacacggaggacgagatcaggaagatcctggacatccggtgcgatgaggaggatgtggagatgtccgcggacgccaaggtcctgctcaccaaaatcggcgtggagacctcgctgcggtacgccatcaaccttatcacatctgccgcactagcctgccagaggcgcaaggggaaggtggtcgacatggaggacattagccgggtgtaccagttgttcctggacgtgaagcggtcgacgcagtacctgatggagtaccagagccagtacatgttcaacgaagtgcccggggaagcagatggagaggacgcgatgcaatcctagatgaacttttcttcaccaggtgtctgtgttagtatgtactgcgtgtctgcgtcgtctatttctggtgcatcttgcttgtttagttgctgttatttcctgacaaggcgtggtgtgtgcgatggactgcctgaaagctgatttaggtaactatatatgcaattcagatgtatcttagtaaaattcaccccagttggagtgacattgtttgtttaaatttgtgccacaatcttgtagtgtat

SEQ ID NO: 22656 - DNA, 3021 bp, Zea Mays
ctgctcaatcttccccttcgtttattgctcttctccggtccttctccgcaacccctggccctgtcaagcagacgcagggtgacaccaggcagcagcccacctccacgcgaacacgccgcaccacaccatcaccggcaccgcagcacggcagccagtcaccaggactccaggagtgatctttgatccccaccaggccgccacgctactgtcgcccttcccgcaccactcccaactcgtaaacgctgtgcgccaacgccgtcgcccttccggatccgtcgtccttccgccggcgccgtgatggacccaagcgattccaactccgccgcaggaggaaagacacaaaatgtttcagtaccgcctgttgaaggtgtagctggaggaggaactagctatggatgggtggatggaggtttgcggggtacaaatattggtgctggtgtgattgatcctacaaaagtacactcagatgatcttttgcacgtctggtctatgcccagcacagcaaatgttagccagcaagaagcgcctcggcctctagagaaagtcaaccttttggcagcaagaaatgaaagggaaagttttcaaattgctttacgcccaaaggtttcatgggcaacttcaggtattgcagggtctgtgcagatacaatgcaccgatctctgctcctcctcaggagacaggttagtcgttggtcagtccataactttgcgacgtgtggtgcctatcttaggtgtaccagatgcacttgttcctattgatccactcagtcctcaaataagtattcaaccaggggagacagctgcagtttgggtatcagtaaatgttccatgtgggcaaccgcctggtttatatgagggtgaaatattcattactgcagttaagacagaattagaaatcttgagtaaccttgtgacattagctttgatttctgggttatacttttttgctgacctaatttctggtagcagttccagaacagaatctctaccaaaatctgaaaagtgtaggctatacagagaattaagaagttgtcttgacctcactggacccagagactactcgtcaccagaggaaatggtacaaagactaacatcagcttctactgtactaaggagggtgttggataatccagcactccaggactgtcaagagaataatggatttggagacatgatggatgaagatgttataaacaatatttcagttcgcttgaagttaagccttactgtttgggacttcactctcccagtgacaccttctttacctgctgtttttggtatatctgaaactgtcattgaagatcgattctgtttggagcatggcactgaaggatggtatagtgcactggatcatcactttaggtggctcctccaatataggattagtccatttttctgcagatggggtgatagcatgcgcattctagcatacacatgcccttggcctgccgatcatccgaaggctaatgaatattactctgacccaagattagcagcatatgctgtaccctatgcacctatcctatcgtgtacggatgctgcaaaaaattccctgaggagagaggttgaaatcttaaaatcgaagcctcattggtccaaagcttacttctatttgtgggatgagccattaaatgtggaacagtatgacatgatatgcaacatctctaatgagctacggtcatatgcacctgatgtgcgaattttgacaacttactattgtggtccaagtggctctgaactggctccctctacatttgaagcttttgcaaaagttccaaatgttctgcgtccgcacacgcaaatcttttgcacaagtgaatgggttcttggcacaagagaagacctagtgaaggatattgttgctgaattacggcctgatcttggtgaggagtggtggacatatgtttgtatgggtccttctgatcctcaaccaaactggcaccttgggatgcgtggaacccagcaccgggcagtgatgtggcgagtgtggaaggaaggtgggacaggatttctttattggggttccaactgctatgagaaggctatgatcccaagtgctgagatctgtttccgacgcggccttcctcctggcgacggtgtcctgttttaccctggtgaagtgttttcttcgtcacatgaaccagttgcttccacccggctagagcgcattctcagtggcatgcaggacatcgaatacctgaagctttattcttcacggtatgggagggaggaaggcctggcccttatagagaagactggcatgtaccttggaccggatcgatatacgctggatcatggaccggtagatgtgatgaggggtgaggtgtaccgcacctgcaggtcttagtgtagcaatgcctgccagatgctgtccttccagtctagggcgtctgttgtattatatatggtggtatgtgatctatgtagcgaattaatctacccttggtgatcgatcagatcatcaaacctggactaaactagtcctggtgcatcttttgaatctggctcgagagttgcatcaagtcgggagaaaaaaaacccaagagatctggccaagagatggagcgacccaggtccggctctggtacaaggcccagttagctaccggaagtgggccctatctgctgcaacaggattgagacgagattggcattgtcctctcgattccatgacgctgtgcccgcatacagctgaagctgaaatattctcctattagctgttaccttccatttcctttctgcgatttgcaccgcaggttacaccctccaaaggcgcattcgtttctaccgtgtgccgtgacgaggattcccgtctcagcaacggacgctgccgccgcgatgccctgtctctttcgaggtcggtagcgccatggcctaacgcggagctgtgtttggttggaagggaataatgcatgcgatgcatggtgaggaaggatgagtctatcccgagctctgtttggtccagagacatgaaaattaggtccagactgttaagtaaccctagttagggttatgtgggcaaa

SEQ ID NO: 22657 - DNA, 3069 bp, Zea Mays
ctcaatcttccccttcgtttattgctcttctccggtccttctccgcaacccctggccctgtcaagcagacgcagggtgacaccaggcagcagcccacctccacgcgaacacgccgcaccacaccatcaccggcaccgcagcacggcagccagtcaccaggactccaggagtgatctttgatccccaccaggccgccacgctactgtcggtaaggccagggaccctgctgcatctgccggctgctcctctccccgcccccggttccatgagaggtcggcggtttcgataacacacaccaactgctccctccactccttccccctgccttcagcccttcccgcaccactcccaactcgtaaacgctgtgcgccaacgccgtcgcccttccggatccgtcgtccttccgccggcgccgtgatggacccaagcgattccaactccgccgcaggaggaaagacacaaaatgtttcagtaccgcctgttgaaggtgtagctggaggaggaactagctatggatgggtggatggaggtttgcggggtacaaatattggtgctggtgtgattgatcctacaaaagtacactcagatgatcttttgcacgtctggtctatgcccagcacagcaaatgttagccagcaagaagcgcctcggcctctagagaaagtcaaccttttggcagcaagaaatgaaagggaaagttttcaaattgctttacgcccaaaggtttcatgggcaacttcaggtattgcagggtctgtgcagatacaatgcaccgatctctgctcctcctcaggagacagggaagaccagcattcgcacagttctattccgatggttataaatgttgtaccaggtgtaccagatgcacttgttcctattgatccactcagtcctcaaataagtattcaaccaggggagacagctgcagtttgggtatcagtaaatgttccatgtgggcaaccgcctggtttatatgagggtgaaatattcattactgcagttaagacagaattagattccagaacagaatctctaccaaaatctgaaaagtgtaggctatacagagaattaagaagttgtcttgacctcactggacccagagactactcgtcaccagaggaaatggtacaaagactaacatcagcttctactgtactaaggagggtgttggataatccagcactccaggactgtcaagagaataatggatttggagacatgatggatgaagatgttataaacaatatttcagttcgcttgaagttaagccttactgtttgggacttcactctcccagtgacaccttctttacctgctgtttttggtatatctgaaactgtcattgaagatcgattctgtttggagcatggcactgaaggatggtatagtgcactggatcatcactttaggtggctcctccaatataggattagtccatttttctgcagatggggtgatagcatgcgcattctagcatacacatgcccttggcctgccgatcatccgaaggctaatgaatattactctgacccaagattagcagcatatgctgtaccctatgcacctatcctatcgtgtacggatgctgcaaaaaattccctgaggagagaggttgaaatcttaaaatcgaagcctcattggtccaaagcttacttctatttgtgggatgagccattaaatgtggaacagtatgacatgatatgcaacatctctaatgagctacggtcatatgcacctgatgtgcgaattttgacaacttactattgtggtccaagtggctctgaactggctccctctacatttgaagcttttgcaaaagttccaaatgttctgcgtccgcacacgcaaatcttttgcacaagtgaatgggttcttggcacaagagaagacctagtgaaggatattgttgctgaattacggcctgatcttggtgaggagtggtggacatatgtttgtatgggtccttctgatcctcaaccaaactggcaccttgggatgcgtggaacccagcaccgggcagtgatgtggcgagtgtggaaggaaggtgggacaggatttctttattggggttccaactgctatgagaaggctatgatcccaagtgctgagatctgtttccgacgcggccttcctcctggcgacggtgtcctgttttaccctggtgaagtgttttcttcgtcacatgaaccagttgcttccacccggctagagcgcattctcagtggcatgcaggacatcgaatacctgaagctttattcttcacggtatgggagggaggaaggcctggcccttatagagaagactggcatgtaccttggaccggatcgatatacgctggatcatggaccggtagatgtgatgaggggtgaggtgtaccgcacctgcaggtcttagtgtagcaatgcctgccagatgctgtccttccagtctagggcgtctgttgtattatatatggtggtatgtgatctatgtagcgaattaatctacccttggtgatcgatcagatcatcaaacctggactaaactagtcctggtgcatcttttgaatctggctcgagagttgcatcaagtcgggagaaaaaaaacccaagagatctggccaagagatggagcgacccaggtccggctctggtacaaggcccagttagctaccggaagtgggccctatctgctgcaacaggattgagacgagattggcattgtcctctcgattccatgacgctgtgcccgcatacagctgaagctgaaatattctcctattagctgttaccttccatttcctttctgcgatttgcaccgcaggttacaccctccaaaggcgcattcgtttctaccgtgtgccgtgacgaggattcccgtctcagcaacggacgctgccgccgcgatgccctgtctctttcgaggtcggtagcgccatggcctaacgcggagctgtgtttggttggaagggaataatgcatgcgatgcatggtgaggaaggatgagtctatcccgagctctgtttggtccagagacatgaaaattaggtccagactgttaagtaaccctagttagggttatgtgggcaaa

SEQ ID NO: 22658 - DNA, 3016 bp, Zea Mays
ctcaatcttccccttcgtttattgctcttctccggtccttctccgcaacccctggccctgtcaagcagacgcagggtgacaccaggcagcagcccacctccacgcgaacacgccgcaccacaccatcaccggcaccgcagcacggcagccagtcaccaggactccaggagtgatctttgatccccaccaggccgccacgctactgtcggtaaggccagggaccctgctgcatctgccggctgctcctctccccgcccccggttccatgagaggtcggcggtttcgataacacacaccaactgctccctccactccttccccctgccttcagcccttcccgcaccactcccaactcgtaaacgctgtgcgccaacgccgtcgcccttccggatccgtcgtccttccgccggcgccgtgatggacccaagcgattccaactccgccgcaggaggaaagacacaaaatgtttcagtaccgcctgttgaaggtgtagctggaggaggaactagctatggatgggtggatggaggtttgcggggtacaaatattggtgctggtgtgattgatcctacaaaagtacactcagatgatcttttgcacgtctggtctatgcccagcacagcaaatgttagccagcaagaagcgcctcggcctctagagaaagtcaaccttttggcagcaagaaatgaaagggaaagttttcaaattgctttacgcccaaaggtttcatgggcaacttcaggtattgcagggtctgtgcagatacaatgcaccgatctctgctcctcctcaggagacaggtgtaccagatgcacttgttcctattgatccactcagtcctcaaataagtattcaaccaggggagacagctgcagtttgggtatcagtaaatgttccatgtgggcaaccgcctggtttatatgagggtgaaatattcattactgcagttaagacagaattagattccagaacagaatctctaccaaaatctgaaaagtgtaggctatacagagaattaagaagttgtcttgacctcactggacccagagactactcgtcaccagaggaaatggtacaaagactaacatcagcttctactgtactaaggagggtgttggataatccagcactccaggactgtcaagagaataatggatttggagacatgatggatgaagatgttataaacaatatttcagttcgcttgaagttaagccttactgtttgggacttcactctcccagtgacaccttctttacctgctgtttttggtatatctgaaactgtcattgaagatcgattctgtttggagcatggcactgaaggatggtatagtgcactggatcatcactttaggtggctcctccaatataggattagtccatttttctgcagatggggtgatagcatgcgcattctagcatacacatgcccttggcctgccgatcatccgaaggctaatgaatattactctgacccaagattagcagcatatgctgtaccctatgcacctatcctatcgtgtacggatgctgcaaaaaattccctgaggagagaggttgaaatcttaaaatcgaagcctcattggtccaaagcttacttctatttgtgggatgagccattaaatgtggaacagtatgacatgatatgcaacatctctaatgagctacggtcatatgcacctgatgtgcgaattttgacaacttactattgtggtccaagtggctctgaactggctccctctacatttgaagcttttgcaaaagttccaaatgttctgcgtccgcacacgcaaatcttttgcacaagtgaatgggttcttggcacaagagaagacctagtgaaggatattgttgctgaattacggcctgatcttggtgaggagtggtggacatatgtttgtatgggtccttctgatcctcaaccaaactggcaccttgggatgcgtggaacccagcaccgggcagtgatgtggcgagtgtggaaggaaggtgggacaggatttctttattggggttccaactgctatgagaaggctatgatcccaagtgctgagatctgtttccgacgcggccttcctcctggcgacggtgtcctgttttaccctggtgaagtgttttcttcgtcacatgaaccagttgcttccacccggctagagcgcattctcagtggcatgcaggacatcgaatacctgaagctttattcttcacggtatgggagggaggaaggcctggcccttatagagaagactggcatgtaccttggaccggatcgatatacgctggatcatggaccggtagatgtgatgaggggtgaggtgtaccgcacctgcaggtcttagtgtagcaatgcctgccagatgctgtccttccagtctagggcgtctgttgtattatatatggtggtatgtgatctatgtagcgaattaatctacccttggtgatcgatcagatcatcaaacctggactaaactagtcctggtgcatcttttgaatctggctcgagagttgcatcaagtcgggagaaaaaaaacccaagagatctggccaagagatggagcgacccaggtccggctctggtacaaggcccagttagctaccggaagtgggccctatctgctgcaacaggattgagacgagattggcattgtcctctcgattccatgacgctgtgcccgcatacagctgaagctgaaatattctcctattagctgttaccttccatttcctttctgcgatttgcaccgcaggttacaccctccaaaggcgcattcgtttctaccgtgtgccgtgacgaggattcccgtctcagcaacggacgctgccgccgcgatgccctgtctctttcgaggtcggtagcgccatggcctaacgcggagctgtgtttggttggaagggaataatgcatgcgatgcatggtgaggaaggatgagtctatcccgagctctgtttggtccagagacatgaaaattaggtccagactgttaagtaaccctagttagggttatgtgggcaaa

SEQ ID NO: 22659 - DNA, 3066 bp, Zea Mays
ctcaatcttccccttcgtttattgctcttctccggtccttctccgcaacccctggccctgtcaagcagacgcagggtgacaccaggcagcagcccacctccacgcgaacacgccgcaccacaccatcaccggcaccgcagcacggcagccagtcaccaggactccaggagtgatctttgatccccaccaggccgccacgctactgtcggtaaggccagggaccctgctgcatctgccggctgctcctctccccgcccccggttccatgagaggtcggcggtttcgataacacacaccaactgctccctccactccttccccctgccttcagcccttcccgcaccactcccaactcgtaaacgctgtgcgccaacgccgtcgcccttccggatccgtcgtccttccgccggcgccgtgatggacccaagcgattccaactccgccgcaggaggaaagacacaaaatgtttcagtaccgcctgttgaaggtgtagctggaggaggaactagctatggatgggtggatggaggtttgcggggtacaaatattggtgctggtgtgattgatcctacaaaagtacactcagatgatcttttgcacgtctggtctatgcccagcacagcaaatgttagccagcaagaagcgcctcggcctctagagaaagtcaaccttttggcagcaagaaatgaaagggaaagttttcaaattgctttacgcccaaaggtttcatgggcaacttcaggtattgcagggtctgtgcagatacaatgcaccgatctctgctcctcctcaggagacaggttagtcgttggtcagtccataactttgcgacgtgtggtgcctatcttaggtgtaccagatgcacttgttcctattgatccactcagtcctcaaataagtattcaaccaggggagacagctgcagtttgggtatcagtaaatgttccatgtgggcaaccgcctggtttatatgagggtgaaatattcattactgcagttaagacagaattagattccagaacagaatctctaccaaaatctgaaaagtgtaggctatacagagaattaagaagttgtcttgacctcactggacccagagactactcgtcaccagaggaaatggtacaaagactaacatcagcttctactgtactaaggagggtgttggataatccagcactccaggactgtcaagagaataatggatttggagacatgatggatgaagatgttataaacaatatttcagttcgcttgaagttaagccttactgtttgggacttcactctcccagtgacaccttctttacctgctgtttttggtatatctgaaactgtcattgaagatcgattctgtttggagcatggcactgaaggatggtatagtgcactggatcatcactttaggtggctcctccaatataggattagtccatttttctgcagatggggtgatagcatgcgcattctagcatacacatgcccttggcctgccgatcatccgaaggctaatgaatattactctgacccaagattagcagcatatgctgtaccctatgcacctatcctatcgtgtacggatgctgcaaaaaattccctgaggagagaggttgaaatcttaaaatcgaagcctcattggtccaaagcttacttctatttgtgggatgagccattaaatgtggaacagtatgacatgatatgcaacatctctaatgagctacggtcatatgcacctgatgtgcgaattttgacaacttactattgtggtccaagtggctctgaactggctccctctacatttgaagcttttgcaaaagttccaaatgttctgcgtccgcacacgcaaatcttttgcacaagtgaatgggttcttggcacaagagaagacctagtgaaggatattgttgctgaattacggcctgatcttggtgaggagtggtggacatatgtttgtatgggtccttctgatcctcaaccaaactggcaccttgggatgcgtggaacccagcaccgggcagtgatgtggcgagtgtggaaggaaggtgggacaggatttctttattggggttccaactgctatgagaaggctatgatcccaagtgctgagatctgtttccgacgcggccttcctcctggcgacggtgtcctgttttaccctggtgaagtgttttcttcgtcacatgaaccagttgcttccacccggctagagcgcattctcagtggcatgcaggacatcgaatacctgaagctttattcttcacggtatgggagggaggaaggcctggcccttatagagaagactggcatgtaccttggaccggatcgatatacgctggatcatggaccggtagatgtgatgaggggtgaggtgtaccgcacctgcaggtcttagtgtagcaatgcctgccagatgctgtccttccagtctagggcgtctgttgtattatatatggtggtatgtgatctatgtagcgaattaatctacccttggtgatcgatcagatcatcaaacctggactaaactagtcctggtgcatcttttgaatctggctcgagagttgcatcaagtcgggagaaaaaaaacccaagagatctggccaagagatggagcgacccaggtccggctctggtacaaggcccagttagctaccggaagtgggccctatctgctgcaacaggattgagacgagattggcattgtcctctcgattccatgacgctgtgcccgcatacagctgaagctgaaatattctcctattagctgttaccttccatttcctttctgcgatttgcaccgcaggttacaccctccaaaggcgcattcgtttctaccgtgtgccgtgacgaggattcccgtctcagcaacggacgctgccgccgcgatgccctgtctctttcgaggtcggtagcgccatggcctaacgcggagctgtgtttggttggaagggaataatgcatgcgatgcatggtgaggaaggatgagtctatcccgagctctgtttggtccagagacatgaaaattaggtccagactgttaagtaaccctagttagggttatgtgggcaaa

SEQ ID NO: 22660 - DNA, 3061 bp, Zea Mays
ctcaatcttccccttcgtttattgctcttctccggtccttctccgcaacccctggccctgtcaagcagacgcagggtgacaccaggcagcagcccacctccacgcgaacacgccgcaccacaccatcaccggcaccgcagcacggcagccagtcaccaggactccaggagtgatctttgatccccaccaggccgccacgctactgtcggtaaggccagggaccctgctgcatctgccggctgctcctctccccgcccccggttccatgagaggtcggcggtttcgataacacacaccaactgctccctccactccttccccctgccttcagcccttcccgcaccactcccaactcgtaaacgctgtgcgccaacgccgtcgcccttccggatccgtcgtccttccgccggcgccgtgatggacccaagcgattccaactccgccgcaggaggaaagacacaaaatgtttcagtaccgcctgttgaaggtgtagctggaggaggaactagctatggatgggtggatggaggtttgcggggtacaaatattggtgctggtgtgattgatcctacaaaagtacactcagatgatcttttgcacgtctggtctatgcccagcacagcaaatgttagccagcaagaagcgcctcggcctctagagaaagtcaaccttttggcagcaagaaatgaaagggaaagttttcaaattgctttacgcccaaaggtttcatgggcaacttcaggtattgcagggtctgtgcagatacaatgcaccgatctctgctcctcctcaggagacagtcgttggtcagtccataactttgcgacgtgtggtgcctatcttaggtgtaccagatgcacttgttcctattgatccactcagtcctcaaataagtattcaaccaggggagacagctgcagtttgggtatcagtaaatgttccatgtgggcaaccgcctggtttatatgagggtgaaatattcattactgcagttaagacagaattagattccagaacagaatctctaccaaaatctgaaaagtgtaggctatacagagaattaagaagttgtcttgacctcactggacccagagactactcgtcaccagaggaaatggtacaaagactaacatcagcttctactgtactaaggagggtgttggataatccagcactccaggactgtcaagagaataatggatttggagacatgatggatgaagatgttataaacaatatttcagttcgcttgaagttaagccttactgtttgggacttcactctcccagtgacaccttctttacctgctgtttttggtatatctgaaactgtcattgaagatcgattctgtttggagcatggcactgaaggatggtatagtgcactggatcatcactttaggtggctcctccaatataggattagtccatttttctgcagatggggtgatagcatgcgcattctagcatacacatgcccttggcctgccgatcatccgaaggctaatgaatattactctgacccaagattagcagcatatgctgtaccctatgcacctatcctatcgtgtacggatgctgcaaaaaattccctgaggagagaggttgaaatcttaaaatcgaagcctcattggtccaaagcttacttctatttgtgggatgagccattaaatgtggaacagtatgacatgatatgcaacatctctaatgagctacggtcatatgcacctgatgtgcgaattttgacaacttactattgtggtccaagtggctctgaactggctccctctacatttgaagcttttgcaaaagttccaaatgttctgcgtccgcacacgcaaatcttttgcacaagtgaatgggttcttggcacaagagaagacctagtgaaggatattgttgctgaattacggcctgatcttggtgaggagtggtggacatatgtttgtatgggtccttctgatcctcaaccaaactggcaccttgggatgcgtggaacccagcaccgggcagtgatgtggcgagtgtggaaggaaggtgggacaggatttctttattggggttccaactgctatgagaaggctatgatcccaagtgctgagatctgtttccgacgcggccttcctcctggcgacggtgtcctgttttaccctggtgaagtgttttcttcgtcacatgaaccagttgcttccacccggctagagcgcattctcagtggcatgcaggacatcgaatacctgaagctttattcttcacggtatgggagggaggaaggcctggcccttatagagaagactggcatgtaccttggaccggatcgatatacgctggatcatggaccggtagatgtgatgaggggtgaggtgtaccgcacctgcaggtcttagtgtagcaatgcctgccagatgctgtccttccagtctagggcgtctgttgtattatatatggtggtatgtgatctatgtagcgaattaatctacccttggtgatcgatcagatcatcaaacctggactaaactagtcctggtgcatcttttgaatctggctcgagagttgcatcaagtcgggagaaaaaaaacccaagagatctggccaagagatggagcgacccaggtccggctctggtacaaggcccagttagctaccggaagtgggccctatctgctgcaacaggattgagacgagattggcattgtcctctcgattccatgacgctgtgcccgcatacagctgaagctgaaatattctcctattagctgttaccttccatttcctttctgcgatttgcaccgcaggttacaccctccaaaggcgcattcgtttctaccgtgtgccgtgacgaggattcccgtctcagcaacggacgctgccgccgcgatgccctgtctctttcgaggtcggtagcgccatggcctaacgcggagctgtgtttggttggaagggaataatgcatgcgatgcatggtgaggaaggatgagtctatcccgagctctgtttggtccagagacatgaaaattaggtccagactgttaagtaaccctagttagggttatgtgggcaaa

SEQ ID NO: 22661 - DNA, 3010 bp, Zea Mays
caatcttccccttcgtttattgctcttctccggtccttctccgcaacccctggccctgtcaagcagacgcagggtgacaccaggcagcagcccacctccacgcgaacacgccgcaccacaccatcaccggcaccgcagcacggcagccagtcaccaggactccaggagtgatctttgatccccaccaggccgccacgctactgtcgcccttcccgcaccactcccaactcgtaaacgctgtgcgccaacgccgtcgcccttccggatccgtcgtccttccgccggcgccgtgatggacccaagcgattccaactccgccgcaggaggaaagacacaaaatgtttcagtaccgcctgttgaaggtgtagctggaggaggaactagctatggatgggtggatggaggtttgcggggtacaaatattggtgctggtgtgattgatcctacaaaagtacactcagatgatcttttgcacgtctggtctatgcccagcacagcaaatgttagccagcaagaagcgcctcggcctctagagaaagtcaaccttttggcagcaagaaatgaaagggaaagttttcaaattgctttacgcccaaaggtttcatgggcaacttcaggtattgcagggtctgtgcagatacaatgcaccgatctctgctcctcctcaggagacaggttagtcgttggtcagtccataactttgcgacgtgtggtgcctatcttaggtgtaccagatgcacttgttcctattgatccactcagtcctcaaataagtattcaaccaggggagacagctgcagtttgggtatcagtaaatgttccatgtgggcaaccgcctggtttatatgagggtgaaatattcattactgcagttaagacagaattagattccagaacagaatctctaccaaaatctgaaaagtgtaggctatacagagaattaagaagttgtcttgacctcactggacccagagactactcgtcaccagaggaaatggtacaaagactaacatcagcttctactgtactaaggagggtgttggataatccagcactccaggactgtcaagagaataatggatttggagacatgatggatgaagatgttataaacaatatttcagttcgcttgaagttaagccttactgtttgggacttcactctcccagtgacaccttctttacctgctgtttttggtatatctgaaactgtcattgaagatcgattctgtttggagcatggcactgaaggatggtatagtgcactggatcatcactttaggtggctcctccaatataggattagtccatttttctgcagatggggtgatagcatgcgcattctagcatacacatgcccttggcctgccgatcatccgaaggctaatgaatattactctgacccaagattagcagcatatgctgtaccctatgcacctatcctatcgtgtacggatgctgcaaaaaattccctgaggagagaggttgaaatcttaaaatcgaagcctcattggtccaaagcttacttctatttgtgggatgagccattaaatgtggaacagtatgacatgatatgcaacatctctaatgagctacggtcatatgcacctgatgtgcgaattttgacaacttactattgtggcgccacctgtgctgatctggaacatcctgttggagttccaggttgtccactaagctctagagctgcaggtccaagtggctctgaactggctccctctacatttgaagcttttgcaaaagttccaaatgttctgcgtccgcacacgcaaatcttttgcacaagtgaatgggttcttggcacaagagaagacctagtgaaggatattgttgctgaattacggcctgatcttggtgaggagtggtggacatatgtttgtatgggtccttctgatcctcaaccaaactggcaccttgggatgcgtggaacccagcaccgggcagtgatgtggcgagtgtggaaggaaggtgggacaggatttctttattggggttccaactgctatgagaaggctatgatcccaagtgctgagatctgtttccgacgcggccttcctcctggcgacggtgtcctgttttaccctggtgaagtgttttcttcgtcacatgaaccagttgcttccacccggctagagcgcattctcagtggcatgcaggacatcgaatacctgaagctttattcttcacggtatgggagggaggaaggcctggcccttatagagaagactggcatgtaccttggaccggatcgatatacgctggatcatggaccggtagatgtgatgaggggtgaggtgtaccgcacctgcaggtcttagtgtagcaatgcctgccagatgctgtccttccagtctagggcgtctgttgtattatatatggtggtatgtgatctatgtagcgaattaatctacccttggtgatcgatcagatcatcaaacctggactaaactagtcctggtgcatcttttgaatctggctcgagagttgcatcaagtcgggagaaaaaaaacccaagagatctggccaagagatggagcgacccaggtccggctctggtacaaggcccagttagctaccggaagtgggccctatctgctgcaacaggattgagacgagattggcattgtcctctcgattccatgacgctgtgcccgcatacagctgaagctgaaatattctcctattagctgttaccttccatttcctttctgcgatttgcaccgcaggttacaccctccaaaggcgcattcgtttctaccgtgtgccgtgacgaggattcccgtctcagcaacggacgctgccgccgcgatgccctgtctctttcgaggtcggtagcgccatggcctaacgcggagctgtgtttggttggaagggaataatgcatgcgatgcatggtgaggaaggatgagtctatcccgagctctgtttggtccagagacatgaaaattaggtccagactgttaagtaaccctagttagggttatgtgggcaaa

SEQ ID NO: 22662 - DNA, 2824 bp, Zea Mays
caatcttccccttcgtttattgctcttctccggtccttctccgcaacccctggccctgtcaagcagacgcagggtgacaccaggcagcagcccacctccacgcgaacacgccgcaccacaccatcaccggcaccgcagcacggcagccagtcaccaggactccaggagtgatctttgatccccaccaggccgccacgctactgtcggaggaaagacacaaaatgtttcagtaccgcctgttgaaggtgtagctggaggaggaactagctatggatgggtggatggaggtttgcggggtacaaatattggtgctggtgtgattgatcctacaaaagtacactcagatgatcttttgcacgtctggtctatgcccagcacagcaaatgttagccagcaagaagcgcctcggcctctagagaaagtcaaccttttggcagcaagaaatgaaagggaaagttttcaaattgctttacgcccaaaggtttcatgggcaacttcaggtattgcagggtctgtgcagatacaatgcaccgatctctgctcctcctcaggagacaggttagtcgttggtcagtccataactttgcgacgtgtggtgcctatcttaggtgtaccagatgcacttgttcctattgatccactcagtcctcaaataagtattcaaccaggggagacagctgcagtttgggtatcagtaaatgttccatgtgggcaaccgcctggtttatatgagggtgaaatattcattactgcagttaagacagaattagattccagaacagaatctctaccaaaatctgaaaagtgtaggctatacagagaattaagaagttgtcttgacctcactggacccagagactactcgtcaccagaggaaatggtacaaagactaacatcagcttctactgtactaaggagggtgttggataatccagcactccaggactgtcaagagaataatggatttggagacatgatggatgaagatgttataaacaatatttcagttcgcttgaagttaagccttactgtttgggacttcactctcccagtgacaccttctttacctgctgtttttggtatatctgaaactgtcattgaagatcgattctgtttggagcatggcactgaaggatggtatagtgcactggatcatcactttaggtggctcctccaatataggattagtccatttttctgcagatggggtgatagcatgcgcattctagcatacacatgcccttggcctgccgatcatccgaaggctaatgaatattactctgacccaagattagcagcatatgctgtaccctatgcacctatcctatcgtgtacggatgctgcaaaaaattccctgaggagagaggttgaaatcttaaaatcgaagcctcattggtccaaagcttacttctatttgtgggatgagccattaaatgtggaacagtatgacatgatatgcaacatctctaatgagctacggtcatatgcacctgatgtgcgaattttgacaacttactattgtggtccaagtggctctgaactggctccctctacatttgaagcttttgcaaaagttccaaatgttctgcgtccgcacacgcaaatcttttgcacaagtgaatgggttcttggcacaagagaagacctagtgaaggatattgttgctgaattacggcctgatcttggtgaggagtggtggacatatgtttgtatgggtccttctgatcctcaaccaaactggcaccttgggatgcgtggaacccagcaccgggcagtgatgtggcgagtgtggaaggaaggtgggacaggatttctttattggggttccaactgctatgagaaggctatgatcccaagtgctgagatctgtttccgacgcggccttcctcctggcgacggtgtcctgttttaccctggtgaagtgttttcttcgtcacatgaaccagttgcttccacccggctagagcgcattctcagtggcatgcaggacatcgaatacctgaagctttattcttcacggtatgggagggaggaaggcctggcccttatagagaagactggcatgtaccttggaccggatcgatatacgctggatcatggaccggtagatgtgatgaggggtgaggtgtaccgcacctgcaggtcttagtgtagcaatgcctgccagatgctgtccttccagtctagggcgtctgttgtattatatatggtggtatgtgatctatgtagcgaattaatctacccttggtgatcgatcagatcatcaaacctggactaaactagtcctggtgcatcttttgaatctggctcgagagttgcatcaagtcgggagaaaaaaaacccaagagatctggccaagagatggagcgacccaggtccggctctggtacaaggcccagttagctaccggaagtgggccctatctgctgcaacaggattgagacgagattggcattgtcctctcgattccatgacgctgtgcccgcatacagctgaagctgaaatattctcctattagctgttaccttccatttcctttctgcgatttgcaccgcaggttacaccctccaaaggcgcattcgtttctaccgtgtgccgtgacgaggattcccgtctcagcaacggacgctgccgccgcgatgccctgtctctttcgaggtcggtagcgccatggcctaacgcggagctgtgtttggttggaagggaataatgcatgcgatgcatggtgaggaaggatgagtctatcccgagctctgtttggtccagagacatgaaaattaggtccagactgttaagtaaccctagttagggttatgtgggcaaa

SEQ ID NO: 22663 - DNA, 2997 bp, Zea Mays
ctcttctccggtccttctccgcaacccctggccctgtcaagcagacgcagggtgacaccaggcagcagcccacctccacgcgaacacgccgcaccacaccatcaccggcaccgcagcacggcagccagtcaccaggactccaggagtgatctttgatccccaccaggccgccacgctactgtcgcccttcccgcaccactcccaactcgtaaacgctgtgcgccaacgccgtcgcccttccggatccgtcgtccttccgccggcgccgtgatggacccaagcgattccaactccgccgcaggaggaaagacacaaaatgtttcagtaccgcctgttgaaggtgtagctggaggaggaactagctatggatgggtggatggaggtttgcggggtacaaatattggtgctggtgtgattgatcctacaaaagtacactcagatgatcttttgcacgtctggtctatgcccagcacagcaaatgttagccagcaagaagcgcctcggcctctagagaaagtcaaccttttggcagcaagaaatgaaagggaaagttttcaaattgctttacgcccaaaggtttcatgggcaacttcaggtattgcagggtctgtgcagatacaatgcaccgatctctgctcctcctcaggagacagggaagaccagcattcgcacagttctattccgatggttataaatgttgtaccaggtgtaccagatgcacttgttcctattgatccactcagtcctcaaataagtattcaaccaggggagacagctgcagtttgggtatcagtaaatgttccatgtgggcaaccgcctggtttatatgagggtgaaatattcattactgcagttaagacagaattagaaatcttgagtaaccttgtgacattagctttgatttctgggttatacttttttgctgacctaatttctggtagcagttccagaacagaatctctaccaaaatctgaaaagtgtaggctatacagagaattaagaagttgtcttgacctcactggacccagagactactcgtcaccagaggaaatggtacaaagactaacatcagcttctactgtactaaggagggtgttggataatccagcactccaggactgtcaagagaataatggatttggagacatgatggatgaagatgttataaacaatatttcagttcgcttgaagttaagccttactgtttgggacttcactctcccagtgacaccttctttacctgctgtttttggtatatctgaaactgtcattgaagatcgattctgtttggagcatggcactgaaggatggtatagtgcactggatcatcactttaggtggctcctccaatataggattagtccatttttctgcagatggggtgatagcatgcgcattctagcatacacatgcccttggcctgccgatcatccgaaggctaatgaatattactctgacccaagattagcagcatatgctgtaccctatgcacctatcctatcgtgtacggatgctgcaaaaaattccctgaggagagaggttgaaatcttaaaatcgaagcctcattggtccaaagcttacttctatttgtgggatgagccattaaatgtggaacagtatgacatgatatgcaacatctctaatgagctacggtcatatgcacctgatgtgcgaattttgacaacttactattgtggtccaagtggctctgaactggctccctctacatttgaagcttttgcaaaagttccaaatgttctgcgtccgcacacgcaaatcttttgcacaagtgaatgggttcttggcacaagagaagacctagtgaaggatattgttgctgaattacggcctgatcttggtgaggagtggtggacatatgtttgtatgggtccttctgatcctcaaccaaactggcaccttgggatgcgtggaacccagcaccgggcagtgatgtggcgagtgtggaaggaaggtgggacaggatttctttattggggttccaactgctatgagaaggctatgatcccaagtgctgagatctgtttccgacgcggccttcctcctggcgacggtgtcctgttttaccctggtgaagtgttttcttcgtcacatgaaccagttgcttccacccggctagagcgcattctcagtggcatgcaggacatcgaatacctgaagctttattcttcacggtatgggagggaggaaggcctggcccttatagagaagactggcatgtaccttggaccggatcgatatacgctggatcatggaccggtagatgtgatgaggggtgaggtgtaccgcacctgcaggtcttagtgtagcaatgcctgccagatgctgtccttccagtctagggcgtctgttgtattatatatggtggtatgtgatctatgtagcgaattaatctacccttggtgatcgatcagatcatcaaacctggactaaactagtcctggtgcatcttttgaatctggctcgagagttgcatcaagtcgggagaaaaaaaacccaagagatctggccaagagatggagcgacccaggtccggctctggtacaaggcccagttagctaccggaagtgggccctatctgctgcaacaggattgagacgagattggcattgtcctctcgattccatgacgctgtgcccgcatacagctgaagctgaaatattctcctattagctgttaccttccatttcctttctgcgatttgcaccgcaggttacaccctccaaaggcgcattcgtttctaccgtgtgccgtgacgaggattcccgtctcagcaacggacgctgccgccgcgatgccctgtctctttcgaggtcggtagcgccatggcctaacgcggagctgtgtttggttggaagggaataatgcatgcgatgcatggtgaggaaggatgagtctatcccgagctctgtttggtccagagacatgaaaattaggtccagactgttaagtaaccctagttagggttatgtgggcaaa

SEQ ID NO: 22664 - DNA, 2742 bp, Zea Mays
gtccttctccgcaacccctggccctgtcaagcagacgcagggtgacaccaggcagcagcccacctccacgcgaacacgccgcaccacaccatcaccggcaccgcagcacggcagccagtcaccaggactccaggagtgatctttgatccccaccaggccgccacgctactgtcggaggaaagacacaaaatgtttcagtaccgcctgttgaaggtgtagctggaggaggaactagctatggatgggtggatggaggtttgcggggtacaaatattggtgctggtgtgattgatcctacaaaagtacactcagatgatcttttgcacgtctggtctatgcccagcacagcaaatgttagccagcaagaagcgcctcggcctctagagaaagtcaaccttttggcagcaagaaatgaaagggaaagttttcaaattgctttacgcccaaaggtttcatgggcaacttcaggtattgcagggtctgtgcagatacaatgcaccgatctctgctcctcctcaggagacaggtgtaccagatgcacttgttcctattgatccactcagtcctcaaataagtattcaaccaggggagacagctgcagtttgggtatcagtaaatgttccatgtgggcaaccgcctggtttatatgagggtgaaatattcattactgcagttaagacagaattagattccagaacagaatctctaccaaaatctgaaaagtgtaggctatacagagaattaagaagttgtcttgacctcactggacccagagactactcgtcaccagaggaaatggtacaaagactaacatcagcttctactgtactaaggagggtgttggataatccagcactccaggactgtcaagagaataatggatttggagacatgatggatgaagatgttataaacaatatttcagttcgcttgaagttaagccttactgtttgggacttcactctcccagtgacaccttctttacctgctgtttttggtatatctgaaactgtcattgaagatcgattctgtttggagcatggcactgaaggatggtatagtgcactggatcatcactttaggtggctcctccaatataggattagtccatttttctgcagatggggtgatagcatgcgcattctagcatacacatgcccttggcctgccgatcatccgaaggctaatgaatattactctgacccaagattagcagcatatgctgtaccctatgcacctatcctatcgtgtacggatgctgcaaaaaattccctgaggagagaggttgaaatcttaaaatcgaagcctcattggtccaaagcttacttctatttgtgggatgagccattaaatgtggaacagtatgacatgatatgcaacatctctaatgagctacggtcatatgcacctgatgtgcgaattttgacaacttactattgtggtccaagtggctctgaactggctccctctacatttgaagcttttgcaaaagttccaaatgttctgcgtccgcacacgcaaatcttttgcacaagtgaatgggttcttggcacaagagaagacctagtgaaggatattgttgctgaattacggcctgatcttggtgaggagtggtggacatatgtttgtatgggtccttctgatcctcaaccaaactggcaccttgggatgcgtggaacccagcaccgggcagtgatgtggcgagtgtggaaggaaggtgggacaggatttctttattggggttccaactgctatgagaaggctatgatcccaagtgctgagatctgtttccgacgcggccttcctcctggcgacggtgtcctgttttaccctggtgaagtgttttcttcgtcacatgaaccagttgcttccacccggctagagcgcattctcagtggcatgcaggacatcgaatacctgaagctttattcttcacggtatgggagggaggaaggcctggcccttatagagaagactggcatgtaccttggaccggatcgatatacgctggatcatggaccggtagatgtgatgaggggtgaggtgtaccgcacctgcaggtcttagtgtagcaatgcctgccagatgctgtccttccagtctagggcgtctgttgtattatatatggtggtatgtgatctatgtagcgaattaatctacccttggtgatcgatcagatcatcaaacctggactaaactagtcctggtgcatcttttgaatctggctcgagagttgcatcaagtcgggagaaaaaaaacccaagagatctggccaagagatggagcgacccaggtccggctctggtacaaggcccagttagctaccggaagtgggccctatctgctgcaacaggattgagacgagattggcattgtcctctcgattccatgacgctgtgcccgcatacagctgaagctgaaatattctcctattagctgttaccttccatttcctttctgcgatttgcaccgcaggttacaccctccaaaggcgcattcgtttctaccgtgtgccgtgacgaggattcccgtctcagcaacggacgctgccgccgcgatgccctgtctctttcgaggtcggtagcgccatggcctaacgcggagctgtgtttggttggaagggaataatgcatgcgatgcatggtgaggaaggatgagtctatcccgagctctgtttggtccagagacatgaaaattaggtccagactgttaagtaaccctagttagggttatgtgggcaaa

SEQ ID NO: 22665 - DNA, 3340 bp, Zea Mays
atttaggggacgttgctggagacacagaatatatagaggacagaatcttttagagtgtcctgtaaagtacagggaatattcctttaggggacgaaatttaggggacgttgctggagacagcctaataatcgccaaagcccaaaagagatagagagaggagagacgcgacgcgaggggagtggaaaaaagcagagcacagatagagagagaaggggagggaaagagagagagagagagagagaaaaaagatccccgtccaccgcccacccgctgcgccggcgcccggctgtgcacgcacggacggacagacggacctccccccaagcggtgccggattcagtgcggtgggacaggggctgggacggagtgggcgacagatcgagcgctagcgatgccgcacccgacggacccggaggcggggtccgagcagaaggcggaggcgccggcggtgcctttggcggctgcggcgccggctccggtcaagaagaagcggaacctccccgggacgccagatccggacgccgaggtgatcgcgctctcgccggggacgctgctggccacgaaccgcttcgtgtgcgaggtgtgcggcaagggcttccagcgggaccagaacctgcagctgcaccgccgtggccacaacctgccctggcgcctgcggcagcgcggcccgggcgcgccgccgccgcgccgccgggtgtacgtgtgccccgagcccgcctgcgtgcaccactcccccgcgcgggcgctcggggacctcaccgggatcaagaagcacttctgccgcaagcacggggagaagcgctgggcgtgcccgcgctgcgccaagcgatacgccgtccaggccgacctcaaggcgcacgccaagacctgcggcacccgcgagtaccgctgcgactgcggcacgctcttcaccagacgggacagcttcgtgacgcatcgcgccttctgcggcgccctcggggaggagaccggcagggtgctggcgccaccagcgccgccatcgcctcggccgcctgatttggaggctgacgaaaatgttgctgatttggaggctgacgaaaatgttgacaaggacaacgacaaggagggggaggaggagaatgaggattctgccgtggccgaggtggaggagcctcggcgtgtggaggtggtgccagaggagccacagcgcattccatctccacctccattgccgaaggagccaccgtgccgtccgtccccacctccattgccgcaggagcaactgtccccacctccgtcgccaaaggagccaccgtgctgccatccgtctccacctccactgccaaaggagccacagcggcttccatttccaccggagcagcatgcagttgtggtggcattggtgccaaatgtggatggtgtgctcctcttgcattctgttcgtgtgcttgtcttattgcccatgcataagatgtgatgagacttaaagcaagttcttgctcttcaagtcaaccttcccatgcaacaagaaagcaatagccagaggtggttgctgtgccaagtgtgactgccgaattagaggatgaaaccgatcaagacgaagatgcctgtttccaggaagctgatcagtacaaggactcggagcttgaggtctccaatctgctggacaaggacaccccgatgcttccttgcttcctcgcgtcgccctcggaagccattggcaccgatggaagcggcacaacaacctgcggcgcaggtggcagcgtctccaattccatcgcgccgtctacaaccaccaacaccttcgccggcctcttcgcgtcggccacaacaagcaccacttcccacagcacatctctgcgcgatctcatcggcgtcgatcccaccttcctctgcctcgcgatcggagcgccgtctctgttcccgcagacgagcgcgagcaactcaggcaccttcgccctgctgccgccggcgccgcacatgtccgcgacagcgctcctgcagaaggcgacggaggctggagcgacgcagtcgagctcatcgttcttgaaggagtttgggctggcctcttcctcctcgtcgtcgtcgtcgcaaccttcatcgaagcaggtgccccaaggaagggtcggcgccgccgataccagcgcggaaccaccatggccgtaccggagtaaccagcaagtggatatggagcgtcgccagagtcatcaacggagggagatggagtcatgttcgcaacaatggcacccctctagtacccagcaaacggagatggagcgccgccaccggaatcatcatcaagagagggaaatggagtccagttcgcaacaatggcaccgccaccaccggaacgaccggcagatggggtcggagagctaccggagtaatcagcaaatgcagatggagtccagctcgcaccaatggctgcaacacagaagctctgagcaaatggtggggcggcggcaccacctggagagggtggaatccagggggatgctgctgtctggtggtggccttggtctgggcctcgcatacgaaagtggaaaatcaggcttgcctgatctgatgacgggaccatcgccatcgccatcgccactgttgggtcccaagccagccacgctggacttccttgggctcggcatcggcgggaccatggtcggctccacgggcctcccggcattggtggctggaggagagctggacatggggtcgtcggcgcaggtgcctgccccatgggacgacgcccagaggaaggccaacggccgcacgatcctgtgaggttttctccttttttttgggtgacctgaccttcttagaggagttcggtttgcccattctttttcagtcgcagctttgcttttggtggggctagaagctctgtgaggtgtagcagtgcagtgcaggcctgtacatagctcgacctcgacgctcctcccgatcctgcatctgtgttgtgtctgaaaaaacaccgagttgaggctgctattatagccacaattcgatcccggcaggatggatggaaatggaacctgactttgatttgatgccccgacgctttgggataatcggatgtgacggggcaacagggttattataaatcttgcggtgataattcattaattcgatactgctgttggaaagatccgagattagaacagcgatgctgacacttgaaatgtgccttttttttactgttatacctgctgctgctgctaagtcggcagtcggcacggttacttatacctaacctgccggtctgcaatcttcttccggagccttgctactttggagaagttttcgtgtacttttctgtctaaaataaacctgtttgtcggactacagttgaaaaaagaaaagaaaagaaaagagaggctatgac

SEQ ID NO: 22666 - DNA, 3291 bp, Zea Mays
atttaggggacgttgctggagacacagaatatatagaggacagaatcttttagagtgtcctgtaaagtacagggaatattcctttaggggacgaaatttaggggacgttgctggagacagcctaataatcgccaaagcccaaaagagatagagagaggagagacgcgacgcgaggggagtggaaaaaagcagagcacagatagagagagaaggggagggaaagagagagagagagagagagaaaaaagatccccgtccaccgcccacccgctgcgccggcgcccggctgtgcacgcacggacggacagacggacctccccccaagcggtgccggattcagtgcggtgggacaggggctgggacggagtgggcgacagatcgagcgctagcgatgccgcacccgacggacccggaggcggggtccgagcagaaggcggaggcgccggcggtgcctttggcggctgcggcgccggctccggtcaagaagaagcggaacctccccgggacgccagatccggacgccgaggtgatcgcgctctcgccggggacgctgctggccacgaaccgcttcgtgtgcgaggtgtgcggcaagggcttccagcgggaccagaacctgcagctgcaccgccgtggccacaacctgccctggcgcctgcggcagcgcggcccgggcgcgccgccgccgcgccgccgggtgtacgtgtgccccgagcccgcctgcgtgcaccactcccccgcgcgggcgctcggggacctcaccgggatcaagaagcacttctgccgcaagcacggggagaagcgctgggcgtgcccgcgctgcgccaagcgatacgccgtccaggccgacctcaaggcgcacgccaagacctgcggcacccgcgagtaccgctgcgactgcggcacgctcttcaccagacgggacagcttcgtgacgcatcgcgccttctgcggcgccctcggggaggagaccggcagggtgctggcgccaccagcgccgccatcgcctcggccgcctgatttggaggctgacgaaaatgttgctgatttggaggctgacgaaaatgttgacaaggacaacgacaaggagggggaggaggagaatgaggattctgccgtggccgaggtggaggagcctcggcgtgtggaggtggtgccagaggagccacagcgcattccatctccacctccattgccgaaggagccaccgtgccgtccgtccccacctccattgccgcaggagcaactgtccccacctccgtcgccaaaggagccaccgtgctgccatccgtctccacctccactgccaaaggagccacagcggcttccatttccaccggagcagcatgcagttgtggtggcattggtgccaaatgtggatggtgtgctcctcttgcattctgttcgtgtgcttgtcttattgcccatgcataagatgtgatgagacttaaaagccagaggtggttgctgtgccaagtgtgactgccgaattagaggatgaaaccgatcaagacgaagatgcctgtttccaggaagctgatcagtacaaggactcggagcttgaggtctccaatctgctggacaaggacaccccgatgcttccttgcttcctcgcgtcgccctcggaagccattggcaccgatggaagcggcacaacaacctgcggcgcaggtggcagcgtctccaattccatcgcgccgtctacaaccaccaacaccttcgccggcctcttcgcgtcggccacaacaagcaccacttcccacagcacatctctgcgcgatctcatcggcgtcgatcccaccttcctctgcctcgcgatcggagcgccgtctctgttcccgcagacgagcgcgagcaactcaggcaccttcgccctgctgccgccggcgccgcacatgtccgcgacagcgctcctgcagaaggcgacggaggctggagcgacgcagtcgagctcatcgttcttgaaggagtttgggctggcctcttcctcctcgtcgtcgtcgtcgcaaccttcatcgaagcaggtgccccaaggaagggtcggcgccgccgataccagcgcggaaccaccatggccgtaccggagtaaccagcaagtggatatggagcgtcgccagagtcatcaacggagggagatggagtcatgttcgcaacaatggcacccctctagtacccagcaaacggagatggagcgccgccaccggaatcatcatcaagagagggaaatggagtccagttcgcaacaatggcaccgccaccaccggaacgaccggcagatggggtcggagagctaccggagtaatcagcaaatgcagatggagtccagctcgcaccaatggctgcaacacagaagctctgagcaaatggtggggcggcggcaccacctggagagggtggaatccagggggatgctgctgtctggtggtggccttggtctgggcctcgcatacgaaagtggaaaatcaggcttgcctgatctgatgacgggaccatcgccatcgccatcgccactgttgggtcccaagccagccacgctggacttccttgggctcggcatcggcgggaccatggtcggctccacgggcctcccggcattggtggctggaggagagctggacatggggtcgtcggcgcaggtgcctgccccatgggacgacgcccagaggaaggccaacggccgcacgatcctgtgaggttttctccttttttttgggtgacctgaccttcttagaggagttcggtttgcccattctttttcagtcgcagctttgcttttggtggggctagaagctctgtgaggtgtagcagtgcagtgcaggcctgtacatagctcgacctcgacgctcctcccgatcctgcatctgtgttgtgtctgaaaaaacaccgagttgaggctgctattatagccacaattcgatcccggcaggatggatggaaatggaacctgactttgatttgatgccccgacgctttgggataatcggatgtgacggggcaacagggttattataaatcttgcggtgataattcattaattcgatactgctgttggaaagatccgagattagaacagcgatgctgacacttgaaatgtgccttttttttactgttatacctgctgctgctgctaagtcggcagtcggcacggttacttatacctaacctgccggtctgcaatcttcttccggagccttgctactttggagaagttttcgtgtacttttctgtctaaaataaacctgtttgtcggactacagttgaaaaaagaaaagaaaagaaaagagaggctatgac

SEQ ID NO: 22667 - DNA, 734 bp, Zea Mays
atggagcaatacgacggactctttccttccgcctacgcggactcctcctcatccctcctgatgcccaacggcagcaaggcgcagggggagaggccgagagcgcggcgcaggaggcgtcgagcagcgtggtgcggcggcggcgagctggacgggggaggggaccccaagaagcggcggctgagcgacgagcaggcagagatgctggagctgagcttccgggaggagcggaagctggagacgggccggaaggtgcacctggccgccgagctcgggctcgaccccaagcaggtcgccgtctggttccagaaccgccgcgcccgccacaagagcaagctgctcgaggaggagttcgccaagctcaagcaggcacacgacgccaccatcctccacaaatgccaccttgagaacgagttgatgagggtgaaggacagactggtgctcgccgaggaggagctggcgcgcttccgatccgtggggagccacgccatctccggcgatggcggagacgccatgatgggtcgtgccgtctgcagcgggagcccgagctcatcgttctcgacaggcacctgccagcagccgggggacgacgacctgctctactttcctgactatgcctacgctgacaacagcgtggtcgacgagtggtttcgcatgtatggactgatgtaagccaagtgatcagtgatgatggatggtatgccattgatgttctatttgtgctgaactgcttatta

SEQ ID NO: 22668 - DNA, 2376 bp, Zea Mays
gtcgcggataattaataaataaaaccccaaaaagaaatatccaaggccgcgccgtgcgcgcaatccccctcgctcgcaccatggcgctgcagctccagctgccgcggccgctcgccgccgcacggccctctatcctcctcccttccccagcccatggtgcctccgcttccgcgaccccccttcacgcccgcgcaggcggcgttgcgttttcgctccagaccaacgtgcgcctcctcaagcccaaccgccgcgtccgccgctctcgggacccctactacgatctcgacgaggacgacgaggaggaggcggagttcgacgaggacgatgaagacgacgaggagggctacgagagcgatgatgacttgtcgggtttggaatatcctggtgtactttattcaaacagccctcgtgcttcaagcaagaaaccaggtatcttaagtgttatgctaaatctatttagaaacagtggtcacttcgtgcttaaactctaatactccaggactccaaactccagtggtaaaagaaaactgggaaggaagacaaaccaaaacccatgacaaatacggtagtccaggaagaagtaagtccatgcatcctaggagtaaagtgggacgatcatcaacagatcttaagaacatggacagagaagttgagttgaaaaatgcaagtatctctcgaagtctgttccagaaactacaagaagaatatgacttcgatgacaaatggttaccactgattgattacttgtgcacctttggactaaaagagtctcattttacttacatctatgagagacacatggcctgctttcaaatcagtcaggcttcagcagaagaaaggttggatttcctgctaaatgctggggttaaaagcaaagatatgaaaaggatactggtgaggcagccacagattctggaatacacccttggcaatctgaaatctcatgttgattttctcgtgagcattggagttccaaatagacgaatagggcaaattatttctgctgctccttcgatgttctcttacagtgtggagcagtctctgaagccaacagtaaggtatctgattgaggaagtaggtattgaggagagtgatgtggggaaagtagtgcagctaagcccacagattctggtgcagaaaattgatagtgcatggaaatctcgatcgcttttcctgtcaaaagaactggatgctcccaaacatagcattgttaagatggtcacaaaacaccctcagctgcttcactacagcattgaagatggaatcttacctcgactaaatttcctgagaagcattggtatgagaaactctgacattctcaaagtattgacaagtcttactcaggtgttatctttgtcattggaggacaatctcaagccaaagtatctttacttggtcaatgacctcaagaatgaggtccaatccttaacgaaatatcctatgtacctgagtttgtctcttgatcaaagaatccgtccccgccatcgttttctggtttccttgaagaaagctccaaagggcccatttcctctgagctcctttgtgcccacagatgagcgtttttgccagaggtgggctgggactagcttggaggcataccatacattcagacagaggttgctgctaacaagtttcgcagagaagtctggaaggaaaacactagtctcaagacggtagatgcctaggtggtgggagtttgtttctcttgagcccacgctcctaacaggtttatactgcatcattaactatagcatatacttatcgtccatatcacctccctaatggtgaaaagtcttcaccgaattccctcaatcagctgcaaatggatgacaatctaagagaaatgcattattgccagtcgccagaatggttggatggacacttggttacctagctctaggagtacctcgccttgacggctaaaactgttgtgcagtcaagctttcggtggaatcgccatgcaaccaaactaccaagtcataaaaagtttccaaaaaaaatatagaggaagcttgattgcacaacgaattttcccagcagttttttcccgtcttgattgctagttttactattaagtacagcttctgaacaaaatgctacgctagaaacatgtagcctaactgtaagagtgccatcacaggcagccttgtgtactgctgtaattctgcaatgccttttgacattgggggtttcctttttttgtgaaggcttgctatcatgaatcatacacggcttgtacgtcctaccatttcatggtggttgggttagaactctctgtgatggactgcaagtttttttttcttgtcgttttgtggcctaatcatacgcaatagcgtagttgggatctatcgattaaaaccagtccttggccatctg

SEQ ID NO: 22669 - DNA, 2536 bp, Zea Mays
aaaaccccaaaaagaaatatccaaggccgcgccgtgcgcgcaatccccctcgctcgcaccatggcgctgcagctccagctgccgcggccgctcgccgccgcacggccctctatcctcctcccttccccagcccatggtgcctccgcttccgcgaccccccttcacgcccgcgcaggcggcgttgcgttttcgctccagaccaacgtgcgcctcctcaagcccaaccgccgcgtccgccgctctcgggacccctactacgatctcgacgaggacgacgaggaggaggcggagttcgacgaggacgatgaagacgacgaggagggctacgagagcgatgatgacttgtcgggtttggaatatcctggtgtactttattcaaacagccctcgtgcttcaagcaagaaaccaggactccaaactccagtggtaaaagaaaactgggaaggaagacaaaccaaaacccatgacaaatacggtagtccaggaagaagtaagtccatgcatcctaggagtaaagtgggacgatcatcaacagatcttaagaacatggacagagaagttgagttgaaaaatgcaagtatctctcgaagtctgttccagaaactacaagaagaatatgacttcgatgacaaatggttaccactgattgattacttgtgcacctttggactaaaagagtctcattttacttacatctatgagagacacatggcctgctttcaaatcagtcaggcttcagcagaagaaaggttggatttcctgctaaatgctggggttaaaagcaaagatatgaaaaggatactggtgaggcagccacagattctggaatacacccttggcaatctgaaatctcatgttgattttctcgtgagcattggagttccaaatagacgaatagggcaaattatttctgctgctccttcgatgttctcttacagtgtggagcagtctctgaagccaacagtaaggtatctgattgaggaagtaggtattgaggagagtgatgtggggaaagtagtgcagctaagcccacagattctggtgcagaaaattgatagtgcatggaaatctcgatcgcttttcctgtcaaaagaactggatgctcccaaacatagcattgttaagatggtcacaaaacaccctcagctgcttcactacagcattgaagatggaatcttacctcgactaaatttcctgagaagcattggtatgagaaactctgacattctcaaagtattgacaagtcttactcaggtgttatctttgtcattggaggacaatctcaagccaaagtatctttacttggtcaatgacctcaagaatgaggtccaatccttaacgaaatatcctatgtacctgagtttgtctcttgatcaaagaatccgtccccgccatcgttttctggtttccttgaagaaagctccaaagggcccatttcctctgagctcctttgtgcccacagatgagcgtttttgccagaggtgggctgggactagcttggaggcataccatacattcagacagaggttgctgctaacaagtttcgcagagaagtctggaaggaaaacactagtctcaagacggtagatgcctaggtggtgggagtttgtttctcttgagcccacgctcctaacaggtttatactgcatcattaactatagcatatacttatcgtccatatcacctccctaatggtgaaaagtcttcaccgaattccctcaatcagctgcaaatggatgacaatctaagagaaatgcattattgccagtcgccagaatggttggatggacacttggttacctagctctaggagtacctcgccttgacggctaaaactgttgtgcagtcaagctttcggtggaatcgccatgcaaccaaactaccaagtcataaaaagtttccaaaaaaaatatagaggtactttattatttattctatcaatatactagattttaagttctaattcatcatatgttaagagattaaaaaagagaaaatttatcattttttaatcctttatattggatataatttttctcttttttatttcccttgacgaggataagttagaatttaaattttgatatattggtagagcagataataaaatatctatatctatggtttttttagatttttcatgacttttggtagtttaattgcacaggaagcttgattgcacaacgaattttcccagcagttttttcccgtcttgattgctagttttactattaagtacagcttctgaacaaaatgctacgctagaaacatgtagcctaactgtaagagtgccatcacaggcagccttgtgtactgctgtaattctgcaatgccttttgacattgggggtttcctttttttgtgaaggcttgctatcatgaatcatacacggcttgtacgtcctaccatttcatggtggttgggttagaactctctgtgatggactgcaagtttttttttcttgtcgttttgtggcctaatcatacgcaatagcgtagttgggatctatcgattaaaaccagtccttggccatctg

SEQ ID NO: 22670 - DNA, 2569 bp, Zea Mays
aaaaccccaaaaagaaatatccaaggccgcgccgtgcgcgcaatccccctcgctcgcaccatggcgctgcagctccagctgccgcggccgctcgccgccgcacggccctctatcctcctcccttccccagcccatggtgcctccgcttccgcgaccccccttcacgcccgcgcaggcggcgttgcgttttcgctccagaccaacgtgcgcctcctcaagcccaaccgccgcgtccgccgctctcgggacccctactacgatctcgacgaggacgacgaggaggaggcggagttcgacgaggacgatgaagacgacgaggagggctacgagagcgatgatgacttgtcgggtttggaatatcctggtgtactttattcaaacagccctcgtgcttcaagcaagaaaccagtggtaaaagaaaactgggaaggaagacaaaccaaaacccatgacaaatacggtagtccaggaagaagtaagtccatgcatcctaggagtaaagtgggacgatcatcaacagatcttaagaacatggacagagaagttgagttgaaaaatgcaagtatctctcgaagtctgttccagaaactacaagaagaatatgacttcgatgacaaatggttaccactgattgattacttgtgcacctttggactaaaagagtctcattttacttacatctatgagagacacatggcctgctttcaaatcagtcaggcttcagcagaagaaaggttggatttcctgctaaatgctggggttaaaagcaaagatatgaaaaggatactggtgaggcagccacagattctggaatacacccttggcaatctgaaatctcatgttgattttctcgtgagcattggagttccaaatagacgaatagggcaaattatttctgctgctccttcgatgttctcttacagtgtggagcagtctctgaagccaacagtaaggtatctgattgaggaagtaggtattgaggagagtgatgtggggaaagtagtgcagctaagcccacagattctggtgcagaaaattgatagtgcatggaaatctcgatcgcttttcctgtcaaaagaactggatgctcccaaacatagcattgttaagatggtcacaaaacaccctcagctgcttcactacagcattgaagatggaatcttacctcgactaaatttcctgagaagcattggtatgagaaactctgacattctcaaagtattgacaagtcttactcaggtgttatctttgtcattggaggacaatctcaagccaaagtatctttacttggtcaatgacctcaagaatgaggtccaatccttaacgaaatatcctatgtacctgagtttgtctcttgatcaaagaatccgtccccgccatcgttttctggtttccttgaagaaagctccaaagggcccatttcctctgagctcctttgtgcccacagatgagcgtttttgccagaggtgggctgggactagcttggaggcataccatacattcagacagaggttgctgctaacaagtttcgcagagaagtctggaaggaaaacactagtctcaagacggtagatgcctaggtggtgggagtttgtttctcttgagcccacgctcctaacattctcaggaaatgggcttggttgctgacttggtacttgatgttcacagggtttatactgcatcattaactatagcatatacttatcgtccatatcacctccctaatggtgaaaagtcttcaccgaattccctcaatcagctgcaaatggatgacaatctaagagaaatgcattattgccagtcgccagaatggttggatggacacttggttacctagctctaggagtacctcgccttgacggctaaaactgttgtgcagtcaagctttcggtggaatcgccatgcaaccaaactaccaagtcataaaaagtttccaaaaaaaatatagaggtactttattatttattctatcaatatactagattttaagttctaattcatcatatgttaagagattaaaaaagagaaaatttatcattttttaatcctttatattggatataatttttctcttttttatttcccttgacgaggataagttagaatttaaattttgatatattggtagagcagataataaaatatctatatctatggtttttttagatttttcatgacttttggtagtttaattgcacaggaagcttgattgcacaacgaattttcccagcagttttttcccgtcttgattgctagttttactattaagtacagcttctgaacaaaatgctacgctagaaacatgtagcctaactgtaagagtgccatcacaggcagccttgtgtactgctgtaattctgcaatgccttttgacattgggggtttcctttttttgtgaaggcttgctatcatgaatcatacacggcttgtacgtcctaccatttcatggtggttgggttagaactctctgtgatggactgcaagtttttttttcttgtcgttttgtggcctaatcatacgcaatagcgtagttgggatctatcgattaaaaccagtccttggccatctg

SEQ ID NO: 22671 - DNA, 2562 bp, Zea Mays
aaaaccccaaaaagaaatatccaaggccgcgccgtgcgcgcaatccccctcgctcgcaccatggcgctgcagctccagctgccgcggccgctcgccgccgcacggccctctatcctcctcccttccccagcccatggtgcctccgcttccgcgaccccccttcacgcccgcgcaggcggcgttgcgttttcgctccagaccaacgtgcgcctcctcaagcccaaccgccgcgtccgccgctctcgggacccctactacgatctcgacgaggacgacgaggaggaggcggagttcgacgaggacgatgaagacgacgaggagggctacgagagcgatgatgacttgtcgggtttggaatatcctggtgtactttattcaaacagccctcgtgcttcaagcaagaaaccagtggtaaaagaaaactgggaaggaagacaaaccaaaacccatgacaaatacggtagtccaggaagaagtaagtccatgcatcctaggagtaaagtgggacgatcatcaacagatcttaagaacatggacagagaagttgagttgaaaaatgcaagtatctctcgaagtctgttccagaaactacaagaagaatatgacttcgatgacaaatggttaccactgattgattacttgtgcacctttggactaaaagagtctcattttacttacatctatgagagacacatggcctgctttcaaatcagtcaggcttcagcagaagaaaggttggatttcctgctaaatgctggggttaaaagcaaagatatgaaaaggatactggtgaggcagccacagattctggaatacacccttggcaatctgaaatctcatgttgattttctcgtgagcattggagttccaaatagacgaatagggcaaattatttctgctgctccttcgatgttctcttacagtgtggagcagtctctgaagccaacagtaaggtatctgattgaggaagtaggtattgaggagagtgatgtggggaaagtagtgcagctaagcccacagattctggtgcagaaaattgatagtgcatggaaatctcgatcgcttttcctgtcaaaagaactggatgctcccaaacatagcattgttaagatggtcacaaaacaccctcagctgcttcactacagcattgaagatggaatcttacctcgactaaatttcctgagaagcattggtatgagaaactctgacattctcaaagtattgacaagtcttactcaggtgttatctttgtcattggaggacaatctcaagccaaagtatctttacttggtcaatgacctcaagaatgaggtccaatccttaacgaaatatcctatgtacctgagtttgtctcttgatcaaagaatccgtccccgccatcgttttctggtttccttgaagaaagctccaaagggcccatttcctctgagctcctttgtgcccacagatgagcgtttttgccagaggtgggctgggactagcttggaggcataccatacattcagacagaggttgctgctaacaagtttcgcagagaagtctggaaggaaaacactagtctcaagacggtagatgcctaggtggtgggagtttgtttctcttgagcccacgctcctaacagaaatgggcttggttgctgacttggtacttgatgttcacagggtttatactgcatcattaactatagcatatacttatcgtccatatcacctccctaatggtgaaaagtcttcaccgaattccctcaatcagctgcaaatggatgacaatctaagagaaatgcattattgccagtcgccagaatggttggatggacacttggttacctagctctaggagtacctcgccttgacggctaaaactgttgtgcagtcaagctttcggtggaatcgccatgcaaccaaactaccaagtcataaaaagtttccaaaaaaaatatagaggtactttattatttattctatcaatatactagattttaagttctaattcatcatatgttaagagattaaaaaagagaaaatttatcattttttaatcctttatattggatataatttttctcttttttatttcccttgacgaggataagttagaatttaaattttgatatattggtagagcagataataaaatatctatatctatggtttttttagatttttcatgacttttggtagtttaattgcacaggaagcttgattgcacaacgaattttcccagcagttttttcccgtcttgattgctagttttactattaagtacagcttctgaacaaaatgctacgctagaaacatgtagcctaactgtaagagtgccatcacaggcagccttgtgtactgctgtaattctgcaatgccttttgacattgggggtttcctttttttgtgaaggcttgctatcatgaatcatacacggcttgtacgtcctaccatttcatggtggttgggttagaactctctgtgatggactgcaagtttttttttcttgtcgttttgtggcctaatcatacgcaatagcgtagttgggatctatcgattaaaaccagtccttggccatctg

SEQ ID NO: 22672 - DNA, 2288 bp, Zea Mays
aaaaccccaaaaagaaatatccaaggccgcgccgtgcgcgcaatccccctcgctcgcaccatggcgctgcagctccagctgccgcggccgctcgccgccgcacggccctctatcctcctcccttccccagcccatggtgcctccgcttccgcgaccccccttcacgcccgcgcaggcggcgttgcgttttcgctccagaccaacgtgcgcctcctcaagcccaaccgccgcgtccgccgctctcgggacccctactacgatctcgacgaggacgacgaggaggaggcggagttcgacgaggacgatgaagacgacgaggagggctacgagagcgatgatgacttgtcgggtttggaatatcctggtgtactttattcaaacagccctcgtgcttcaagcaagaaaccaggactccaaactccagtggtaaaagaaaactgggaaggaagacaaaccaaaacccatgacaaatacggtagtccaggaagaagtaagtccatgcatcctaggagtaaagtgggacgatcatcaacagatcttaagaacatggacagagaagttgagttgaaaaatgcaagtatctctcgaagtctgttccagaaactacaagaagaatatgacttcgatgacaaatggttaccactgattgattacttgtgcacctttggactaaaagagtctcattttacttacatctatgagagacacatggcctgctttcaaatcagtcaggcttcagcagaagaaaggttggatttcctgctaaatgctggggttaaaagcaaagatatgaaaaggatactggtgaggcagccacagattctggaatacacccttggcaatctgaaatctcatgttgattttctcgtgagcattggagttccaaatagacgaatagggcaaattatttctgctgctccttcgatgttctcttacagtgtggagcagtctctgaagccaacagtaaggtatctgattgaggaagtaggtattgaggagagtgatgtggggaaagtagtgcagctaagcccacagattctggtgcagaaaattgatagtgcatggaaatctcgatcgcttttcctgtcaaaagaactggatgctcccaaacatagcattgttaagatggtcacaaaacaccctcagctgcttcactacagcattgaagatggaatcttacctcgactaaatttcctgagaagcattggtatgagaaactctgacattctcaaagtattgacaagtcttactcaggtgttatctttgtcattggaggacaatctcaagccaaagtatctttacttggtcaatgacctcaagaatgaggtccaatccttaacgaaatatcctatgtacctgagtttgtctcttgatcaaagaatccgtccccgccatcgttttctggtttccttgaagaaagctccaaagggcccatttcctctgagctcctttgtgcccacagatgagcgtttttgccagaggtgggctgggactagcttggaggcataccatacattcagacagaggttgctgctaacaagtttcgcagagaagtctggaaggaaaacactagtctcaagacggtagatgcctaggtggtgggagtttgtttctcttgagcccacgctcctaacaggtttatactgcatcattaactatagcatatacttatcgtccatatcacctccctaatggtgaaaagtcttcaccgaattccctcaatcagctgcaaatggatgacaatctaagagaaatgcattattgccagtcgccagaatggttggatggacacttggttacctagctctaggagtacctcgccttgacggctaaaactgttgtgcagtcaagctttcggtggaatcgccatgcaaccaaactaccaagtcataaaaagtttccaaaaaaaatatagaggtgaagcttgattgcacaacgaattttcccagcagttttttcccgtcttgattgctagttttactattaagtacagcttctgaacaaaatgctacgctagaaacatgtagcctaactgtaagagtgccatcacaggcagccttgtgtactgctgtaattctgcaatgccttttgacattgggggtttcctttttttgtgaaggcttgctatcatgaatcatacacggcttgtacgtcctaccatttcatggtggttgggttagaactctctgtgatggactgcaagtttttttttcttgtcgttttgtggcctaatcatacgcaatagcgtagttgggatctatcgattaaaaccagtccttggccatctg

SEQ ID NO: 22673 - DNA, 2000 bp, Zea Mays
aaaaccccaaaaagaaatatccaaggccgcgccgtgcgcgcaatccccctcgctcgcaccatggcgctgcagctccagctgccgcggccgctcgccgccgcacggccctctatcctcctcccttccccagcccatggtgcctccgcttccgcgaccccccttcacgcccgcgcaggcggcgttgcgttttcgctccagaccaacgtgcgcctcctcaagcccaaccgccgcgtccgccgctctcgggacccctactacgatctcgacgaggacgacgaggaggaggcggagttcgacgaggacgatgaagacgacgaggagggctacgagagcgatgatgacttgtcgggtttggaatatcctggtgtactttattcaaacagccctcgtgcttcaagcaagaaaccaggactccaaactccagtggtaaaagaaaactgggaaggaagacaaaccaaaacccatgacaaatacggtagtccaggaagaagtaagtccatgcatcctaggagtaaagtgggacgatcatcaacagatcttaagaacatggacagagaagttgagttgaaaaatgcaagtatctctcgaagtctgttccagaaactacaagaagaatatgacttcgatgacaaatggttaccactgattgattacttgtgcacctttggactaaaagagtctcattttacttacatctatgagagacacatggcctgctttcaaatcagtcaggcttcagcagaagaaaggttggatttcctgctaaatgctggggttaaaagcaaagatatgaaaaggatactggtgaggcagccacagattctggaatacacccttggcaatctgaaatctcatgttgattttctcgtgagcattggagttccaaatagacgaatagggcaaattatttctgctgctccttcgatgttctcttacagtgtggagcagtctctgaagccaacagtaaggtatctgattgaggaagtaggtattgaggagagtgatgtggggaaagtagtgcagctaagcccacagattctggtgcagaaaattgatagtgcatggaaatctcgatcgcttttcctgtcaaaagaactggatgctcccaaacatagcattgttaagatggtcacaaaacaccctcagctgcttcactacagcattgaagatggaatcttacctcgactaaatttcctgagaagcattggtatgagaaactctgacattctcaaagtattgacaagtcttactcaggtgttatctttgtcattggaggacaatctcaagccaaagtatctttacttggtcaatgacctcaagaatgaggtccaatccttaacgaaatatcctatgtacctgagtttgtctcttgatcaaagaatccgtccccgccatcgttttctggtttccttgaagaaagctccaaagggcccatttcctctgagctcctttgtgcccacagatgagcgtttttgccagaggtgggctgggactagcttggaggcataccatacattcagacagaggttgctgctaacaagtttcgcagagaagtctggaaggaaaacactagtctcaagacggtagatgcctaggtggtgggagtttgtttctcttgagcccacgctcctaacaggtttatactgcatcattaactatagcatatacttatcgtccatatcacctccctaatggtgaaaagtcttcaccgaattccctcaatcagctgcaaatggatgacaatctaagagaaatgcattattgccagtcgccagaatggttggatggacacttggttacctagctctaggagtacctcgccttgacggctaaaactgttgtgcagtcaagctttcggtggaatcgccatgcaaccaaactaccaagtcataaaaagtttccaaaaaaaatatagagggaggttccagttactgaagttatatgaccagtagggaggtcgagcctcgtctactgccttcgtgcctggttgtagagacaaa

SEQ ID NO: 22674 - DNA, 3839 bp, Zea Mays
aaaaccccaaaaagaaatatccaaggccgcgccgtgcgcgcaatccccctcgctcgcaccatggcgctgcagctccagctgccgcggccgctcgccgccgcacggccctctatcctcctcccttccccagcccatggtgcctccgcttccgcgaccccccttcacgcccgcgcaggcggcgttgcgttttcgctccagaccaacgtgcgcctcctcaagcccaaccgccgcgtccgccgctctcgggacccctactacgatctcgacgaggacgacgaggaggaggcggagttcgacgaggacgatgaagacgacgaggagggctacgagagcgatgatgacttgtcgggtttggaatatcctggtgtactttattcaaacagccctcgtgcttcaagcaagaaaccaggtatcttaagtgttatgctaaatctatttagaaacagtggtcacttcgtgcttaaactctaatactccaggactccaaactccagtggtaaaagaaaactgggaaggaagacaaaccaaaacccatgacaaatacggtagtccaggaagaagtaagtccatgcatcctaggagtaaagtgggacgatcatcaacagatcttaagaacatggacagagaagttgagttgaaaaatgcaagtatctctcgaagtctgttccagaaactacaagaagaatatgacttcgatgacaaatggttaccactgattgattacttgtgcacctttggactaaaagagtctcattttacttacatctatgagagacacatggcctgctttcaaatcagtcaggcttcagcagaagaaaggttggatttcctgctaaatgctggggttaaaagcaaagatatgaaaaggatactggtgaggcagccacagattctggaatacacccttggcaatctgaaatctcatgttgattttctcgtgagcattggagttccaaatagacgaatagggcaaattatttctgctgctccttcgatgttctcttacagtgtggagcagtctctgaagccaacagtaaggtatctgattgaggaagtaggtattgaggagagtgatgtggggaaagtagtgcagctaagcccacagattctggtgcagaaaattgatagtgcatggaaatctcgatcgcttttcctgtcaaaagaactggatgctcccaaacatagcattgttaagatggtcacaaaacaccctcagctgcttcactacagcattgaagatggaatcttacctcgactaaatttcctgagaagcattggtatgagaaactctgacattctcaaagtattgacaagtcttactcaggtgttatctttgtcattggaggacaatctcaagccaaagtatctttacttggtcaatgacctcaagaatgaggtccaatccttaacgaaatatcctatgtacctgagtttgtctcttgatcaaagaatccgtccccgccatcgttttctggtttccttgaagaaagctccaaagggcccatttcctctgagctcctttgtgcccacagatgagcgtttttgccagaggtgggctgggactagcttggaggcataccatacattcagacagaggttgctgctaacaagtttcgcagagaagtctggaaggaaaacactagtctcaagacggtagatgcctaggtggtgggagtttgtttctcttgagcccacgctcctaacagttctgtttggtcttcataaagtagagcactagctagaagacatattcacacgcatcagctatcaaattgcaagcttagaattgacctcaaagttgggacatgcttgtcttaccacaagcaactgatagcttggagttgtagtccggactgtctgcgctggaccagtatggctgacactccaacgtcccgcatggtgcacccctttggcgacgccccaaggcagactcccaagcaattcctgtattctggtaacccgcagcacctctgccatccgtaccagtcagctccggacacccatgtcgtgctccagcgccgttacaccgtgaggtctcagtctcactcaccaaataatgctggttctgaagaccatgagactcacaagcagtacacgctggagtcctcagcggcttctggttgttcaaggcatggttctccctccagccaaagcgtccatgccgggagtggcagccctgtgtctcacgacgacagccactccggctccacgaatggccatggatcacctgtgagcgcgtcgtgtgtcaccggcgaggaccctactgatctcaagcagaaactgaaggatcttgaggctgtaatgctggggacgtctgagactgaccccgagatagtcaacagtctcgagatctccgcggcaaaccaactctcgttggagcccgaggagtgggagcacatggtgagcatgcccagagggaacctgaaggagctgctgattgcctgcgctagggcagtggaacgtaacaacagctacgccattgatctgatgatcacagagctgaggaagatggtttcggtgtccggcgagccgcttgagaggctgggagcctacatggtggaaggtcttgttgccaggctcgcggcctccggcagctcaatctacaaggctttgaagtgtaaggagcccaggagctctgatctcctctcctacatgcacttcctgtatgaggcctgcccctacttcaagttcggctacatgtcagccaacggcgcgatcgcggaggccatcaagggagaggacaggatccatatcatcgacttccacatcgcgcaaggggctcagtgggtctctctcctccaagcccttgcagccaggcctggcgggccaccgttcgtgagggtcaccggcattgatgattcagtctcagcttacgctcgaggcggcggtctggagttggttggcaggaggttgacacatattgctggcctctacaaggtgccctttcagttcgacgcagtcgctatctcaggcagtgaggtggaggaggagcatctgggcgtcgtcccaggcgaagccgtcgccgtcaacttcacccttgagctgcaccacatccccgacgagaccgtgagcacggcgaaccaccgggaccggatcctgaggctggtgaagggcctgtcgcccaaggtgctcacgctggtggagcaggagtccaacaccaacacggcccccttcgcgcagcggttcgcagagacgctggactactacacggccatcttcgagtccatcgacctggcgctgccgagggacgacagggagcggatcaacatcgagcagcactgcctggcccgggagatcgtgaacctggtggcctgcgagggcgaggagcgggtggagcggcacgaggtgttcggcaagtggaaggcgcggctgatgatggccgggttcagcccgtccccgctcagcgcgctggtgaacgccaccatcaagacgctgctgcagagctactcgccggactacaagctcgccgagagggacggcgtgctctacctcggctggaagaacaggcccctgatcgtctcatcggcatggcactagtgttgacttcagagaatgttgacctgatggagaatgtttcttgtaaccttcgaagtacctcttagtggtttagatatgtttggctggtcactggaactatctataggaagcctatggtgatagatactgagttgtagtagaacacatatagcctaaatgcctaatgctgtgatggcagtcactaccagcctagcctagaacaggttgatgatgtgtagtagtaagtttgggtatatgtttcagttaatcagttttgcttgggtgcattctgaagggtggcctcttcaaaaaggacatcaaac

SEQ ID NO: 22675 - DNA, 3416 bp, Zea Mays
atgcggaaccctagccgacggccggcgccgccacttcctacatccacagggtcgccgatgggagggagcgggtcgccgtcggagagcatgtcgccggaggggcccttccagttgtggtcgtcactggtggggctgccgatgttgccggaggggggggcttccagcctcggtcgtcgccgggtagaggaagggctgctgggccggagggacgccttattgctcggcatcgtcttctccgccatgacgccggcgctgctcgcccctgccggcgctttggcggatgaggccaccgccggctggctggtcggcgtcggcgaggccagcggcatcaactccgtcacggcgttctaccccgagcaggccgccgccgactccaacggcctgtactacctggaatacacgctgcagaaccccggcgagcggcggcggcacatcgtctcggccatcgggatggccttcaacggctggtacaaccgcctccactgcgatgggccagcgacttttgaatataatgggagaactttcccatatgcctttggtgatgttctgaatggcgcccgtaagggcgccacttattctagtgtgattcatagcgagcacgacagaaagtttccaagccggggcgggagcggatgggcggagacaatagcgaacgaagcaagtgcgccaaatgtagcggacgaggatgaccctctatattatagcgatgccttttaccgtgcctttctgggggcatacaggagctcaaaaaattctaaatttaccctgacgagtgttgatggaggtacctgtgacctccacgtcttccgtcttccactgatcgcagcacacaaactccctgccgggtgggcgccgcacgcctgcacctcttccgctgcgcgaggatccgcgagccgcggcgacacgggggagcccaagcgcccaacctccttcccgcttcgtttgcttgtatgcgctgcctcgtcggttccaccacctcactcactcgcttctcccccttccagccgtcccttcgcagcgcacgcacgtaaaccacaatccagcagctggtacgcccccagcgtcgccgtcgtctccttcccccgcgcaccacacccgcagccagcagccatatcatccatcacctcgcctccagcgcggcgccgacctgcctctccattatttatacgcatttccgcgttccccaccctcctctttctcaatccagccaagcaccggaatcgcagggaaccaggagcgattaaaaaagacagcctccccgcaaaggtaaaaaacaaccaccgcatcgcggcaggcaaggcatcgctcgccagcccccgagcggagggggaagcaaaagatcgataaaaaggagaggaggagacgaggcgtgccatccgaacccaagcaacttcctcccaccaccaggtccctggctccctcccatgcccgcatcgagatcttagcgggacagcgagaggagaggcgacgcggacgcgggcgctccccgatccctcctcgctgcccgtcgccgccgccgccgaccgaccgaccgaccggggccagggggaggaggagggaaggggagtacggacacgatggaagccgactctgggaagctcttcgtcggcggcatctcgtgggagacggacgaggatcgcctccgcgagtacttcggtcgcttcggcgacgtcaccgaggccgttatcatgcgggaccgcaacaccggccgcgcccgtgggttcgggttcgtcgtcttcgccgactctgggatcgccgagcgcgtcaccatggagaagcatatgatcgacggccgcatggtggaagcaaagaaggccgttcccagggacgaccaaagtattgcgagcaagaacaatagcagcatagggtcacctggaccaggacgtactagaaagatctttgttgggggtctggcttcaaatgttaccgaggtcgaattcagaaggtactttgagcaattcggtgtgataaccgatgtggtggtgatgtatgaccacaatacgcagaggcccaggggctttggtttcatcacatatgactcagaagacgcagtggataaggcactgcacaagaacttccatgagctcaatggtaaaatggttgaggtcaagagggctgtaccaaaggagcagtctcctggacctattgcacgtgcacggaatgggttctcttcgtttggtccaggttatggaatgggcatgagcgttgaaggtggaatgcgtggatattttggtgcaagttctggtttcgtcaatagctccaatgggcggcaaataggttcttactttaatggtagttcaaaccgattaggtagtccaattgggtatgttggccttaacgatgattcaggatcaatactgagttcaatgtctagaaatgtctggggtaatggaaatctgaactacataggcaaccatacaaacatgaattcttttcctcaacctggaagtggtgggggtatttctggtgatgaaattagttggggaagccttacttctgctcatgggatgagcaacatttcaagccttggatcgggaaaccttggccgtggaaccggagataacaactttggcttgccttctggaaactatgttaggagcaactcaactggtacaattggtgagccattttctgcatcagccaatgcatatgaatcgaacaatccaggtgcatatggcagcagctctatttatggtgactcaacctggaggttcaactcatctgaggttgatatgcctccttttggtcatgatcttggaaatgatgatccagatatcaaatcagaaatatcagcaagctatatgggcaactatactgttaataacaatcagacaagcagaggtatcacttcctagggagagtactattatattcatatatgacttgggataggtgaaacacccactactatatcaggctttcaggtgcatgactgtgaattggtgatgtcagattaatatacaggttagttgcttgtttctaggtaaccagaggtgtggtttacaacaccaaaatgctagaggagccgatacaaacattttagtttaatttctacatctattaggccttttgttttttgaatgagatgtgcagtgttgattgcggcacatacttagaagtgttccaacataagctggaattctgtcatacggaaggataaacttgtataccaagggaatgctgtattattatctttgcccatttatggctacattagcttgcttgtttctattctctttaaccatttcatctgtatactagacagttgcttgacttactattcaaactatattcaaactattgggggtacagagccatattgagacctagtaataaagccaccgaaagtatatacatgtactatctgtcccttttgtgccatgcgaatgcttttgcggaattctgttataaacctt

SEQ ID NO: 22676 - DNA, 2183 bp, Zea Mays
gtaattccgtggccttgtgagcgggcgttggcgtgttgccccgtgtgggcgctctctctcgtagccctgatcgcggtgttgctttcggctcggatctatgtgatgtcccgcgtgcgtttctgtggtgaacgctgtggataagtcgggcttttgtcggcatttggcagtggctggctggtatgaaactgggcctgctgttgtggattgcaggggccagggggaggaggagggaaggggagtacggacacgatggaagccgactctgggaagctcttcgtcggcggcatctcgtgggagacggacgaggatcgcctccgcgagtacttcggtcgcttcggcgacgtcaccgaggccgttatcatgcgggaccgcaacaccggccgcgcccgtgggttcgggttcgtcgtcttcgccgactctgggatcgccgagcgcgtcaccatggagaagcatatgatcgacggccgcatggtggaagcaaagaaggccgttcccagggacgaccaaagtattgcgagcaagaacaatagcagcatagggtcacctggaccaggacgtactagaaagatctttgttgggggtctggcttcaaatgttaccgaggtcgaattcagaaggtactttgagcaattcggtgtgataaccgatgtggtggtgatgtatgaccacaatacgcagaggcccaggggctttggtttcatcacatatgactcagaagacgcagtggataaggcactgcacaagaacttccatgagctcaatggtaaaatggttgaggtcaagagggctgtaccaaaggagcagtctcctggacctattgcacgttcacctgcaggggggcagaactatgctatgagcagggttcataactttctaaatggttttaaccagggttacaacccgaacccccttggtggttatggcatgcgggtggatgcaaggtatggtctccttgcaggtgcacggaatgggttctcttcgtttggtccaggttatggaatgggcatgagcgttgaaggtggaatgcgtggatattttggtgcaagttctggtttcgtcaatagctccaatgggcggcaaataggttcttactttaatggtagttcaaaccgattaggtagtccaattgggtatgttggccttaacgatgattcaggatcaatactgagttcaatgtctagaaatgtctggggtaatggaaatctgaactacataggcaaccatacaaacatgaattcttttcctcaacctggaagtggtgggggtatttctggtgatgaaattagttggggaagccttacttctgctcatgggatgagcaacatttcaagccttggatcgggaaaccttggccgtggaaccggagataacaactttggcttgccttctggaaactatgttaggagcaactcaactggtacaattggtgagccattttctgcatcagccaatgcatatgaatcgaacaatccaggtgcatatggcagcagctctatttatggtgactcaacctggaggttcaactcatctgaggttgatatgcctccttttggtcatgatcttggaaatgatgatccagatatcaaatcagaaatatcagcaagctatatgggcaactatactgttaataacaatcagacaagcagaggtatcacttcctagggagagtactattatattcatatatgacttgggataggtgaaacacccactactatatcaggctttcaggtgcatgactgtgaattggtgatgtcagattaatatacaggctgagactttgcttggctacctgcgggagcagagacaagggtttggctgcagagctggagcagtggtagcaactagcttggccaggtaaagcaagaattatggtcgaaatctgatccattctctgtggaaattttgcgagcagatgtaaataacagcttattctggttagtttggctatgtgaatacacatgtggtttgcgagtgaggatgcttggttggttactaacgtagtgtcagttaagagtaaggcttaagatttgggtggtaatgacgataatgctggtttgtagctatgtacaggatgctagggtatgcttgctttgtcttgtcaagttatgggggaacgttggattgtcaatcagtgttttttttgctcgaggtcagagtccaaattcctctcttccttttta

SEQ ID NO: 22677 - DNA, 1909 bp, Zea Mays
cgcccgcccggtgcggactgtgctgtgcacggcagactacacagcagcagcatcggcagactacacaccaccactacaccgtccaaccacctcccaacccttcccctcgctacccatccatcaccactcgacagtcgacaccgtccccgcccgccatggtctcgctcgctggctcccagatcccctcgccttcgcgggggcagagcccctgcgcggccgcgcggccgcagcgccggcagggacactccatgcgcaccatccgctccgcgctgctgcagccggactcctccccggtcccggcggatggcgcgccgacgcgggcgactcggacattgagaacctcaccgactccgtcatcgacttccgcctccgcgagctcgccgccaccgcgggcccgcgcacccggcgccgtcgccaagtcgtcctccgccatcaacgccgccgccacggagctgctcgacctgtcgcgggacttctccgactactccagcttcaactccgacatctccggggagcttgagcgccttcttccgccacggggggcgcgcggcggcgccccaggcccggggccgggcgcccgcccgcagtcgtcgatctgaacgacctcgagtccatggacctgtcggcggacgcggcgcccgctggagcgcctggagccgttcgtgcgggcgtgcgtgcgggcgctgggggcccggcgccggccccggacgcgcggcgcgcggccgcggccaggatacgcctgctggcgaagcaccgggtcggacgtccgcgagctgatcggcgtgtcgggcgccatcccgggcgctcgtgccgctgctgcggagcaccgaccccgtggcgcaggagagcgcggccaccgcgctgctcaacctctcgctcgaggaccggaaccgctccgccatcacgacggcgggcgccatcaagccgctcgtctacgcgctgcgcaccggcacggctcccgccaagcagaacgccgcgtgcgcgctgctcagcctctcgggcatcgaggacaaccgcgccaccatcggggcctgcggcgccatcccgccgctcgtggcgctgctctccgcggcctccacgcgcggcaagaaggacgcgctcaccacgctctaccgcctctgctccgcgcgcaggaacaaggagcgcgcggtcagcgccggcgccgtcgtgccgctcgtgcatctcgtcggccgccgcggcagcgggacgtgcgagaaggcaatggtggtccttgggagcctcgcgggcatcgacgagggccgtcaagccgtggtacaggctggcgggatccctgcgctggttgaggccatcgaggacggccctgccagggagaaggagctcgccgtggtggcgcttctgcaggtgtgctccgactccccgcgtaaccgtgcgcttcttgtacgcgagggcgccatcccgcctctcgttgcgctatcgcagtccggctctgcccgtgccaagcacaaggctgagactttgcttggctacctgcgggagcagagacaagggtttggctgcagagctggagcagtggtagcaactagcttggccaggtaaagcaagaattatggtcgaaatctgatccattctctgtggaaattttgcgagcagatgtaaataacagcttattctggttagtttggctatgtgaatacacatgtggtttgcgagtgaggatgcttggttggttactaacgtagtgtcagttaagagtaaggcttaagatttgggtggtaatgacgataatgctggtttgtagctatgtacaggatgctagggtatgcttgctttgtcttgtcaagttatgggggaacgttggattgtcaatcagtgttttttttgctcgagatgggatcaacttacattgctgcaataatggatgatgacgctggtgtttccttcccgtaag

SEQ ID NO: 22678 - DNA, 630 bp, Zea Mays
gaagaaggacgtgctccttcgtattaccaggatgtctttcagccgcagattagcaggccgcctgcgctccttgcccctaagcctcgtttccggtgtacgactccaacgacgacgagatggcctccccgctccgtcggagcttcccctccctcggccgcgcgcttctcacgccggcgccggcgcggatgctctccgcggaggcctccgatgccctcgttgagatcaagcctggggagattgggatggtctccggcatccccgaggagcacctccgccgtaaggtgggagaacccattgatgggatggacatctactggggatccatatgctaatgtcggtgaagcaggacttacattcaacagtgcggagtcagcaaaagcatttgctgaaaaacatggatggaattatgtggtgggtctcgttttttccttgtagatatcacacgaaaattagatgctctatttgcgactgctacttcaggcctatttggaatggttgaagcaacgcttgaatgtcactctttttaacttgtggctgtggtctgtggggtctttttactccttttatctttataaagctaaattttgaggaagcaattgtaggtattgatgcttagttgtctaacgtatg

SEQ ID NO: 22679 - DNA, 575 bp, Zea Mays
gaagaaggacgtgctccttcgtattaccaggatgtctttcagccgcagattagcaggccgcctgcgctccttgcccctaagcctcgtttccggtgtacgactccaacgacgacgagatggcctccccgctccgtcggagcttcccctccctcggccgcgcgcttctcacgccggcgccggcgcggatgctctccgcggaggcctccgatgccctcgttgagatcaagcctggggagattgggatggtctccggcatccccgaggagcacctccgccgtaaggttgtaatttattcaccagctaggactgcatctcagcaaggttcaggcaaagttgggagatggaaaattaactttttgtcaacccaaaagtgggagaacccattgatgggatggacatctactggggatccatatgctaatgtcggtgaagcaggacttacattcaacagtgcggagtcagcaaaagcatttgctgaaaaacatggatggaattatgtggtacggaaacggcatacacctcttttgaagtgcagtacaaaccctcactactacatattctgaattacaaatgcc

SEQ ID NO: 22680 - DNA, 1403 bp, Zea Mays
gcagaaacagcagagcaggggagcgcgaaaccgagacagggacagcgagacgctgacaggcaggataagcgtcgcgaaacgcgaccggcctcgtgccctacccctcgtcccgtcccttccatcacgtattcacgggcacgagctcgagccctcgtaccctccttcccttcctcgcgcgcggtcctccgatcgaactgccggacccgagcggaggagagcagggccctcccgagggccctcccgcgcggcgaccccgtggcgttcctgcgaggctgctgctcgttcgggtcggcggggcggaagcggcccaaggcctcgcccttgccctccccaccgcgcctgtccgccgctgcagcggcagcggacgacggggccaagatgaagggcctcttcaagaccaagccgcggacgcccgtcgacatcgtgcggcagacgcgtgagtgcctcgtccacctcgacctccactcgggctcccggagcggcgacgccaagcgcgacgagaagatgacggagctaagcaaaaatatcagggatatgaagtctatcctttacggcaatggtgaatcagagcctgtaactgaagcatgtgtgcaactgacccaagaattcttcagggagaacactttacggctattaatcatacatcttccaaaactaaatttggagactaggaaagatgctactcaagttgttgcaaacttgcaaagacaacaagtatcctcaaagatagttgcatctgagtacctagagtcaaataaagatctcttggacattttaattttagggtatgagaatatggacattgctttacattatggtgctatgttgagggaatgtattcgccaccaaagcattgcaaggtatgttttagagtccgaacatatgaagaagttcttcgactatatacagcttccaaattttgacatagcttctgatgcttctgctacctttaaggaactattgacaagacataaagcaaccgttgctgaatttctctccaacaattatgattggttttttgaagaattcaactctaggttgctgtcatcaaccaactatataacaaaaaggcaagctatcaagttgttgggagatatgctgctggatagatcaaatgttgcagtgatgatgcgctatgttagttccaaagacaatcttatgattctgatgaatctcttaagggattcgagtaaaaatatccaaatcgaggcatttcacgtgttcaagctgtttgctgcgaataaaaacaaaccacctgaggtcgtgaacatactggtcaccaatagaaacaagctacttcgtttttttgctggattcaagattgacaaagtttgaagcagacaaggagcatgtcataaaagattttttccctttgagtatgtctgaggttgtaattagtcatt

SEQ ID NO: 22681 - DNA, 2600 bp, Zea Mays
atattatatgttgtgcacaggaaaataaccattcattttactgcagatggcatatcacagggagataaaaaaatgtgctgcatctgtaaattttctttattactttgatgcctatgatttgactcctatcatgtatttttatccttatattttgacagttgttaagcatgcttttagattatactcccttgttgctgatggtaataataaaaaaatctgtctgtttcctttcagacggtgcacccaagtaacccaacatttttctctgcagattgacttggatacaattgaagttagcaatctgaatagacagtttttgtttcggcagagtcatgttggtcagtcaaaagctaaagttgctcgggatgctgtattgaaatttaggccaaatatcaatataaacccataccatgcaaacgtgaaggattctcatttcaatgttgatttcttcaagcaatttaatgttgttctgaatggtcttgataacttggatgctagacgccatgttaatcgcctttgccttgctgctgatgttcctttggttgaaagtggtactactggttttttgggacaggttactgttcatgtcaagggtaaaacagagtgctatgagtgtcaaccaaagcctgtccctaaatcatatcctgtctgcacaattacaaacacaccatcaaagtttgttcattgcattgtttgggcgaaagatctgctttttgcaaaattatttggtgataaaaaacaggataatgatcttaatgtgcactccaaagatgataccagttcaaaaacagatgtttttgaaaggagtgtagatgaagatcttgagcaatacacccagagaatatatgaccacgtatttggttacaacattgaagttgcattggataataaggaaacttggaagaatcggagaaagccaaaccctatttacattagagatgcattgcctgaagacgctgttcaacaaaatggtcgctctcaggatcacgtgaatgaggagcaggatccttctgctatggtatccttaggccttagaaatacacaagagatatggagtcttgctgacaattcaagagtgttcttggaggctttaaaattattttttgacaaaagagagaaggaaatagggagccttatttttgacaaggacgaccagttggctgttgagtttgttaccgctgcagcaaatatcagagcttcctcttttggaataccactgcatagtctttttgaagctaaaggtgttgctggaaatatagttcatgctgtggcaactaccaatgctataattgctggtctaatcgtcatcgaggcaattaaagtgctcaagggtgattatcaagattatagaatgacatattgccttgagcatccagcaaggaagatgctcttgatgcctgtcgagccttttgaacctagtaaatcatgttatgtctgctctgagaccccacttgttctggaggttaataccaagacaacaaagctccgggaagtcattgaaaaggttataaaaggtaagcttggaatgaacctacctttgataatggttggcgccacacttgtttttgaggatggtgaagatctggaggaggatgagattgcaaattatgctttaaaccttgaaaaggtcttggctgaacttccagctccagttctaaatggtacaatggttacagtcgaggatttgcatcaggaactaaaatgcagtatcaacatcaaacacagggatgagttcgatgaagaaaaggagcctgacagaatggttcttgttgggtggtctggcccagttgataagcaaaccactagtaatggtgagactaaatcagttccatcttcatccaatacagaagatgtggatggtactgccgaggacatatcagcaacttctggaatgaagcgtaagctgaacgaaatattagagacaaaggagaattttgatgctctcgaaaatctttcgggtgttgattccagcagcgctcaagttgttgaagatgacaatgacgatggccttcttatgtttgatgaggacccaaggcaaagtaagaagaagagattgcagtagcatcctgctgcggcgataacagctcttgactcccggcatcgtggctaacacattgttcgatcgtaacatctttgataacttatttatgcggttatgtaccaggttgatgttgaaacattagtaacaatgcccagggcaccttttggcctcagatagtcagataccctgtagggttgtaatttgtaggatttaggaacaagagcaactaatgctcagctgacagcctgctgcgagatagaatttgtatctcaagagccaaggtcctgttttggttatgttttttgttcagttgaggggtgaccgggtgaaccaagctctgtcttgttaggtgccaatcacagggtctggaaatatgtactcatcctgtattcttgctaaggttatggatcagatggtgtatatatctgtgcaaaacactaatttatagttttgcactaatctacactgtagattatattgtttaccgagtgaagtttgaagtaaacggctggaaatagcttaacgttaagcaatatgcgaaacaaggattgggtttttg

SEQ ID NO: 22682 - DNA, 2739 bp, Zea Mays
aaaaatgtgctgcatctgtaaattttctttattactttgatgcctatgatttgactcctatcatgtatttttatccttatattttgacagttgttaagcatgcttttagattatactcccttgttgctgatggtaataataaaaaaatctgtctgtttcctttcagacggtgcacccaagtaacccaacatttttctctgcagattgacttggatacaattgaagttagcaatctgaatagacagtttttgtttcggcagagtcatgttggtcagtcaaaagctaaagttgctcgggatgctgtattgaaatttaggccaaatatcaatataaacccataccatgcaaacgtgaaggattctcatttcaatgttgatttcttcaagcaatttaatgttgttctgaatggtcttgataacttggatgctagacgccatgttaatcgcctttgccttgctgctgatgttcctttggttgaaagtggtactactggttttttgggacaggttactgttcatgtcaagggtaaaacagagtgctatgagtgtcaaccaaagcctgtccctaaatcatatcctgtctgcacaattacaaacacaccatcaaagtttgttcattgcattgtttgggcgaaagatctgctttttgcaaaattatttggtgataaaaaacaggataatgatcttaatgtgcactccaaagatgataccagttcaaaaacagatgtttttgaaaggagtgtagatgaagatcttgagcaatacacccagagaatatatgaccacgtatttggttacaacattgaagttgcattggataataaggaaacttggaagaatcggagaaagccaaaccctatttacattagagatgcattgcctgaagacgctgttcaacaaaatggtcgctctcaggatcacgtgaatgaggagcaggatccttctgctatggtatccttaggccttagaaatacacaagagatatggagtcttgctgacaattcaagagtgttcttggaggctttaaaattattttttgacaaaagagagaaggaaatagggagccttatttttgacaaggacgaccagttggctgttgagtttgttaccgctgcagcaaatatcagagcttcctcttttggaataccactgcatagtctttttgaagctaaaggtgttgctggaaatatagttcatgctgtggcaactaccaatgctataattgctggtctaatcgtcatcgaggcaattaaagtgctcaagggtgattatcaagattatagaatgacatattgccttgagcatccagcaaggaagatgctcttgatgcctgtcgagccttttgaacctagtaaatcatgttatgtctgctctgagaccccacttgttctggaggttaataccaagacaacaaagctccgggaagtcattgaaaaggttataaaaggtaagcttggaatgaacctacctttgataatggttggcgccacacttgtttttgaggatggtgaagatctggaggaggatgagattgcaaattatgctttaaaccttgaaaaggtgctgtgatactaaccatatacttgccaagttattttttctgttaagatgagtcatttgtatgcactgtggcatatattctaaaattcttgtttcttaataaattgcagccctttgttgtgttcttggccagcttagttgatttgtagttaagcttcttcacccttagttgtgtttatgctctgcttagttgatccattactgcaggtcttggctgaacttccagctccagttctaaatggtacaatggttacagtcgaggatttgcatcaggaactaaaatgcagtatcaacatcaaacacagggatgagttcgatgaagaaaaggagcctgacagaatggttcttgttgggtggtctggcccagttgataagcaaaccactagtaatggtgagactaaatcagttccatcttcatccaatacagaagatgtggatggtactgccgaggacatatcagcaacttctggaatgaagcgtaagctgaacgaaatattagagacaaaggagaattttgatgctctcgaaaatctttcgggtgttgattccagcagcgctcaagttgttgaagatgacaatgacgatggccttcttatgtttgatgaggacccaaggcaaagtaagaagaagagattgcagtagcatcctgctgcggcgataacagctcttgactcccggcatcgtggctaacacattgttcgatcgtaacatctttgataacttatttatgcggttatgtaccaggttgatgttgaaacattagtaacaatgcccagggcaccttttggcctcagatagtcagataccctgtagggttgtaatttgtaggatttaggaacaagagcaactaatgctcagctgacagcctgctgcgagatagaatttgtatctcaagagccaaggtcctgttttggttatgttttttgttcagttgaggggtgaccgggtgaaccaagctctgtcttgttaggtgccaatcacagggtctggaaatatgtactcatcctgtattcttgctaaggttatggatcagatggtgtatatatctgtgcaaaacactaatttatagttttgcactaatctacactgtagattatattgtttaccgagtgaagtttgaagtaaacggctggaaatagcttaacgttaagcaatatgcgaaacaaggattgggtttttg

SEQ ID NO: 22683 - DNA, 1261 bp, Zea Mays
ctatgatttgactcctatcatgtatttttatccttatattttgacagttgttaagcatgcttttagattatactcccttgttgctgatggtaataataaaaaaatctgtctgtttcctttcagacggtgcacccaagtaacccaacatttttctctgcagattgacttggatacaattgaagttagcaatctgaatagacagtttttgtttcggcagagtcatgttggtcagtcaaaagctaaagttgctcgggatgctgtattgaaatttaggccaaatatcaatataaacccataccatgcaaacgtgaaggattctcatttcaatgttgatttcttcaagcaatttaatgttgttctgaatggtcttgataacttggatgctagacgccatgttaatcgcctttgccttgctgctgatgttcctttggttgaaagtggtactactggttttttgggacaggttactgttcatgtcaagggtaaaacagagtgctatgagtgtcaaccaaagcctgtccctaaatcatatcctgtctgcacaattacaaacacaccatcaaagtttgttcattgcattgtttgggcgaaagatctgctttttgcaaaattatttggtgataaaaaacaggataatgatcttaatgtgcactccaaagatgataccagttcaaaaacagatgtttttgaaaggagtgtagatgaagatcttgagcaatacacccagagaatatatgaccacgtatttggttacaacattgaagttgcattggataataaggaaacttggaagaatcggagaaagccaaaccctatttacattagagatgcattgcctgaagacgctgttcaacaaaatggtcgctctcaggatcacgtgaatgaggagcaggatccttctgctatggtatccttaggccttagaaatacacaagagatatggagtcttgctgacaattcaagagtgttcttggaggctttaaaattattttttgacaaaagagagaaggaaatagggagccttatttttgacaaggacgaccagttggctgttgagtttgttaccgctgcagcaaatatcagagcttcctcttttggaataccactgcatagtctttttgaagctaaaggtgttgctggaaatatagttcatgctgtggcaactaccaatgctataattgctggtctaatcgtcatcgaggcaattaaagtgctcaagggtgattatcaagattataggtgcttacgccttatataatgg

SEQ ID NO: 22684 - DNA, 1376 bp, Zea Mays
ctatgatttgactcctatcatgtatttttatccttatattttgacagttgttaagcatgcttttagattatactcccttgttgctgatggtaataataaaaaaatctgtctgtttcctttcagacggtgcacccaagtaacccaacatttttctctgcagattgacttggatacaattgaagttagcaatctgaatagacagtttttgtttcggcagagtcatgttggtcagtcaaaagctaaagttgctcgggatgctgtattgaaatttaggccaaatatcaatataaacccataccatgcaaacgtgaaggattctcatttcaatgttgatttcttcaagcaatttaatgttgttctgaatggtcttgataacttggatgctagacgccatgttaatcgcctttgccttgctgctgatgttcctttggttgaaagtggtactactggttttttgggacaggttactgttcatgtcaagggtaaaacagagtgctatgagtgtcaaccaaagcctgtccctaaatcatatcctgtctgcacaattacaaacacaccatcaaagtttgttcattgcattgtttgggcgaaagatctgctttttgcaaaattatttggtgataaaaaacaggataatgatcttaatgtgcactccaaagatgataccagttcaaaaacagatgtttttgaaaggagtgtagatgaagatcttgagcaatacacccagagaatatatgaccacgtatttggttacaacattgaagttgcattggataataaggaaacttggaagaatcggagaaagccaaaccctatttacattagagatgcattgcctgaagacgctgttcaacaaaatggtcgctctcaggatcacgtgaatgaggagcaggatccttctgctatggtatccttaggccttagaaatacacaagagatatggagtcttgctgacaattcaagagtgttcttggaggctttaaaattattttttgacaaaagagagaaggaaatagggagccttatttttgacaaggacgaccagttggctgttgagtttgttaccgctgcagcaaatatcagagcttcctcttttggaataccactgcatagtctttttgaagctaaaggtgttgctggaaatatagttcatgctgtggcaactaccaatgctataattgctggtctaatcgtcatcgaggcaattaaagtgctcaagggtgattatcaagattatagaatgacatattgccttgagcatccagcaaggaagatgctcttgatgcctgtcgagccttttgaacctagtaaatcatgttatgtctgctctgaggcctttgttacattttctctgtttttcggcactgacatgaagt

SEQ ID NO: 22685 - DNA, 2306 bp, Zea Mays
ctatgatttgactcctatcatgtatttttatccttatattttgacagttgttaagcatgcttttagattatactcccttgttgctgatggtaataataaaaaaatctgtctgtttcctttcagacggtgcacccaagtaacccaacatttttctctgcagattgacttggatacaattgaagttagcaatctgaatagacagtttttgtttcggcagagtcatgttggtcagtcaaaagctaaagttgctcgggatgctgtattgaaatttaggccaaatatcaatataaacccataccatgcaaacgtgaaggattctcatttcaatgttgatttcttcaagcaatttaatgttgttctgaatggtcttgataacttggatgctagacgccatgttaatcgcctttgccttgctgctgatgttcctttggttgaaagtggtactactggttttttgggacaggttactgttcatgtcaagggtaaaacagagtgctatgagtgtcaaccaaagcctgtccctaaatcatatcctgtctgcacaattacaaacacaccatcaaagtttgttcattgcattgtttgggcgaaagatctgctttttgcaaaattatttggtgataaaaaacaggataatgatcttaatgtgcactccaaagatgataccagttcaaaaacagatgtttttgaaaggagtgtagatgaagatcttgagcaatacacccagagaatatatgaccacgtatttggttacaacattgaagttgcattggataataaggaaacttggaagaatcggagaaagccaaaccctatttacattagagatgcattgcctgaagacgctgttcaacaaaatggtcgctctcaggatcacgtgaatgaggagcaggatccttctgctatggtatccttaggccttagaaatacacaagagatatggagtcttgctgacaattcaagagtgttcttggaggctttaaaattattttttgacaaaagagagaaggaaatagggagccttatttttgacaaggacgaccagttggctgttgagtttgttaccgctgcagcaaatatcagagcttcctcttttggaataccactgcatagtctttttgaagctaaaggtgttgctggaaatatagttcatgctgtggcaactaccaatgctataattgctggtctaatcgtcatcgaggcaattaaagtgctcaagggtgattatcaagattatagaatgacatattgccttgagcatccagcaaggaagatgctcttgatgcctgtcgagccttttgaacctagtaaatcatgttatgtctgctctgaggtcttggctgaacttccagctccagttctaaatggtacaatggttacagtcgaggatttgcatcaggaactaaaatgcagtatcaacatcaaacacagggatgagttcgatgaagaaaaggagcctgacagaatggttcttgttgggtggtctggcccagttgataagcaaaccactagtaatggtgagactaaatcagttccatcttcatccaatacagaagatgtggatggtactgccgaggacatatcagcaacttctggaatgaagcgtaagctgaacgaaatattagagacaaaggagaattttgatgctctcgaaaatctttcgggtgttgattccagcagcgctcaagttgttgaagatgacaatgacgatggccttcttatgtttgatgaggacccaaggcaaagtaagaagaagagattgcagtagcatcctgctgcggcgataacagctcttgactcccggcatcgtggctaacacattgttcgatcgtaacatctttgataacttatttatgcggttatgtaccaggttgatgttgaaacattagtaacaatgcccagggcaccttttggcctcagatagtcagataccctgtagggttgtaatttgtaggatttaggaacaagagcaactaatgctcagctgacagcctgctgcgagatagaatttgtatctcaagagccaaggtcctgttttggttatgttttttgttcagttgaggggtgaccgggtgaaccaagctctgtcttgttaggtgccaatcacagggtctggaaatatgtactcatcctgtattcttgctaaggttatggatcagatggtgtatatatctgtgcaaaacactaatttatagttttgcactaatctacactgtagattatattgtttaccgagtgaagtttgaagtaaacggctggaaatagcttaacgttaagcaatatgcgaaacaaggattgggtttttg

SEQ ID NO: 22686 - DNA, 2376 bp, Zea Mays
ctatgatttgactcctatcatgtatttttatccttatattttgacagttgttaagcatgcttttagattatactcccttgttgctgatggtaataataaaaaaatctgtctgtttcctttcagacggtgcacccaagtaacccaacatttttctctgcagattgacttggatacaattgaagttagcaatctgaatagacagtttttgtttcggcagagtcatgttggtcagtcaaaagctaaagttgctcgggatgctgtattgaaatttaggccaaatatcaatataaacccataccatgcaaacgtgaaggattctcatttcaatgttgatttcttcaagcaatttaatgttgttctgaatggtcttgataacttggatgctagacgccatgttaatcgcctttgccttgctgctgatgttcctttggttgaaagtggtactactggttttttgggacaggttactgttcatgtcaagggtaaaacagagtgctatgagtgtcaaccaaagcctgtccctaaatcatatcctgtctgcacaattacaaacacaccatcaaagtttgttcattgcattgtttgggcgaaagatctgctttttgcaaaattatttggtgataaaaaacaggataatgatcttaatgtgcactccaaagatgataccagttcaaaaacagatgtttttgaaaggagtgtagatgaagatcttgagcaatacacccagagaatatatgaccacgtatttggttacaacattgaagttgcattggataataaggaaacttggaagaatcggagaaagccaaaccctatttacattagagatgcattgcctgaagacgctgttcaacaaaatggtcgctctcaggatcacgtgaatgaggagcaggatccttctgctatggtatccttaggccttagaaatacacaagagatatggagtcttgctgacaattcaagagtgttcttggaggctttaaaattattttttgacaaaagagagaaggaaatagggagccttatttttgacaaggacgaccagttggctgttgagtttgttaccgctgcagcaaatatcagagcttcctcttttggaataccactgcatagtctttttgaagctaaaggtgttgctggaaatatagttcatgctgtggcaactaccaatgctataattgctggtctaatcgtcatcgaggcaattaaagtgctcaagggtgattatcaagattatagaatgacatattgccttgagcatccagcaaggaagatgctcttgatgcctgtcgagccttttgaacctagtaaatcatgttatgtctgctctgagaccccacttgttctggaggttaataccaagacaacaaagctccgggaagtcattgaaaaggttataaaaggtcttggctgaacttccagctccagttctaaatggtacaatggttacagtcgaggatttgcatcaggaactaaaatgcagtatcaacatcaaacacagggatgagttcgatgaagaaaaggagcctgacagaatggttcttgttgggtggtctggcccagttgataagcaaaccactagtaatggtgagactaaatcagttccatcttcatccaatacagaagatgtggatggtactgccgaggacatatcagcaacttctggaatgaagcgtaagctgaacgaaatattagagacaaaggagaattttgatgctctcgaaaatctttcgggtgttgattccagcagcgctcaagttgttgaagatgacaatgacgatggccttcttatgtttgatgaggacccaaggcaaagtaagaagaagagattgcagtagcatcctgctgcggcgataacagctcttgactcccggcatcgtggctaacacattgttcgatcgtaacatctttgataacttatttatgcggttatgtaccaggttgatgttgaaacattagtaacaatgcccagggcaccttttggcctcagatagtcagataccctgtagggttgtaatttgtaggatttaggaacaagagcaactaatgctcagctgacagcctgctgcgagatagaatttgtatctcaagagccaaggtcctgttttggttatgttttttgttcagttgaggggtgaccgggtgaaccaagctctgtcttgttaggtgccaatcacagggtctggaaatatgtactcatcctgtattcttgctaaggttatggatcagatggtgtatatatctgtgcaaaacactaatttatagttttgcactaatctacactgtagattatattgtttaccgagtgaagtttgaagtaaacggctggaaatagcttaacgttaagcaatatgcgaaacaaggattgggtttttg

SEQ ID NO: 22687 - DNA, 2242 bp, Zea Mays
catttttctctgcagattgacttggatacaattgaagttagcaatctgaatagacagtttttgtttcggcagagtcatgttggtcagtcaaaagctaaagttgctcgggatgctgtattgaaatttaggccaaatatcaatataaacccataccatgcaaacgtgaaggattctcatttcaatgttgatttcttcaagcaatttaatgttgttctgaatggtcttgataacttggatgctagacgccatgttaatcgcctttgccttgctgctgatgttcctttggttgaaagtggtactactggttttttgggacagtttgttcattgcattgtttgggcgaaagatctgctttttgcaaaattatttggtgataaaaaacaggataatgatcttaatgtgcactccaaagatgataccagttcaaaaacagatgtttttgaaaggagtgtagatgaagatcttgagcaatacacccagagaatatatgaccacgtatttggttacaacattgaagttgcattggataataaggaaacttggaagaatcggagaaagccaaaccctatttacattagagatgcattgcctgaagacgctgttcaacaaaatggtcgctctcaggatcacgtgaatgaggagcaggatccttctgctatggtatccttaggccttagaaatacacaagagatatggagtcttgctgacaattcaagagtgttcttggaggctttaaaattattttttgacaaaagagagaaggaaatagggagccttatttttgacaaggacgaccagttggctgttgagtttgttaccgctgcagcaaatatcagagcttcctcttttggaataccactgcatagtctttttgaagctaaaggtgttgctggaaatatagttcatgctgtggcaactaccaatgctataattgctggtctaatcgtcatcgaggcaattaaagtgctcaagggtgattatcaagattatagaatgacatattgccttgagcatccagcaaggaagatgctcttgatgcctgtcgagccttttgaacctagtaaatcatgttatgtctgctctgagaccccacttgttctggaggttaataccaagacaacaaagctccgggaagtcattgaaaaggttataaaaggtaagcttggaatgaacctacctttgataatggttggcgccacacttgtttttgaggatggtgaagatctggaggaggatgagattgcaaattatgctttaaaccttgaaaaggtcttggctgaacttccagctccagttctaaatggtacaatggttacagtcgaggatttgcatcaggaactaaaatgcagtatcaacatcaaacacagggatgagttcgatgaagaaaaggagcctgacagaatggttcttgttgggtggtctggcccagttgataagcaaaccactagtaatggtgagactaaatcagttccatcttcatccaatacagaagatgtggatggtactgccgaggacatatcagcaacttctggaatgaagcgtaagctgaacgaaatattagagacaaaggagaattttgatgctctcgaaaatctttcgggtgttgattccagcagcgctcaagttgttgaagatgacaatgacgatggccttcttatgtttgatgaggacccaaggcaaagtaagaagaagagattgcagtagcatcctgctgcggcgataacagctcttgactcccggcatcgtggctaacacattgttcgatcgtaacatctttgataacttatttatgcggttatgtaccaggttgatgttgaaacattagtaacaatgcccagggcaccttttggcctcagatagtcagataccctgtagggttgtaatttgtaggatttaggaacaagagcaactaatgctcagctgacagcctgctgcgagatagaatttgtatctcaagagccaaggtcctgttttggttatgttttttgttcagttgaggggtgaccgggtgaaccaagctctgtcttgttaggtgccaatcacagggtctggaaatatgtactcatcctgtattcttgctaaggttatggatcagatggtgtatatatctgtgcaaaacactaatttatagttttgcactaatctacactgtagattatattgtttaccgagtgaagtttgaagtaaacggctggaaatagcttaacgttaagcaatatgcgaaacaaggattgggtttttg

SEQ ID NO: 22688 - DNA, 2901 bp, Zea Mays
gcagtgctggcactctcagagctatcctttggtgtgctgtggctgactcatgaaccactgtatttgcccccgttgttcagtgccttaggtctgagttcagtggagttttctccctgccctcgagtctgacccgtgttcatcgcttgagggacatagctcttgagttcaagtcggtgtaaacccactccacagccacccagcatgatgtattttgtgcatcgcgtgccaatggcgaccacagcagcagttctcaccctcaccgtggacatgattcctcggaggttgtctcggccgtgtggtgcttgttccttactcctcgcaggtcaatgaaggtcacatcatttactgcttgaactctacctctgttggttgcctggaacttggtgtgaaattttctcaaagataggctgtcaggtttctggatcctaaacttagtgcataaggctgaaactaggttttagtgtattgagctcaactttggagctctgttgcacccagtctatttggttttgggataaagtttctgtagcaagtttgaagaccgtagtaagacgaacaaaattactaaaaggagatggcctaggtcctacagaaaattgggagtaattaatgtccaaactatctctatcagacgtgtgcaatgcagaccagattcagttgctgtaactatggttcagtgtttttctctagattttggagctcttttgtgtttgcttggtgaggttttggaccacattatctataccaaagcgatagagctataattagagaataattttggttaagaaaggctggtctgttaccatatgaagttgtgagatgtgaggggttaaacatagaggtgtgcaaaggttagtgagtgttgattcagctgattcaagtaatcagtgttggtttgagttgggaagctgaagaaggatcttctctccctgtggttgcacttgtggatatagttgaagatatggatgggatgcacagctaaggttctagaggtctcattctccactaaaaatatcaagtttggttaggagtgtggggtgcctgtcctgtaagttagttgaaacagtgagtcaagtccatctttggagcactataactcctgatccatgggcatttggtcttgggctgctgcaatgaacttgtagagctaggttgggtgagcaaattttgtgagccagggtcagcctgctatcaccaggaattgggagaaagtgttgctccaagtcaggatgtcagtctaggaaattctgaactcgattcagtccctaaagctatgttccagtattttctgttagtattggagctgtttggtgtctgatccaaggagtttaaggctgaagtctttatgaagaattggtagagggttgtttaatagaccagttttagtaagtgtgctccccatgttacttcgggaaattgtgtgattgaagggggtgaaaagggagagatcagggttcaacaggtactaggagttgctacaaaaatctgaagaaagatcttcacatccctgctgtcctccgcccatgtgcacaaactgagttacgttggaatggacaacaaaggatattgaggtccagtccccgtgctgaaaatatctcagttggacttgtgtgtacctatccacaagtagagtaatatccattatgtttgatagctacaaaactggacaaagttgatatttgagttaagagcgaccgagtcgtggccggggtattgtaaatggagcgaagtcgatggaccgaggtgcttttgtcagtgacaccattcgacagtggtctgggctcttgtgtgattaatctttgcggtgtggtcctttatgcaaaattgttgatgcgggcgcgggccagctttgcctactgctgggccgggtttcggcctagtatggtgctcggttttgccttttcttttactagagagcttagaaattgtagaaaaatctaaaaatagtgggaccaattctgttaggtgcctaaaatcaggaacttcctgttagagttggttttaagatttttatggtggttaccaaattttagtgtattaaatagtactcttggaacgcctatttaaattttagaaataagaatatagcaccaaaaattatagaaattcttggagagttttgtaagcacaatatgagtacttggtaaaagttggtggatgtttggaagccagttgcttaggaagctttgtaaggtccaaaatataaaggttaaatccttaataaaagtggataaagtgctttggaataagaggaaagaagtgagatctgggtgtttgcataaagtctagtatgttttaatcctttaatggctcaagcttaaagggataccttacagggttcaaagtaagagagttgaatccttgtttaagacataaatggagtgttgcttaataaagacaaggttccctagtatggtttaggatcttgggtgtggtattagagtgtttagctcttttgtgatgttgttagttcttgggtgcacctttagagatgtgtagtcttgaggttctttttgttattttttatgcatcttcgtgacataaccgcaagcatatgtgatcatgacatttcatgtagagtaccaagaagaagatcctaaagagaagtctactcagtgctattgatccagtggtggattccatctaactgcttatcgtgttagaagatctcagatctcctcctgtaataaggagaagttttattcccttatcttttggttagttacttcatgtggaggccttgaagcttagaatgttatgtgtatctcttatggaaaggcttcacccttccaattattaaaataagttatgcactttgggtactatcaggacttgtaataattaccattcttcttatgttgtaaaacttgagctttggaaatgtaaaatatgttttgtaaa

SEQ ID NO: 22689 - DNA, 574 bp, Zea Mays
gccttaggtctgagttcagtggagttttctccctgccctcgagtctgacccgtgttcatcgcttgagggacatagctcttgagttcaagtcggtgtaaacccactccacagccacccagcatgatgtattttgtgcatcgcgtgccaatggcgaccacagcagcagttctcaccctcaccgtggacatgattcctcggaggttgtctcggccgtgtggtgcttgttccttactcctcgcaggtcaatgaagagtaccaagaagaagatcctaaagagaagtctactcagtgctattgatccagtggtggattccatctaactgcttatcgtgttagaagatctcagatctcctcctgtaataaggagaagttttattcccttatcttttggttagttacttcatgtggaggccttgaagcttagaatgttatgtgtatctcttatggaaaggcttcacccttccaattattaaaataagttatgcactttgggtactatcaggacttgtaataattaccattcttcttatgttgtaaaacttgagctttggaaatgtaaaatatgttttgtaaa

SEQ ID NO: 22690 - DNA, 306 bp, Zea Mays
aatcagaggaaacagagccgacaacaaattaccagatccccgtactctcgttttccccggcagcacatctccgaccaaccccgccgttcccgcccgtctgcccgcagaagtctcgttgcccgacgcgctcggcatggctttgcttcacctgtgctagcaatcccgccgcatcggcgcatgcgggtgaagcaacgaccgaattcccgagcagcgcctcttcccgagctcgtccctgaccgccggctgtccaacagcttatacagatcgcttgcagcctgttggaggcgcggcgcacggcggcaaata

SEQ ID NO: 22691 - DNA, 898 bp, Zea Mays
acaggttcaatttcagtttcagtaggcacaacagaaagtttcagcagcacatgttcaacagccccaacgacggcgggtggtcggggccgagctgtgcccgacggtcggtgttcgagggcgggtgtcattgctgctcggtgaagaaggcctacagacgtcagtgcgcggcagctccaggccgtcgcatggtgggggtggaggcgacccttcacatgcatgaatgccggagatctgcccattcgcgccagcgtcggagacagtccgtcgcgtgctccgagggatgattcagcaagtcgcgcgccgtcgggagggtcttcggccggcgttgctgctcgggaagacgaaagccggtcaggcgcggctgctcgctctagacgtgggggatggtcgggaagaagaagcccacggacagcccgaaagccgacattcaggcgctatggttggctgctacgtcagcgagcgtgccggcgccgctgctagggcatgtgccatgcttgcttgcgccgctgcgacacggccacgccgagcacgtcacccgtcgatgagattggaggttgcgcatacggatcttcggtgggcgctgctcggggaagatgagcgcacaacgaagcgtcagtcgtccattaggttacgggcaggcagcactagcctgctggggaagatggcctgctggctggcactatacgggaagaagatagcacggccgagcatccaccatggatctagtagtctgctctctgctgtaggctttgtttcctctgatttggggaagaaaagggatgggtcccacatatcaggccgcaggtcccacgtacctggcagcgttaacggacggaacttgtccgtaagaacattactgagcgcagaacgatgttgcgaggggaaaactgaggagtaa

SEQ ID NO: 22692 - DNA, 2758 bp, Zea Mays
cagatagtttcctgctgtatcacgaggaaaagccgtgaagaaatcaaacgagaaagagaaaggcacaaaaaaataaagaacgaaaacaatgggcagtgaaataaataaaaatggcaaccgcgccgccctcatctcccttcatctcctcaagcaaagcaaaggcgagcgcgagagaaacctgaaccaacttcccagacccgctactccctcgccgcgatttcctcacatggcagcgctgcgcctccgcgaatcactcgagaggaacggcccccgcttctatttatccggcccttgtccctgcgccgacccgcgttgccccagtcccgatctcgccgcccccttctcctccctccgcgtccatcgcacccgctcctgatcccgcttgcttgctctggttctgcttccgccgtttgtctcgcgggtcctgggagctcctgagccctggttctgtctctagcctgtcttgccatggggaagagcaagaagagcaaggcccgcggcggcagggacgacctgctcgacagcagcgacgccgacagcgtcagctcctcgtccaccgcactgtcggatctctccatctcgtacgctaccgagcacgtcaactcgcaggagttcgtcctggacaagtacatcgacgcgctctacgagaagagggggtctacaagagaggcagcattgggtaaactggttgatgcctttgaaagttttatgctccatggccttgtggaggacaagtatgccactctgatgagtcaattaaataattccgtgaaaaggggatctactaaggaggtttttctggcatctcattccattgggttattggctattacactcggtgttgggagcagttcacatgaaataatggaggagtcacatccccaactttgtagggtacttcaagcttggtccgatgcatcaaagatgatatctgcacttgattgtttggctgtcatcacatttgttggagcatctgatctggctgaaacagagttatctttgaaagccatgtgggatgtgattcatccaaagtctggttcaaatgtgggaactgttcggaaacctaggcctcctgtgttagcagctgctgtatctgcatggacttttctcctgactactattggttcatggaggataaataccaatatctggaaagagcccattgcatttctgtctactcttttggaagcagatgatcgtgctgttcggatggctgctggtgaagcattggttttgtgctttgagttaaatctgcttgatgtttcttctcgtgaggacgatggtgttaacacaggaggaacagctggttctaagaacaagcttttcttggatatgcaagcattaaaagcaaaaatatcaggtctggccactaatctctctgctgaggctggggggcaaggtgcagacaagaaaaaacttactgaccaaagagacttatttcaaaggatcttagattttgtcaagtatggtgactgccctgaagaatcaatcaagattgctggaaaacgtgatgttttaagggtgtcgtcatggtctgaattaatccagttgaatttcttaaaggggtttctggggaaaggctttctgaagcatgttcaggagaatggacttcttcaggatatatttgacattaaggttgacaaaaccgaaaccctgtcgtccactaacaagaaaatctttaggtctgaagaggaaaaaggaagagctctgaaattgaacaaggaacgtcgtctagcccaggtaatgctaatgcaaaatgccctcttcatgtgaagaactctccttaacgtcaccctatttttcttcagcatcgaacagtaataattaaaataattttatggatacctcatgcctggagctctaaaagtaacccttgtaaatattttccctcacgttactgtgggttcgctgcagggtggtgtttcgttacatgcagggagataataggttataaattttacactataaaatttaaggatcggactctatttatattcatttttaactaaaattaattaaaggtccaaataaatcgtgaagaaacatttgaatcatgattcattatcaccgctagttagcccatgctcatcatagcgtgtatatggctatgacaaacactgttttgctatttaaagagtggagtttaaaataaggaatgcgataggaggtggaataaggaggctgctagagatagccttacatgttagtctcaccatgtatacaatctttatcactatgcttttactaatgccagcgaaacaaaaaaacaagcaatgaaaagggtgcataacctatgtaacaactgtagtcagaataatgctattacacatacaatgttttgatgatttcaggtaaggaagaatgctgtcatgttggacgactaacaaggtcacaagggtgggaaggcaacagccattccgcgtctctgtttaaactactatttactgggctgtcatgttgggccgttgtctgtgtaaactactatttactggcacattccattggaggttgtgccgtcatagtactgagacacttgagttatactgatatagtgcacgtaagcgatttactattcgtacatatggaacgtcagatagcatgacttatgttggaataataaagttaattagaagttcagctagattcatgtgggaatagcaagaagttacttcgaattttagggtttgtttggttcagcttcctaaactagattcgttgccaaaaaatttggaatctcaaacaaataagtacaatagaa

SEQ ID NO: 22693 - DNA, 2467 bp, Zea Mays
cgaaaatgagctctctctggactgaactagtgagaatacttgagaaagagcgtataccagtctagcaccgaactaccaaaaccgaccgagccgcgaacttcacccctgccttctctcccttctccgtccaggccctggtgcccgagcgttctcgtgcggcaagtgggcgccgccgccggactacgccaggtgcccagttcctcgtcgggtccttcgtcgacgacgagcacccaccagttatgccctttctcttcccttcttgctgtgcgaaacccagcaccatccgaaccctaacttgagctatctggctatttgcatccggatctgatctaattaccaagcgtgtacatacatactactaacttcgattttttttttgggaaaaatattggaacatccgtgtcctttaccgggttcccccctatagaaaattcgagtattagactctacatgtcaagaaagtatggcgccaggaagcaaggcggagcggaaagcagcactagatgctggcgcatggatgttcaatgtcgtcacatctgttggtatcatcatggtcaacaaaggcttaatggcgactcatggctttagttttgctacaacactgactggacttcattttgcaatgacaaccttgatgacgttagtaatgaaatggctgggatatattcagccatcttatttaccattaccagaactagtaaagtttgccttttttgcaaacctgtcgatcgtcggaatgaacgttagtttgatgtggaactctgttggattctatcagatcgcgaagttgtgtatcattccagtcttatgcattctggaaatcatattcgacaaagttcgttactcaagagatacaaagctcagtatagtgcttgtcctcataggtgttgctgtgtgtactgtgactgatgttagcgtgaactctcaagggctattagctgcagtaatagctgtttggagcacagcactacaacaacatgctttctagaaattgccttccccagaccacaccttgtgtgggagctctcaacattagccaccaatgttttcagacggcctaatcgtttctgatcgccagaggatcaatcagcccgttcagatcgattaatcggacgatcagcccgattaatcacttctgagtccatgctaacaattctcagtttctcatcgccaagtggtcaagcccatcatgtagcaaacaacaaggtacaagaaatcgcgaagccacattcatgcttgcaggcttgcagcagcagcactcagtggacaggccctggaccgtacctgcaggctggcaccgccgcgccggggatggaggaggggccgagggggacgatgcgtcattttccgccgtcgccggtagcgcgccggcgttgcctgcatagtgctccgctaggttcctcgacagccagttcgtgtcgtgtctcgcgtgtgctccagcctgggcgttgttcactgttggctacttggttgtgttcatgtgggaggaaaaaggaagcctgggctgggctgctgggccgaattcgttgacgaaaaacaattgaagtggtccaaaatttcaaagcatacagccgtctgattgtccctgcgctaatcggacgatcagaaacctgatcgccctgatcggctccgaagctgcgatcagtcgattaatcgctgatttatggcgactaatctgacgttctgaaaatgctgttggccacccaaccatttttttcctttccgaaatacatatgttcaccatcttcaatggaagtactcgcttggctcattcaatctcttaggccatactgctccagcgcaggcagcatcattgttaatagtggggccttttgtggacttctggctgactaacaaaagagttgatgcttttaactacacatcaatagttacgattcacagccgtctcgttccaagtcctaggccacatgaagacagttctggtgttgaccttggggttccttttctttgggaaagaggggctcaacttccatgtcgcccttggcatgcttctggctgtgatcggcatgatctggtacgggaacgcgtcgtcgaaatctggaggcaaagagcggcaggtctaccccacaccgagcgagaagagtcagaagcatggggcgctgtcatcgcagtccgagctcgatcaaaaggtctaaacgagacacacaaaggcatccgatgcttgttgagcaccggtcgacctggctttatttttagtacttatttttgagggatgagatgtttctataggattgtaggtggggccatagcagaaagagggtgcctgggtaaaatgcccatgagtttacttttgcagtgagtatgtcaatctaagctggcagatacttgatttgtaatagtctttgtgtgtgtttcgctcttcatgtggcatgttcagtttgatctatagttgtatctttcactttcacactgaaattgaaaagtaaagcgcaaatttccttgtata

SEQ ID NO: 22694 - DNA, 2344 bp, Zea Mays
cgaaaatgagctctctctggactgaactagtgagaatacttgagaaagagcgtataccagtctagcaccgaactaccaaaaccgaccgagccgcgaacttcacccctgccttctctcccttctccgtccaggccctggtgcccgagcgttctcgtgcggcaagtgggcgccgccgccggactacgccaggtgcccagttcctcgtcgggtccttcgtcgacgacgagcacccaccaaaaattcgagtattagactctacatgtcaagaaagtatggcgccaggaagcaaggcggagcggaaagcagcactagatgctggcgcatggatgttcaatgtcgtcacatctgttggtatcatcatggtcaacaaaggcttaatggcgactcatggctttagttttgctacaacactgactggacttcattttgcaatgacaaccttgatgacgttagtaatgaaatggctgggatatattcagccatcttatttaccattaccagaactagtaaagtttgccttttttgcaaacctgtcgatcgtcggaatgaacgttagtttgatgtggaactctgttggattctatcagatcgcgaagttgtgtatcattccagtcttatgcattctggaaatcatattcgacaaagttcgttactcaagagatacaaagctcagtatagtgcttgtcctcataggtgttgctgtgtgtactgtgactgatgttagcgtgaactctcaagggctattagctgcagtaatagctgtttggagcacagcactacaacaacatgctttctagaaattgccttccccagaccacaccttgtgtgggagctctcaacattagccaccaatgttttcagacggcctaatcgtttctgatcgccagaggatcaatcagcccgttcagatcgattaatcggacgatcagcccgattaatcacttctgagtccatgctaacaattctcagtttctcatcgccaagtggtcaagcccatcatgtagcaaacaacaaggtacaagaaatcgcgaagccacattcatgcttgcaggcttgcagcagcagcactcagtggacaggccctggaccgtacctgcaggctggcaccgccgcgccggggatggaggaggggccgagggggacgatgcgtcattttccgccgtcgccggtagcgcgccggcgttgcctgcatagtgctccgctaggttcctcgacagccagttcgtgtcgtgtctcgcgtgtgctccagcctgggcgttgttcactgttggctacttggttgtgttcatgtgggaggaaaaaggaagcctgggctgggctgctgggccgaattcgttgacgaaaaacaattgaagtggtccaaaatttcaaagcatacagccgtctgattgtccctgcgctaatcggacgatcagaaacctgatcgccctgatcggctccgaagctgcgatcagtcgattaatcgctgatttatggcgactaatctgacgttctgaaaatgctgttggccacccaaccatttttttcctttccgaaatacatatgttcaccatcttcaatggaagtactcgcttggctcattcaatctcttaggccatactgctccagcgcaggcagcatcattgttaatagtggggccttttgtggacttctggctgactaacaaaagagttgatgcttttaactacacatcaatagttacgttctttatcgtgttgtcgtgcataattgccgttgggacgaatctaagccaattcatatgcatcggaagattcacagccgtctcgttccaagtcctaggccacatgaagacagttctggtgttgaccttggggttccttttctttgggaaagaggggctcaacttccatgtcgcccttggcatgcttctggctgtgatcggcatgatctggtacgggaacgcgtcgtcgaaatctggaggcaaagagcggcaggtctaccccacaccgagcgagaagagtcagaagcatggggcgctgtcatcgcagtccgagctcgatcaaaaggtctaaacgagacacacaaaggcatccgatgcttgttgagcaccggtcgacctggctttatttttagtacttatttttgagggatgagatgtttctataggattgtaggtggggccatagcagaaagagggtgcctgggtaaaatgcccatgagtttacttttgcagtgagtatgtcaatctaagctggcagatacttgatttgtaatagtctttgtgtgtgtttcgctcttcatgtggcatgttcagtttgatctatagttgtatctttcactttcacactgaaattgaaaagtaaagcgcaaatttccttgtata

SEQ ID NO: 22695 - DNA, 1818 bp, Zea Mays
cgaaaatgagctctctctggactgaactagtgagaatacttgagaaagagcgtataccagtctagcaccgaactaccaaaaccgaccgagccgcgaacttcacccctgccttctctcccttctccgtccaggccctggtgcccgagcgttctcgtgcggcaagtgggcgccgccgccggactacgccaggtgcccagttcctcgtcgggtccttcgtcgacgacgagcacccaccaaaaattcgagtattagactctacatgtcaagaaagtatggcgccaggaagcaaggcggagcggaaagcagcactagatgctggcgcatggatgttcaatgtcgtcacatctgttggtatcatcatggtcaacaaaggcttaatggcgactcatggctttagttttgctacaacactgactggacttcattttgcaatgacaaccttgatgacgttagtaatgaaatggctgggatatattcagccatcttatttaccattaccagaactagtaaagtttgccttttttgcaaacctgtcgatcgtcggaatgaacgttagtttgatgtggaactctgttggattctatcagatcgcgaagttgtgtatcattccagtcttatgcattctggaaatcatattcgacaaagttcgttactcaagagatacaaagctcagtatagtgcttgtcctcataggtgttgctgtgtgtactgtgactgatgttagcgtgaactctcaagggctattagctgcagtaatagctgtttggagcacagcactacaacaacatgctttctagaaattgccttccccagaccacaccttgtgtgggagctctcaacattagccaccaatgttttcagacggcctaatcgtttctgatcgccagaggatcaatcagcccgttcagatcgattaatcggacgatcagcccgattaatcacttctgagtccatgctaacaattctcagtttctcatcgccaagtggtcaagcccatcatgtagcaaacaacaagtatgttcaccatcttcaatggaagtactcgcttggctcattcaatctcttaggccatactgctccagcgcaggcagcatcattgttaatagtggggccttttgtggacttctggctgactaacaaaagagttgatgcttttaactacacatcaatagttacgttctttatcgtgttgtcgtgcataattgccgttgggacgaatctaagccaattcatatgcatcggaagattcacagccgtctcgttccaagtcctaggccacatgaagacagttctggtgttgaccttggggttccttttctttgggaaagaggggctcaacttccatgtcgcccttggcatgcttctggctgtgatcggcatgatctggtacgggaacgcgtcgtcgaaatctggaggcaaagagcggcaggtctaccccacaccgagcgagaagagtcagaagcatggggcgctgtcatcgcagtccgagctcgatcaaaaggtctaaacgagacacacaaaggcatccgatgcttgttgagcaccggtcgacctggctttatttttagtacttatttttgagggatgagatgtttctataggattgtaggtggggccatagcagaaagagggtgcctgggtaaaatgcccatgagtttacttttgcagtgagtatgtcaatctaagctggcagatacttgatttgtaatagtctttgtgtgtgtttcgctcttcatgtggcatgttcagtttgatctatagttgtatctttcactttcacactgaaattgaaaagtaaagcgcaaatttccttgtata

SEQ ID NO: 22696 - DNA, 2010 bp, Zea Mays
aaccctctgttcttttcaaaacaaaaaaccaaaacccttctgtggaaaaacgtaaaaccaggcgcgccccgcaggaattgcggtcaggagaacctcatccctctcgccttcaggttctactcgccctctccccacccgcagcgcctcctcccattcccccaacggacattgcctaggaggctaggacagaaccacccagagcgcacaaccttacccgaatcgccgttgcatggaggccgtgcgcgcgtcggcggcgtgggtcgccagtcgctcctcccatgtcacggtcgaccttcaagaaattgagaaggtagtggaccaaatccaaggagatgttccaaaagttgagtgggattacgaaggaattcactactttgacaatgggccactcacagtccagtacctgttcgtcttggatgcactaaacttctgcttctggccagataaggacttgagctatgaccatttggcttctggactgaagtcagccttggagaaagacaaaaatgcccttgattcagatcgtctccagaattacactggtatcttccttctcattgggatcttgttaggtttaagagttccttcattagcattttctgaacttctgcttctggttcaagggaatgcttctcagcttctatgataaactgtcgttttctggaaatgtcatttaactgtgtaggttgtggtaccagatgaatgaacagttacaagttgtgcttaactggatgttatctgatcctctcagtctgagtacccttttcatccctttattcttctgttgatagtgaaagggcctttaactgagttggtttctgttgataataataagctactcattttctaattttcttgctgtgcttctaattgagaaataattacttgcatctctgctatggatcctcataaaaactgctaatttggaaggacatttgcaaaatgtagggccccagctccgccaacttctgaactggccacgaccactgccaattgaggaggaaagagtacgccttctccacgaggttgggcaggaacttaaaagaagctttggaggtcaggctgctaatctagtgaagtctgctggaaactctgctgcgactcttattgaactgattactcgacattttcctggtttccgggaccattcactctacaaggggcaccaggttttcctgtacaagagagcccagatctttgttgctgatttgtggggcgccttcaagggacaaaactatggcgagttccacgatatcaattccatcaccatatttgctgactacattgttccagcggtcctgagggagcttggagtacttaaatatggctcgaatctatcttgctccatcgactcgaacagtgagatagtgcctggaagcgaggaggaagtggagatacgcgcgtgctccatctatgcagtggagaagatgagggacctgatcagtaagaagtttggaaagcagcttctgagcatcgacattgatctctggctctggtcctgcggcgtgcagaacatggcgctgtcacatcaccgcaccctgtcgatttactactagacagggcagtggcggaggacggataaaaattttggtatggcttgagctatacctagccacaatggaccctccgcccctgagacaggcagtcagtcaggaagctgaccctgctggtgcgctcgttcagctggccgggcgttgtcgtcgcttgttcgtcctaaccataacggtgcatgtaggtgtcgagagttttgtctccttgggaatgcacacaggtgcaaggtattgtaggcccgtcccatgaggatgcatggggttggtagtacaacatttttttttgtgatttagagacttgaactgctgcagttttcacatgaatgttatccctaaggacaaggcgggagagcgagtgtttctctatctccagaactgatcgcggcgtttattttctgtttccagttactgctccaactctttctgaatcttgctgaatttgagtaagcgcactgcgatc

SEQ ID NO: 22697 - DNA, 2434 bp, Zea Mays
aaccctctgttcttttcaaaacaaaaaaccaaaacccttctgtggaaaaacgtaaaaccaggcgcgccccgcaggaattgcggtcaggagaacctcatccctctcgccttcaggttctactcgccctctccccacccgcagcgcctcctcccattcccccaacggacattgcctaggaggctaggacagaaccacccagagcgcacaaccttacccgaatcgccgttgcatggaggccgtgcgcgcgtcggcggcgtgggtcgccagtcgctcctcccatgtcacggtcgaccttcaagaaattgagaaggtagtggaccaaatccaaggagatgttccaaaagttgagtgggattacgaaggaattcactactttgacaatgggccactcacagtccagtacctgttcgtcttggatgcactaaacttctgcttctggccagataaggacttgagctatgaccatttggcttctggactgaagtcagccttggagaaagacaaaaatgcccttgattcagatcgtctccagaattacactgggccccagctccgccaacttctgaactggccacgaccactgccaattgaggaggaaagagtacgccttctccacgaggttgggcaggaacttaaaagaagctttggaggtcaggctgctaatctagtgaagtctgctggaaactctgctgcgactcttattgaactgattactcgacattttcctggcacctacagtgaaagtgaaactggaatggcccatccacccactactactgtttgtctgcatatggatttatgttctgcctgctactttggatctgagagtcaggaaacagtgatgattgatgaactggtgcctcatctaggcatatgaacttcgtatgagctgggccattcaaaaccagatgattgtgaatatttgatgcttacacttacacccttacattttttcatttctcgtgcaaaacgttagtggttttcattttttagcagttggccaagaaatctgttcacatgatttcacttgaagttaacatttattctcggtgttggtgctttcgttggatctccattgatttgagacattgaacatggagtttatttcctcaaagaagaacatgaaactgttcccgtagtgtttaactgattatacttgttcgacaaatatgtccagacatgagctaatcatctgaaattccagtgatttaggagtaattgatttcaggcttccagcacattattctatcatatatggacatatttgattgcacagataggttcactgacaaacatgtacaaatcttaactattcaaccggttagtctgaattcagaaacaaggaaggatgctagttttacccctgatctggccatagccaacttcagaatatttcacaattcgttcttcgatcattgaatttaaattgtaccttgcgctcttgcagggaattttagcatgtattgaatcttttgttaataggatagcgttgtgcaacttgatggtaccttttgctaacgttctatgaacacgtacatctgcatgcattcaaaaccaggtttccgggaccattcactctacaaggggcaccaggttttcctgtacaagagagcccagatctttgttgctgatttgtggggcgccttcaagggacaaaactatggcgagttccacgatatcaattccatcaccatatttgctgactacattgttccagcggtcctgagggagcttggagtacttaaatatggctcgaatctatcttgctccatcgactcgaacagtgagatagtgcctggaagcgaggaggaagtggagatacgcgcgtgctccatctatgcagtggagaagatgagggacctgatcagtaagaagtttggaaagcagcttctgagcatcgacattgatctctggctctggtcctgcggcgtgcagaacatggcgctgtcacatcaccgcaccctgtcgatttactactagacagggcagtggcggaggacggataaaaattttggtatggcttgagctatacctagccacaatggaccctccgcccctgagacaggcagtcagtcaggaagctgaccctgctggtgcgctcgttcagctggccgggcgttgtcgtcgcttgttcgtcctaaccataacggtgcatgtaggtgtcgagagttttgtctccttgggaatgcacacaggtgcaaggtattgtaggcccgtcccatgaggatgcatggggttggtagtacaacatttttttttgtgatttagagacttgaactgctgcagttttcacatgaatgttatccctaaggacaaggcgggagagcgagtgtttctctatctccagaactgatcgcggcgtttattttctgtttccagttactgctccaactctttctgaatcttgctgaatttgagtaagcgcactgcgatc

SEQ ID NO: 22698 - DNA, 1758 bp, Zea Mays
aaccctctgttcttttcaaaacaaaaaaccaaaacccttctgtggaaaaacgtaaaaccaggcgcgccccgcaggaattgcggtcaggagaacctcatccctctcgccttcaggttctactcgccctctccccacccgcagcgcctcctcccattcccccaacggacattgcctaggaggctaggacagaaccacccagagcgcacaaccttacccgaatcgccgttgcatggaggccgtgcgcgcgtcggcggcgtgggtcgccagtcgctcctcccatgtcacggtcgaccttcaagaaattgagaaggtagtggaccaaatccaaggagatgttccaaaagttgagtgggattacgaaggaattcactactttgacaatgggccactcacagtccagtacctgttcgtcttggatgcactaaacttctgcttctggccagataaggacttgagctatgaccatttggcttctggactgaagtcagccttggagaaagacaaaaatgcccttgattcagatcgtctccagaattacactgggccccagctccgccaacttctgaactggccacgaccactgccaattgaggaggaaagagtacgccttctccacgaggttgggcaggaacttaaaagaagctttggaggtcaggctgctaatctagtgaagtctgctggaaactctgctgcgactcttattgaactgattactcgacattttcctggcacctacagtgaaagtgaaactggaatggcccatccacccactactactgtttgtctgcatatggatttatgttctgcctgctactttggatctgagagtcaggaaacagtgatgattgatgaactggtgcctcatctaggcatatgaacttcgtttccgggaccattcactctacaaggggcaccaggttttcctgtacaagagagcccagatctttgttgctgatttgtggggcgccttcaagggacaaaactatggcgagttccacgatatcaattccatcaccatatttgctgactacattgttccagcggtcctgagggagcttggagtacttaaatatggctcgaatctatcttgctccatcgactcgaacagtgagatagtgcctggaagcgaggaggaagtggagatacgcgcgtgctccatctatgcagtggagaagatgagggacctgatcagtaagaagtttggaaagcagcttctgagcatcgacattgatctctggctctggtcctgcggcgtgcagaacatggcgctgtcacatcaccgcaccctgtcgatttactactagacagggcagtggcggaggacggataaaaattttggtatggcttgagctatacctagccacaatggaccctccgcccctgagacaggcagtcagtcaggaagctgaccctgctggtgcgctcgttcagctggccgggcgttgtcgtcgcttgttcgtcctaaccataacggtgcatgtaggtgtcgagagttttgtctccttgggaatgcacacaggtgcaaggtattgtaggcccgtcccatgaggatgcatggggttggtagtacaacatttttttttgtgatttagagacttgaactgctgcagttttcacatgaatgttatccctaaggacaaggcgggagagcgagtgtttctctatctccagaactgatcgcggcgtttattttctgtttccagttactgctccaactctttctgaatcttgctgaatttgagtaagcgcactgcgatc

SEQ ID NO: 22699 - DNA, 1790 bp, Zea Mays
aaccctctgttcttttcaaaacaaaaaaccaaaacccttctgtggaaaaacgtaaaaccaggcgcgccccgcaggaattgcggtcaggagaacctcatccctctcgccttcaggttctactcgccctctccccacccgcagcgcctcctcccattcccccaacggacattgcctaggaggctaggacagaaccacccagagcgcacaaccttacccgaatcgccgttgcatggaggccgtgcgcgcgtcggcggcgtgggtcgccagtcgctcctcccatgtcacggtcgaccttcaagaaattgagaaggtagtggaccaaatccaaggagatgttccaaaagttgagtgggattacgaaggaattcactactttgacaatgggccactcacagtccagtacctgttcgtcttggatgcactaaacttctgcttctggccagataaggacttgagctatgaccatttggcttctggactgaagtcagccttggagaaagacaaaaatgcccttgattcagatcgtctccagaattacactgggccccagctccgccaacttctgaactggccacgaccactgccaattgaggaggaaagagtacgccttctccacgaggttgggcaggaacttaaaagaagctttggaggtcaggctgctaatctagtgaagtctgctggaaactctgctgcgactcttattgaactgattactcgacattttcctggcacctacagtgaaagtgaaactggaatggcccatccacccactactactgtttgtctgcatatggatttatgttctgcctgctactttggatctgagagtcaggaaacagtgatgattgatgaactggtgcctcatctaggcatatgaacttcgtatgagctgggccattcaaaaccagatgattgtttccgggaccattcactctacaaggggcaccaggttttcctgtacaagagagcccagatctttgttgctgatttgtggggcgccttcaagggacaaaactatggcgagttccacgatatcaattccatcaccatatttgctgactacattgttccagcggtcctgagggagcttggagtacttaaatatggctcgaatctatcttgctccatcgactcgaacagtgagatagtgcctggaagcgaggaggaagtggagatacgcgcgtgctccatctatgcagtggagaagatgagggacctgatcagtaagaagtttggaaagcagcttctgagcatcgacattgatctctggctctggtcctgcggcgtgcagaacatggcgctgtcacatcaccgcaccctgtcgatttactactagacagggcagtggcggaggacggataaaaattttggtatggcttgagctatacctagccacaatggaccctccgcccctgagacaggcagtcagtcaggaagctgaccctgctggtgcgctcgttcagctggccgggcgttgtcgtcgcttgttcgtcctaaccataacggtgcatgtaggtgtcgagagttttgtctccttgggaatgcacacaggtgcaaggtattgtaggcccgtcccatgaggatgcatggggttggtagtacaacatttttttttgtgatttagagacttgaactgctgcagttttcacatgaatgttatccctaaggacaaggcgggagagcgagtgtttctctatctccagaactgatcgcggcgtttattttctgtttccagttactgctccaactctttctgaatcttgctgaatttgagtaagcgcactgcgatc

SEQ ID NO: 22700 - DNA, 2001 bp, Zea Mays
aaccctctgttcttttcaaaacaaaaaaccaaaacccttctgtggaaaaacgtaaaaccaggcgcgccccgcaggaattgcggtcaggagaacctcatccctctcgccttcaggttctactcgccctctccccacccgcagcgcctcctcccattcccccaacggacattgcctaggaggctaggacagaaccacccagagcgcacaaccttacccgaatcgccgttgcatggaggccgtgcgcgcgtcggcggcgtgggtcgccagtcgctcctcccatgtcacggtcgaccttcaagaaattgagaaggtagtggaccaaatccaaggagatgttccaaaagttgagtgggattacgaaggaattcactactttgacaatgggccactcacagtccagtacctgttcgtcttggatgcactaaacttctgcttctggccagataaggacttgagctatgaccatttggcttctggactgaagtcagccttggagaaagacaaaaatgcccttgattcagatcgtctccagaattacactggtatcttccttctcattgggatcttgttaggtttaagagttccttcattagcattttctgaacttctgcttctggttcaagggaatgcttctcagcttctatgataaactgtcgttttctggaaatgtcatttaactgtgtaggttgtggtaccagatgaatgaacagttacaagttgtgcttaactggatgttatctgatcctctcagtctgagtacccttttcatccctttattcttctgttgatagtgaaagggcctttaactgagttggtttctgttgataataataagctactcattttctaattttcttgctgtgcttctaattgagaaataattacttgcatctctgctatggatcctcataaaaactgctaatttggaaggacatttgcaaaatgtagggccccagctccgccaacttctgaactggccacgaccactgccaattgaggaggaaagagtacgccttctccacgaggaacttaaaagaagctttggaggtcaggctgctaatctagtgaagtctgctggaaactctgctgcgactcttattgaactgattactcgacattttcctggtttccgggaccattcactctacaaggggcaccaggttttcctgtacaagagagcccagatctttgttgctgatttgtggggcgccttcaagggacaaaactatggcgagttccacgatatcaattccatcaccatatttgctgactacattgttccagcggtcctgagggagcttggagtacttaaatatggctcgaatctatcttgctccatcgactcgaacagtgagatagtgcctggaagcgaggaggaagtggagatacgcgcgtgctccatctatgcagtggagaagatgagggacctgatcagtaagaagtttggaaagcagcttctgagcatcgacattgatctctggctctggtcctgcggcgtgcagaacatggcgctgtcacatcaccgcaccctgtcgatttactactagacagggcagtggcggaggacggataaaaattttggtatggcttgagctatacctagccacaatggaccctccgcccctgagacaggcagtcagtcaggaagctgaccctgctggtgcgctcgttcagctggccgggcgttgtcgtcgcttgttcgtcctaaccataacggtgcatgtaggtgtcgagagttttgtctccttgggaatgcacacaggtgcaaggtattgtaggcccgtcccatgaggatgcatggggttggtagtacaacatttttttttgtgatttagagacttgaactgctgcagttttcacatgaatgttatccctaaggacaaggcgggagagcgagtgtttctctatctccagaactgatcgcggcgtttattttctgtttccagttactgctccaactctttctgaatcttgctgaatttgagtaagcgcactgcgatc

SEQ ID NO: 22701 - DNA, 1847 bp, Zea Mays
aaccctctgttcttttcaaaacaaaaaaccaaaacccttctgtggaaaaacgtaaaaccaggcgcgccccgcaggaattgcggtcaggagaacctcatccctctcgccttcaggttctactcgccctctccccacccgcagcgcctcctcccattcccccaacggacattgcctaggaggctaggacagaaccacccagagcgcacaaccttacccgaatcgccgttgcatggaggccgtgcgcgcgtcggcggcgtgggtcgccagtcgctcctcccatgtcacggtcgaccttcaagaaattgagaaggtagtggaccaaatccaaggagatgttccaaaagttgagtgggattacgaaggaattcactactttgacaatgggccactcacagtccagtacctgttcgtcttggatgcactaaacttctgcttctggccagataaggacttgagctatgaccatttggcttctggactgaagtcagccttggagaaagacaaaaatgcccttgattcagatcgtctccagaattacactgggccccagctccgccaacttctgaactggccacgaccactgccaattgaggaggaaagagtacgccttctccacgaggttgggcaggaacttaaaagaagctttggaggtcaggctgctaatctagtgaagtctgctggaaactctgctgcgactcttattgaactgattactcgacattttcctggcacctacagtgaaagtgaaactggaatggcccatccacccactactactgtttgtctgcatatggatttatgttctgcctgctactttggatctgagagtcaggaaacagtgatgattgatgaactggtgcctcatctaggcatatgaacttcgtatgagctgggccattcaaaaccagatgattgtgaatatttgatgcttacacttacacccttacattttttcatttctcgtgcaaaacgtttccgggaccattcactctacaaggggcaccaggttttcctgtacaagagagcccagatctttgttgctgatttgtggggcgccttcaagggacaaaactatggcgagttccacgatatcaattccatcaccatatttgctgactacattgttccagcggtcctgagggagcttggagtacttaaatatggctcgaatctatcttgctccatcgactcgaacagtgagatagtgcctggaagcgaggaggaagtggagatacgcgcgtgctccatctatgcagtggagaagatgagggacctgatcagtaagaagtttggaaagcagcttctgagcatcgacattgatctctggctctggtcctgcggcgtgcagaacatggcgctgtcacatcaccgcaccctgtcgatttactactagacagggcagtggcggaggacggataaaaattttggtatggcttgagctatacctagccacaatggaccctccgcccctgagacaggcagtcagtcaggaagctgaccctgctggtgcgctcgttcagctggccgggcgttgtcgtcgcttgttcgtcctaaccataacggtgcatgtaggtgtcgagagttttgtctccttgggaatgcacacaggtgcaaggtattgtaggcccgtcccatgaggatgcatggggttggtagtacaacatttttttttgtgatttagagacttgaactgctgcagttttcacatgaatgttatccctaaggacaaggcgggagagcgagtgtttctctatctccagaactgatcgcggcgtttattttctgtttccagttactgctccaactctttctgaatcttgctgaatttgagtaagcgcactgcgatc

SEQ ID NO: 22702 - DNA, 2425 bp, Zea Mays
aaccctctgttcttttcaaaacaaaaaaccaaaacccttctgtggaaaaacgtaaaaccaggcgcgccccgcaggaattgcggtcaggagaacctcatccctctcgccttcaggttctactcgccctctccccacccgcagcgcctcctcccattcccccaacggacattgcctaggaggctaggacagaaccacccagagcgcacaaccttacccgaatcgccgttgcatggaggccgtgcgcgcgtcggcggcgtgggtcgccagtcgctcctcccatgtcacggtcgaccttcaagaaattgagaaggtagtggaccaaatccaaggagatgttccaaaagttgagtgggattacgaaggaattcactactttgacaatgggccactcacagtccagtacctgttcgtcttggatgcactaaacttctgcttctggccagataaggacttgagctatgaccatttggcttctggactgaagtcagccttggagaaagacaaaaatgcccttgattcagatcgtctccagaattacactgggccccagctccgccaacttctgaactggccacgaccactgccaattgaggaggaaagagtacgccttctccacgaggaacttaaaagaagctttggaggtcaggctgctaatctagtgaagtctgctggaaactctgctgcgactcttattgaactgattactcgacattttcctggcacctacagtgaaagtgaaactggaatggcccatccacccactactactgtttgtctgcatatggatttatgttctgcctgctactttggatctgagagtcaggaaacagtgatgattgatgaactggtgcctcatctaggcatatgaacttcgtatgagctgggccattcaaaaccagatgattgtgaatatttgatgcttacacttacacccttacattttttcatttctcgtgcaaaacgttagtggttttcattttttagcagttggccaagaaatctgttcacatgatttcacttgaagttaacatttattctcggtgttggtgctttcgttggatctccattgatttgagacattgaacatggagtttatttcctcaaagaagaacatgaaactgttcccgtagtgtttaactgattatacttgttcgacaaatatgtccagacatgagctaatcatctgaaattccagtgatttaggagtaattgatttcaggcttccagcacattattctatcatatatggacatatttgattgcacagataggttcactgacaaacatgtacaaatcttaactattcaaccggttagtctgaattcagaaacaaggaaggatgctagttttacccctgatctggccatagccaacttcagaatatttcacaattcgttcttcgatcattgaatttaaattgtaccttgcgctcttgcagggaattttagcatgtattgaatcttttgttaataggatagcgttgtgcaacttgatggtaccttttgctaacgttctatgaacacgtacatctgcatgcattcaaaaccaggtttccgggaccattcactctacaaggggcaccaggttttcctgtacaagagagcccagatctttgttgctgatttgtggggcgccttcaagggacaaaactatggcgagttccacgatatcaattccatcaccatatttgctgactacattgttccagcggtcctgagggagcttggagtacttaaatatggctcgaatctatcttgctccatcgactcgaacagtgagatagtgcctggaagcgaggaggaagtggagatacgcgcgtgctccatctatgcagtggagaagatgagggacctgatcagtaagaagtttggaaagcagcttctgagcatcgacattgatctctggctctggtcctgcggcgtgcagaacatggcgctgtcacatcaccgcaccctgtcgatttactactagacagggcagtggcggaggacggataaaaattttggtatggcttgagctatacctagccacaatggaccctccgcccctgagacaggcagtcagtcaggaagctgaccctgctggtgcgctcgttcagctggccgggcgttgtcgtcgcttgttcgtcctaaccataacggtgcatgtaggtgtcgagagttttgtctccttgggaatgcacacaggtgcaaggtattgtaggcccgtcccatgaggatgcatggggttggtagtacaacatttttttttgtgatttagagacttgaactgctgcagttttcacatgaatgttatccctaaggacaaggcgggagagcgagtgtttctctatctccagaactgatcgcggcgtttattttctgtttccagttactgctccaactctttctgaatcttgctgaatttgagtaagcgcactgcgatc

SEQ ID NO: 22703 - DNA, 1451 bp, Zea Mays
aaccctctgttcttttcaaaacaaaaaaccaaaacccttctgtggaaaaacgtaaaaccaggcgcgccccgcaggaattgcggtcaggagaacctcatccctctcgccttcaggttctactcgccctctccccacccgcagcgcctcctcccattcccccaacggacattgcctaggaggctaggacagaaccacccagagcgcacaaccttacccgaatcgccgttgcatggaggccgtgcgcgcgtcggcggcgtgggtcgccagtcgctcctcccatgtcacggtcgaccttcaagataaggacttgagctatgaccatttggcttctggactgaagtcagccttggagaaagacaaaaatgcccttgattcagatcgtctccagaattacactgggccccagctccgccaacttctgaactggccacgaccactgccaattgaggaggaaagagtacgccttctccacgaggaacttaaaagaagctttggaggtcaggctgctaatctagtgaagtctgctggaaactctgctgcgactcttattgaactgattactcgacattttcctggtttccgggaccattcactctacaaggggcaccaggttttcctgtacaagagagcccagatctttgttgctgatttgtggggcgccttcaagggacaaaactatggcgagttccacgatatcaattccatcaccatatttgctgactacattgttccagcggtcctgagggagcttggagtacttaaatatggctcgaatctatcttgctccatcgactcgaacagtgagatagtgcctggaagcgaggaggaagtggagatacgcgcgtgctccatctatgcagtggagaagatgagggacctgatcagtaagaagtttggaaagcagcttctgagcatcgacattgatctctggctctggtcctgcggcgtgcagaacatggcgctgtcacatcaccgcaccctgtcgatttactactagacagggcagtggcggaggacggataaaaattttggtatggcttgagctatacctagccacaatggaccctccgcccctgagacaggcagtcagtcaggaagctgaccctgctggtgcgctcgttcagctggccgggcgttgtcgtcgcttgttcgtcctaaccataacggtgcatgtaggtgtcgagagttttgtctccttgggaatgcacacaggtgcaaggtattgtaggcccgtcccatgaggatgcatggggttggtagtacaacatttttttttgtgatttagagacttgaactgctgcagttttcacatgaatgttatccctaaggacaaggcgggagagcgagtgtttctctatctccagaactgatcgcggcgtttattttctgtttccagttactgctccaactctttctgaatcttgctgaatttgagtaagcgcactgcgatc

SEQ ID NO: 22704 - DNA, 1851 bp, Zea Mays
aaccctctgttcttttcaaaacaaaaaaccaaaacccttctgtggaaaaacgtaaaaccaggcgcgccccgcaggaattgcggtcaggagaacctcatccctctcgccttcaggttctactcgccctctccccacccgcagcgcctcctcccattcccccaacggacattgcctaggaggctaggacagaaccacccagagcgcacaaccttacccgaatcgccgttgcatggaggccgtgcgcgcgtcggcggcgtgggtcgccagtcgctcctcccatgtcacggtcgaccttcaagaaattgagaaggtagtggaccaaatccaaggagatgttccaaaagttgagtgggattacgaaggaattcactactttgacaatgggccactcacagtccagtacctgttcgtcttggatgcactaaacttctgcttctggccagataaggacttgagctatgaccatttggcttctggactgaagtcagccttggagaaagacaaaaatgcccttgattcagatcgtctccagaattacactgggccccagctccgccaacttctgaactggccacgaccactgccaattgaggaggaaagagtacgccttctccacgaggttgggcaggaacttaaaagaagctttggaggtcaggctgctaatctagtgaagtctgctggaaactctgctgcgactcttattgaactgattactcgacattttcctggtttccgggaccattcactctacaaggggcaccaggttttcctgtacaagagagcccagatctttgttgctgatttgtggggcgccttcaagggacaaaactatggcgagttccacgatatcaattccatcaccatatttgctgactacattgttccagcggtcctgagggagcttggagtacttaaatatggctcgaatctatcttgctccatcgactcgaacagtgagatagtgcctggaagcgaggaggaagtggagatacgcgcgtgctccatctatgcagtggagaagatgagggacctgatcagtaagaagtttggaaagcaggtaggcgcatctgaaccagtttcgcctgactacctgagacttccattcattaggcatgccaatgccgtttgctttctgacctgcattctcggtgggccgatttacaaaaaaaaaaaaaaagaaattcactaatcttcatagccgttgaacttgaacgagttaaattaaccaactcataaagcagtcactcgatacgtgaggttcggctcggaactaacgccctcttggtctcgtgttttctcggcagcttctgagcatcgacattgatctctggctctggtcctgcggcgtgcagaacatggcgctgtcacatcaccgcaccctgtcgatttactactagacagggcagtggcggaggacggataaaaattttggtatggcttgagctatacctagccacaatggaccctccgcccctgagacaggcagtcagtcaggaagctgaccctgctggtgcgctcgttcagctggccgggcgttgtcgtcgcttgttcgtcctaaccataacggtgcatgtaggtgtcgagagttttgtctccttgggaatgcacacaggtgcaaggtattgtaggcccgtcccatgaggatgcatggggttggtagtacaacatttttttttgtgatttagagacttgaactgctgcagttttcacatgaatgttatccctaaggacaaggcgggagagcgagtgtttctctatctccagaactgatcgcggcgtttattttctgtttccagttactgctccaactctttctgaatcttgctgaatttgagtaagcgcactgcgatc

SEQ ID NO: 22705 - DNA, 845 bp, Zea Mays
ccaggttttcctgtacaagagagcccagatctttgttgctgatttgtggggcgccttcaagggacaaaactatggcgagttccacgatatcaattccatcaccatatttgctgactacattgttccagcggtcctgagggagcttggagtacttaaatatggctcgaatctatcttgctccatcgactcgaacagtgagatagtgcctggaagcgaggaggaagtggagatacgcgcgtgctccatctatgcagtggagaagatgagggacctgatcagtaagaagtttggaaagcagcttctgagcatcgacattgatctctggctctggtcctgcggcgtgcagaacatggcgctgtcacatcaccgcaccctgtcgatttactactagacagggcagtggcggaggacggataaaaattttggtatggcttgagctatacctagccacaatggaccctccgcccctgagacaggcagtcagtcaggaagctgaccctgctggtgcgctcgttcagctggccgggcgttgtcgtcgcttgttcgtcctaaccataacggtgcatgtaggtgtcgagagttttgtctccttgggaatgcacacaggtgcaaggtattgtaggcccgtcccatgaggatgcatggggttggtagtacaacatttttttttgtgatttagagacttgaactgctgcagttttcacatgaatgttatccctaaggacaaggcgggagagcgagtgtttctctatctccagaactgatcgcggcgtttattttctgtttccagttactgctccaactctttctgaatcttgctgaatttgagtaagcgcactgcgatc

SEQ ID NO: 22706 - DNA, 1122 bp, Zea Mays
ccgaccccgaccccgtggttagctcgtggtcacccacccgagaagggaagaccccagcccttgtttgcgctgcgcagtgctttatatatacccggggctccactactccagtgctggctggcgttgtatgagcgtgggtggtggcgccgccggccggggatgagctgcaacgggtgccgcatgctgcgcaaggggtgtagcgacgcgtgcgtgctgcggccgagcctgcagtggatcgacggcggcgccgaggcccagggccacgccaccgccttcgtcgccaagttcttcggccgcgccggcctcatgtccttgctcaccgccgtccccgagccgcagcgcccagtcgctgctgtacgaggcggccgggaggacgatcgacccggtgagcggcgccgtggggctgctcggcgcggggagctggcacctgtgccaggcggcggtggagacggtgctgcggggcggcgccatcgccccgctgcccgagtccgactccgacggggcccgccgcggcgcgtccgctgtggcggcgaggcgggccgtggggtgctcgacgttctcgacggcgaagcgcgcgccggcgagcgtgggggcgccgccggagccgtcgtgcgacctcgggctgtggctcagccccgggtcacccccggcgaccggggagcggcgccggcggcggcggcccggcacgccgtccatgacctccgaggagtccgtgacgacgatgagcggcggcggcggaggcggaggcggagggagggagcccgagctgctgaacctttttgtctgagaatggccgacggtttggctaaaagccagcggccgatcgtgccgtgcgcccctcggcgcgcggtgtggtgtgcttgatcccggcgagaaaaaaacgtttgtttgtctaggtagccgtcgtcttgtccttcttcctttttgggccgcgcgtagaaaccatgagcgtgccggcggcagcagcgctctcccagccgccgtccgttagctagctgtttatttcatttcttcccaactttttcttggcagaagcgacgctccgtccgtcgctgaataaaattgtagaccaagggtaaagcgaagtggcgctgcatgcgtcgatcttatcgtcatcacagc

SEQ ID NO: 22707 - DNA, 824 bp, Zea Mays
actggagccgaaccaaacaaaaccccacctgcaagtctcgctgcagccccacacgcactgacccacaccccccgcaccgctctctccccacccaggcacccagcctccacgccacagatctctctccctttcccccctctctctctctccgaactctaccccgcagtctcggccgcggccatggcggaggacgcccccaacgccgtcgccgagggcagccagcccgcggcctccgagggatccgccgacgccgccctgccggctgccgcgggcgccaaggccgcggaggcgctgctcccgtcgctcagtatctggccgccgtcgcagcgcacgcgcgacgccgtggtgcgccgcctcgtgcagacgctcgcggcgcccagcgtcctctcccagcgctacggtgccgtcccggagcccgaggccgagcgcgccgccgtggccgtcgaggccgaggccttcgccgccgcctccaagtccgccgccgccgccgccgagtgcccggcctccgtcgaggaggggatagaggagtaaggcgtcggaccgcgctttgatccaccgacaattgctgttattttggcatttcgtcggaatgttatttatcgtcccccctgcctatgtttactagtacatcattatctatctatctattagagatgagatgcttgtgacaagagggactgatgtttgtttcatggatatgatattctcgaatatttatcgctagtttatttttaactaaaccgtgacaataaaaaaacggagggagtaatattgaattattatatatcaaccgtgcatcctttcgacgagctaattgttcttgt

SEQ ID NO: 22708 - DNA, 1409 bp, Zea Mays
ctggaccctgccccgtcacggccccgcgtggatggtcggttctgcccctggccccctcgcggcgcacgcacccgtctggtggccggcctatctggtgcggtgcggcgcggctcgatccggcccgacgattccgatcccctcccgtcccgtccatcccgtctcgtctcgcctcgccctccacgccggcgaccggagaaggggccgtgcagcgcaggcgacgcccacaacgaatccgtccccccgcgccggcttcgcccagccccgcggcgacgcaccaggattgaaggaggcatgagaaggtggacatcattgctatagcgatttgattactggagatggtgttggtggtaaagcagcaccgctgcacacactctgcgagctgcgtttgcatcaagggccacctcagtgaggatgctctgttcctcgtcttccgccacatgaactggaacccgaggctgattgctatcttgtcgtgtgtgtgcaagtggtttgacgaggttgccaagcaggtgctgtggaaggagttctgtcatgcaagggctccaaagatgatgctggatttgcattcaggtggcagccacattgttgatgggaactggaaggcactggggaagctgctcatctattgcaatggctgcacaaaaggggggctgtttaataacattcacgttccaggccattttgtgttcaggacacgcttttctaggactgcgggcaggagtttcctgcctctgccatgtaagtcggatgtcctgtatgtgtcagatccatgcgagcatcttgatcagggggaagaaggcgacataggtttcttccgaggcatctttatgtcatttgccacttcaagggtaaagaagatgttgattgagaagcgggcgaggtttcatccaagggagttgtgcccttattgtaaggccaagctatggaacatgtttcaggaaaatatgatcccaaggagtgcttccgcaaggctgggtgcctatgatgactctgtggagtattttgtatgcctgaatggacatgttattggactcggtaccctactaccactctcagactcagaggaggcagcagatgagtgatcatcaagaacatgaatcagataatgacattggttctgcaaactgttgcacgacaggaacctgtgatgggatctgcatcgaactgcagctgtgttcttcagggggtgccttgcatcagattgaaaaaaagagctactttatagtgcctctcctttatttattgatatgtcattacttgtttttgtaactgcaatcaagatactgggacgctacccgcttgcctgtttagacatgttcacatcatgtgtagtgaggtgttttatttaacgagatgttaaatttgtgctcatgatattcatgtgctgttatctttactgtgtgccgttt

SEQ ID NO: 22709 - DNA, 1427 bp, Zea Mays
ggttctgcccctggccccctcgcggcgcacgcacccgtctggtggccggcctatctggtgcggtgcggcgcggctcgatccggcccgacgattccgatcccctcccgtcccgtccatcccgtctcgtctcgcctcgccctccacgccggcgaccggagaaggggccgtgcagcgcaggcgacgcccacaacgaatccgtccccccgcgccggcttcgcccagccccgcggcgacgcaccaggattgaaggaggcatgagaaggtggacatcattgctatagcgatttgattactggagatggtgttggtggtaaagcagcaccgctgcacacactctgcgagctgcgtttgcatcaagggccacctcagtgaggatgctctgttcctcgtcttccgccacatgaactggaacccgaggctgattgctatcttgtcgtgtgtgtgcaagtggtttgacgaggttgccaagcaggtgctgtggaaggagttctgtcatgcaagggctccaaagatgatgctggatttgcattcaggtggcagccacattgttgatgggaactggaaggcactggggaagctgctcatctattgcaatggctgcacaaaaggggggctgtttaataacattcacgttccaggccattttgtgttcaggacacgcttttctaggactgcgggcaggagtttcctgcctctgccatgtaagtcggatgtcctgtatgtgtcagatccatgcgagcatcttgatcagggggaagaaggcgacataggtttcttccgaggcatctttatgtcatttgccacttcaagggtaaagaagatgttgattgagaagcgggcgaggtttcatccaagggagttgtgcccttattgtaaggccaagctatggaacatgtttcaggaaaatatgatcccaaggagtgcttccgcaaggctgggtgcctatgatgactctgtggagtattttgtatgcctgaatggacatgttattggactcggtaccctactaccactctcagactcagaggaggcagcagatgagtgatcatcaagaacatgaatcagaagattgaagcccagggcttgtgaaatggtactgaatcttggttgtgactagcagataatgacattggttctgcaaactgttgcacgacaggaacctgtgatgggatctgcatcgaactgcagctgtgttcttcagggggtgccttgcatcagattgaaaaaaagagctactttatagtgcctctcctttatttattgatatgtcattacttgtttttgtaactgcaatcaagatactgggacgctacccgcttgcctgtttagacatgttcacatcatgtgtagtgaggtgttttatttaacgagatgttaaatttgtgctcatgatattcatgtgctgttatctttactgtgtgccgttt

SEQ ID NO: 22710 - DNA, 2529 bp, Zea Mays
ccgcatatcgacatacgtcgtcagttcgtcacgtgccgctacgccggcatcgcagctcgtagtccaccatgggtccacgccaccaccgcacttcgcagtccgcagccgcaccatccgtccacctccaccccaactccgacgcctagccagccacctgcggctctgctagattgcctcgcccgctcaggtgctctctgctcagcaactcgcgccccgtcgctcaggtgctcagcttgtcgcgcgcccacgcctcactggtcacccgcccgtcgtgggctcgtcaccaactcaccatggaggcccaagatccggtgtcgcagactcgcaggcacacgaaggacgtctgccaggactgccacctcgacgaagttcttgttctggatcagtgagcaagcgcacaaagaccctagcttccaagaagatgacgatgatggcaagtagtacatgtgcatcgtcggcatcgcaagtatccatagaaaagcaactcgatgttgtgatggagatggaggggcaaggggaggagcacgcatgggagattttgttgacggaatcagagaacagtaactttgatcttgacgatgagagtctaccttcagccgatggagatgagttgtcaaagactgagaagacaaagaggtcgacagtaggtactcgggtatccccctccaaatgcaaggtgaatagagtaaagagggctggttgttggaagtattttaaggtggtcaatgttgcatctagaaaggaacttggagttatggagacaaaagccaagtgcaagttatgttataggtcttatctataccatcaagggggagtactacaacactgaaccgacatctaggcaagtgcacacagtatttgaacaacctggcacgggctaagaaaaaacttgctcaaagtactatcccctttactttcaatggtggagttgttgttgttaatcccactgaatatgatcatgagcacactagacttttgattgccaagatggtaattgtccattattatgcatttagaatggtcgagcataaatggttcaatatcttgatgaaatgaatgaataacaactataaacccattggaatgaagactattaaaaatgaatgcatgaaggtttatgaatccgagaaagaactgatgaagaagagtcttagagaggctgaatcaataagtttaactactgatttatggacatcaaatcaaaatattcagtatatgtgtttggtggcccattctgttgattggattttgcaatgtcgtgttctgcattttattgaattggagggatcctccacacactgatattgtcattgctcaggctatttttgaatgtttggttgaatggaaaatagaggataagatcttgacaatcactcttgataatgcttccaacaatgattccactattacaaatttgaagtccaagcttcttgctaggaagaactcaacctttaaccatgtttattttcatgtccgttgtgctgcccacatagtcaatttggtagtgaatgatggattgcagccaattgactctttgataggtgatattagaaacaaagtgaagttctttaagaggtctccaacccgtatgtacaagtttgtagaagtttgcaaccaatattctgtgaaagtaggacaaggattatgccttgatgtgaaaacaaggtggagttcaacatacaaaatgctagattcttgccttgactataaggatgcctttggttagtattctgaagtagacaatagctatgaatggaaaccatcacactctcagtggcttttgtatgacaaaatcagaccaatattgggaacaatggcataagcaactactgctttttcagcatccagttttagcaccggggtaggatccttgatgattacatgagttcattgaagccaacgactgttcaggctttggtgtgtgcttctagttggatatgtgggtctcgaggttcacctattattgtaattgtaagtgtgtgccatcaatatttgtaagtgtgcggtggcaacattttcggctatgttaaacttacttttaacattttttgcggggaaaaggtgatgacagtgacatcgattctatggaatttccaaagtgtgtggtggtaagtaattagacatttggtgacaaggacacaaaggagaatagagatggaggagagctgggagagaagacatgaacataggacatatgagattaatttggtctagttggttgtatgcctgtagcttttgtaatattttggctataacgtgtggcatattttattgtatgttaagggtgtaactttgtcaagatactcctaactcctgctactccacttttcactagttgctgctagcttgctataacatatgtgggttgtggctagttggtgcaatggtgctactgctacttgttgttagtctgctacgcagcagaggcacacttatgtctatcagtttgtgaattgtgattggaacttggaagtatgcaatcatggggtacttatatttatcaatttgtgaattgtgattgaaacttgg

SEQ ID NO: 22711 - DNA, 2429 bp, Zea Mays
ccgcatatcgacatacgtcgtcagttcgtcacgtgccgctacgccggcatcgcagctcgtagtccaccatgggtccacgccaccaccgcacttcgcagtccgcagccgcaccatccgtccacctccaccccaactccgacgcctagccagccacctgcggctctgctagattgcctcgcccgctcaggtgctctctgctcagcaactcgcgccccgtcgctcaggtgctcagcttgtcgcgcgcccacgcctcactggtcacccgcccgtcgtgggctcgtcaccaactcaccatggaggcccaagatccggtgtcgcagactcgcaggcacacgaaggacgtctgccaggactgccacctcgacgaagttcttgttctggatcagtgagcaagcgcacaaagaccctagcttccaagaagatgacgatgatggcaagtagtacatgtgcatcgtcggcatcgcaagtatccatagaaaagcaactcgatgttgtgatggagatggaggggcaaggggaggagcacgcatgggagattttgttgacggaatcagagaacagtaactttgatcttgacgatgagagtctaccttcagccgatggagatgagttgtcaaagactgagaagacaaagaggtcgacagtaggtactcgggtatccccctccaaatgcaaggtgaatagagtaaagagggctggttgttggaagtattttaaggtggtcaatgttgcatctagaaaggaacttggagttatggagacaaaagccaagtgcaagttatgttataggtcttatctataccatcaagggggagtactacaacactgaaccgacatctaggcaagtgcacacagtatttgaacaacctggcacgggctaagaaaaaacttgctcaaagtactatcccctttactttcaatggtggagttgttgttgttaatcccactgaatatgatcatgagcacactagacttttgattgccaagatggtaattgtccattattatgcatttagaatggtcgagcataaatggttcaatatcttgatgaaatgaatgaataacaactataaacccattggaatgaagactattaaaaatgaatgcatgaaggtttatgaatccgagaaagaactgatgaagaagagtcttagagaggctgaatcaataagtttaactactgatttatggacatcaaatcaaaatattcagtatatgtgtttggtggcccattctgttgattggattttgcaatgtcgtgttctgcattttattgaattggagggatcctccacacactgatattgtcattgctcaggctatttttgaatgtttggttgaatggaaaatagaggataagatcttgacaatcactcttgataatgcttccaacaatgattccactattacaaatttgaagtccaagcttcttgctaggaagaactcaacctttaaccatgtttattttcatgtccgttgtgctgcccacatagtcaatttggtagtgaatgatggattgcagccaattgactctttgataggtgatattagaaacaaagtgaagttctttaagaggtctccaacccgtatgtacaagtttgtagaagtttgcaaccaatattctgtgaaagtaggacaaggattatgccttgatgtgaaaacaaggtggagttcaacatacaaaatgctagattcttgccttgactataaggatgcctttggttagtattctgaagtagacaatagctatgaatggaaaccatcacactctcagtggcttttgtatgacaaaatcagaccaatattgggaacaatggcataagcaactactgctttttcagcatccagttttagcaccggggtaggatccttgatgattacatgagttcattgaagccaacgactgttcaggctttggtgtgtgcttctagttggatatgtgggtctcgaggttcacctattattgtaattgtgatgacagtgacatcgattctatggaatttccaaagtgtgtggtgagacatttggtgacaaggacacaaaggagaatagagatggaggagagctgggagagaagacatgaacataggacatatgagattaatttggtctagttggttgtatgcctgtagcttttgtaatattttggctataacgtgtggcatattttattgtatgttaagggtgtaactttgtcaagatactcctaactcctgctactccacttttcactagttgctgctagcttgctataacatatgtgggttgtggctagttggtgcaatggtgctactgctacttgttgttagtctgctacgcagcagaggcacacttatgtctatcagtttgtgaattgtgattggaacttggaagtatgcaatcatggggtacttatatttatcaatttgtgaattgtgattgaaacttgg

SEQ ID NO: 22712 - DNA, 2476 bp, Zea Mays
atgcatgactgtgactatggctacttggcttattacgctactaggtacgtgctcgtgcgatgccacggaacacaaattgacgagcctccaataactcaggacggtggcgacgggcaacgtgagtacaatgatgatgatgaggcaccagtttccatcggtgaagatgacactgaatctagtttgctacttaacttcctttctcaattgaaagaagaaaaggcgatgcagtctgccaagttatcggtagagcttggaagcttacaaacagatatcacagaggttgataaaagacactcagcaagaatgaggttgagcttagatgatacagatgtactaccaagttctagtgctttgtcaggagcttctgtgagtgcccttcaaggtgcattgttgtcaggtttgttaccagcgtcatacaagtcgagcatttatgaggagagggtaatgaggaatttggtgcagcttgaaaatgcatactactccatgaggtcctctctggacacctatgaaactaatgtaatcaaacggccagatatctcatgtagaagtggcagttcttgaagtcttgcctctttcttccctagatcttcaagtcttgttgcaatcagtccttgctgttatatcatgaatatcacaatcttttcgatccgataagaaaaattacatgagatcatctgatgggcgtgtaatatattcatttattaactgaaatgactatatggaattgttggtgggaggattgtggaatatacctcgtcatcaagaaggcttgagaacttgaaaacatgttggtcgtcgccttctcgggtctgctccgagtattcctttactcttcgaataaagcatgaaatgaagtatacaagagcaattcagtttcagtgaactgaagtgtatggagcctcatttattcactctaaaatgtctttgttcagtgaatgaaaaactctaaaaagtgcatgcatgcgcgtggagtcaagatcgatatttgtctgggattcatgatgggcaatgaatggacaaacatactcgatttggcagctgaattatttatgtgatcaattgcctgaatatacaaaagagtacagttaagaaatttgtttgccagcatatggattcggcagtattcataatctcaaagatagagaatagcaaatgcttctcaaaaataggaagcaaacatagaagagcaaaaacagatatgcaataagatgctgcaataaacatgatttttgaaggattgtaaaacatgtagagaaaatgagtagagaaatcaaaagaaaccaacaagcagttatcttttcactgttttctgaagagcgtgggcgatatcctggagagcgtgggcgaggatcgagagcaagaccgattaccccgtcgatggaaacctcaatcagatccatgtgagcagataggaccgtgggcgaggacagattacccagatccatggagagtgtgggcgaggattgagagcgagggtcgcgatctgggtcgcgtcagcagggattgcgtgagagaggagagtggatctggggggaggtcgcgccttccatggacgacggagccgcgaagattgggatgtcgcggacgagccttacatggagagtcggggcgacgatctggggtgcggtcgcggggtattcgagattcgcggcccggccaccacgcgccctccatggagagcgacgatctggggcgattagagaggagatcggtggtggctgctggctgggatttgcgaccgcttggtgtgcgggagagagaggagagtggggcggcgatctggggcgaggggagagaagatgcaccacaatttcagtttggataagggaaaaagaaaaaccacctgacaacacgggctagatcccgaagagcacgatggtcccaacgagcagcggacacaggtcagtgacggtgcacgagacgaccttgtcgccggtgaagatgtagctgagcttgtccctgagcaggaacgtgacgagtacaactatccctgaaacgaatatcgacagggtgagatttgaggctggagcgagggacgaggatggccatggagccgagatgccgggatctggaggaagcgtagctagggtttaattgagcagggtgcggttgagcgagattggagggcggaagagagcggcgcgcagacgcgagattggcgggcggtagagagcgacgcgtagacgaaccttccattaacagctcggaggcggaccttccccgacccaaatcgaatatgcgtggtcctcaccgcgcgccattacaggagagggaggacgcgagaacgacggggcgagggcgagggcggagggccgcggacgcgctgatggcatgaggtgaggaggcgagatggatggggtagcggaggggagcgcggggatgggatcagcggctgcgcgctgggagttgcgcgagatccacgcttggcgtgctggcgggggcgggattgcagggaagggacggcgctggcgggggc

SEQ ID NO: 22713 - DNA, 1789 bp, Zea Mays
catgtggttctcttctctctcctatcggtttttaactttgcttccatgcatggattcctcctcccccaactccccaaggccccaaccgcacccgtcgccccaacaaaacctccgagcagatcacgacctccgctagcttcgtcatcccgcttaaccacaccacaccatcctacctttcctcacctctcactctttcagcactctgcttgcctaacgcttgctccccccacctcccactcccagatcgcgccgcggatcctcctcgcgatcgcgtcctgaactcctgatggctaccaggtcggtttcctgatccctcgatcctcaatcagtttcacggcttctcgcttattgatggatgtcgtggagctcgatgcggcgaggcatggatgcaaggtctgcggaaaaagcttcctgtccggccggtcgctcggaggacatatgagatcgcacatctcgctcggcgaggcagcgctggaggttcacgccgccgacgagctgacgcctgtttcgtcgaatggtggccggggctgtgacggactggtcgcgtacgggctgagggagaatcccaggaagactcggcgcctatccgactttgctgacgagaaggatgtcggccatggcgttgagtgcgggaagtcgtggaagtctttgttcggccacatacgcaatcatgcgtccggcgacaggtatcacgacgtcgacgacgacgaggacgtggaagaggatgaattctctgtagaggagggggaagcagaggaagcagaaatggtgaagccgacggaggcgcctgtggcggctctgacggtgctgtcggcgtcccctaggcggaggcgccgatcgatgcgcgtggcggctccgccgccgcgggtgctgagtgggctcgagaaagagactgaagacgtcgcgctctgtctactgatgctctcgcgcgacaccggtatgtgtagctcgccggccaagaacgagactttggagagcgcaaagaagatcaagatcaagatcaagggcggcgtcgccaagaacaggaagcgagcttcccggaagaatcaacacgatcccgtgcccgtggcgccgaagcggacccggtacgagtgtccgggatgccgcaaactgttcagctcgtatcaggcgctcggcggccatcgcgcgagccacaagcgcatgaacgccagctgcagctcccctaagaataagatcactcccgccgcgtcctccgcgccgccggagccaagcaccgagacgtacacgtcgttcaacacgatgtccccctccgcgtcaccggactcggtggccatcggcttcggcaagcccaaggacgacgaggcggtgcccgacgcggagttggagcacaagcggtcgcatctgatgtcctgcgagtccaacggcgtcgatctctactatgtcgccggcgccggcgcagaccatcaggagcagcattcagcagtcgccgacgggttacttgatctcaacttcccaccggctgcagcggaggagacctgaaccaagtttgccgcgaagtgatgaatgtggggctctgtacagattcatccaattcaatttatttttttcccccaagcttaccaagggagtcttgaagcaggagtcgggttttctatcaggttggtgaggatgatcgaaagctgactgaaggaagtagtttgttttctattgctattgggaatcacgaaaaaactatagtgatgtgctcctcgttaggttctaggataacttcaattcccactttattttttaagaactatctaggctggccagtcataggttagagagc

SEQ ID NO: 22714 - DNA, 3018 bp, Zea Mays
cttaaccacaccacaccatcctacctttcctcacctctcactctttcagcactctgcttgcctaacgcttgctccccccacctcccactcccagatcgcgccgcggatcctcctcgcgatcgcgtcctgaactcctgatggctaccaggtcggtttcctgatccctcgatcctcaatcagtttcacggcttctcgcttattgatggatgtcgtggagctcgatgcggcgaggcatggatgcaaggtctgcggaaaaagcttcctgtccggccggtcgctcggaggacatatgagatcgcacatctcgctcggcgaggcagcgctggaggttcacgccgccgacgagctgacgcctgtttcgtcgaatggtggccggggctgtgacggactggtcgcgtacgggctgagggagaatcccaggaagactcggcgcctatccgactttgctgacgagaaggatgtcggccatggcgttgagtgcgggaagtcgtggaagtctttgttcggccacatacgcaatcatgcgtccggcgacaggtatcacgacgtcgacgacgacgaggacgtggaagaggatgaattctctgtagaggagggggaagcagaggaagcagaaatggtgaagccgacggaggcgcctgtggcggctctgacggtgctgtcggcgtcccctaggcggaggcgccgatcgatgcgcgtggcggctccgccgccgcgggtgctgagtgggctcgagaaagagactgaagacgtcgcgctctgtctactgatgctctcgcgcgacaccggtatgtgtagctcgccggccaagaacgagactttggagagcgcaaagaagatcaagatcaagatcaagggcggcgtcgccaagaacaggaagcgagcttcccggaagaatcaacacgatcccgtgcccgtggcgccgaagcggacccggtacgagtgtccgggatgccgcaaactgttcagctcgtatcaggcgctcggcggccatcgcgcgagccacaagcgcatgaacgccagctgcagctcccctaagaataagatcactcccgccgcgtcctccgcgccgccggagccaagcaccgagacgtacacgtcgttcaacacgatgtccccctccgcgtcaccggactcggtggccatcggcttcggcaagcccaaggacgacgaggcggtgcccgacgcggagttggagcacaagcggtcgcatctgatgtcctgcgagtccaacggcgtcgatctctactatgtcgccggcgccggcgcagaccatcaggagcagcattcagcagtcgccgacgggttacttgatctcaacttcccaccggctgcagcggaggagacctgaaccaagtttgccgcgaagtgatgaatgtggggctctgtacagattcatccaattcaatttatttttttcccccaagcttaccaagggagtcttgaagcaggagtcgggttttctatcaggatgctgcaaacaggaacatttccagacgatgaatcctacaatttggttgtaggcctgcttatcagacagaacctcgtcgattcatctctgaagtatttggatctgatgcttaaatcgggctacacgttatcactaactgttttcacagattatatccgagcatgtatgagatctgggaggttggacacgttgacatcaattatagagaaatgcaagacaactgataagaacaaagtcttgtgtccggaatggacttggtgcattgacatagcagatgctgcatttgaagctaacaacagcaaattagctctttttgctttggaatatcttgcaagatggattgctcgtggtgagaatgttaaacctcctgttcagctgtcagttaatgaaggtcttgtaatatcagctctgagtgctgctggcagaacttataatactgacctcttgaatgctgcttggtcgctattacggaaatccctgcgccagaaaagggcacccaccccagagacatatcttgccaagatctatgctcattcatcaattggccagcttcaaagggcttttggtacattgcgtgaatttgaaaatgcctatgggaactctgaggacattgatttagagctcttctcaccatttacttctttgcatcctcttgttgttgcttgctgcaaagatggctttagcacattggattcggtgtatggtcagttggagaatctgatacatgctgatccaccgtacaaatctcttgctgctctcaactgtgttgtattggggtgtgcaaacatttgggatattaatcgagcttatgaaacttttgtggctattaaggaaaaatttgacctcactccagacattcattcatacaatgctcttctgtgtgcatttgggaagttgaaacagacaggagaagcatgtaatgtgttccagcatgtattaactcttggtgttaagccaaatgcaacgacatactccttgcttgtcgatgcccatcttgcaaacaaagatccaaaagctgctcttgccataattgatgagatggttgatgctggcttcactccttccaaggataccctcaggaaggttcgaagacggtgctctcgtgaatcagacttcgacagtgacgagaaagtccagtccctggcaaagcagttcaactaccgaatgggtggtgagaaccgtagagagatgctttatagcatagaatacaatcctgtgtactgaaacattgctactgagtttgctagccattgggagagcacagacattgcagcttgtaaattacttggatgtaccaggattcttaagcaaattttcagtttctcgatcatcatttgtgctcgcagggttcgttttaggacttgctaataagatgacactttgagtctgtttggttgtcaggaccagcatatcctggtcaaagcccagatgcaggctgggcatagcctgcatgcattcgtgcaaatcaaaacaactctacttgtttggttgtttgtccacaattaaccaggatcagcagagcctctgtttggtttactgttttgttg

SEQ ID NO: 22715 - DNA, 2018 bp, Zea Mays
ggacaatccggtgtgcaccgaacagccgggtggttgtacgacacaaactcttcgggcctcgggatcttgcgcttaaaatcaccaatagtccgggttcatcagtggacaatctggtgtgaccagaggcaatggctaccttgcggctaggctcgtctgcaacggtcgactaggaggattggatagtccggtacccggaccggacagcccggtgccccgccctcgaagtgaaaagcagacaatcaacgatctgatgatcgttgcactgtgaactgtctggtgcacccgcagacagggcaagttgtggcttccatttggagaagccaacggctcctaggccccttggagctataaaaaggacccctaggcgccttgaagcagtacccttgcatctcaagagctacgcatcattctgatacgctgggaccacgcttttgagtgattcaggatagatttgagcgttgttttgagttgatgctgcaaacaggaacatttccagacgatgaatcctacaatttggttgtaggcctgcttatcagacagaacctcgtcgattcatctctgaagtatttggatctgatgcttaaatcgggctacacgttatcactaactgttttcacagattatatccgagcatgtatgagatctgggaggttggacacgttgacatcaattatagagaaatgcaagacaactgataagaacaaagtcttgtgtccggaatggacttggtgcattgacatagcagatgctgcatttgaagctaacaacagcaaattagctctttttgctttggaatatcttgcaagatggattgctcgtggtgagaatgttaaacctcctgttcagctgtcagttaatgaaggtcttgtaatatcagctctgagtgctgctggcagaacttataatactgacctcttgaatgctgcttggtcgctattacggaaatccctgcgccagaaaagggcacccaccccagagacatatcttgccaagatctatgctcattcatcaattggccagcttcaaagggcttttggtacattgcgtgaatttgaaaatgcctatgggaactctgaggacattgatttagagctcttctcaccatttacttctttgcatcctcttgttgttgcttgctgcaaagatggctttagcacattggattcggtgtatggtcagttggagaatctgatacatgctgatccaccgtacaaatctcttgctgctctcaactgtgttgtattggggtgtgcaaacatttgggatattaatcgagcttatgaaacttttgtggctattaaggaaaaatttgacctcactccagacattcattcatacaatgctcttctgtgtgcatttgggaagttgaaacagacaggagaagcatgtaatgtgttccagcatgtattaactcttggtgttaagccaaatgcaacgacatactccttgcttgtcgatgcccatcttgcaaacaaagatccaaaagctgctcttgccataattgatgagatggttgatgctggcttcactccttccaaggataccctcaggaaggttcgaagacggtgctctcgtgaatcagacttcgacagtgacgagaaagtccagtccctggcaaagcagttcaactaccgaatgggtggtgagaaccgtagagagatgctttatagcatagaatacaatcctgtgtactgaaacattgctactgagtttgctagccattgggagagcacagacattgcagcttgtaaattacttggatgtaccaggattcttaagcaaattttcagtttctcgatcatcatttgtgctcgcagggttcgttttaggacttgctaataagatgacactttgagtctgtttggttgtcaggaccagcatatcctggtcaaagcccagatgcaggctgggcatagcctgcatgcattcgtgcaaatcaaaacaactctacttgtttggttgtttgtccacaattaaccaggatcagcagagcctctgtttggtttactgttttgttg

SEQ ID NO: 22716 - DNA, 2551 bp, Zea Mays
gctaaaagggactaaagagcaacatttactctaattacccttgctagaaaattagtatcaaacaaaaaaaagggcattttagtctttatgtgttgtatttaatatatttagaatctgtttagtccctacagccaaacagagtatggactaaaatttaatctctgaactaaactttagtcctagaactaatgaaaccaaacaagtccttaatatatgcaacatataaactaaactgtcatggacatccgatatgttgtcttcctgacctcatcacgcccgctcatctcaaagatctcagccgccgtcgtctccgtcgctccgccgcacctccccccatcaccgcctctctaaaaccctaatccctagccgccatggcggctgttgcggcggccacctcgcacctcctacgccaccaccgcaacccccaccttctcctcctccgcgcagcgatctcatcctcccgtgctttgccccagcagccggagctgtcccccgacccgaccgccggcacccccgacctcgccggcgcggccccactccctccaaaccccagcacggggagccccttctacacccagaactggcgcaacccagccgccgccaacccgccctcctcgcttctgcccaccgtcgtcgccggcagccccttcggggcgcagcacttcatggccgccttctacgatgcacccgacgtcacggggctcaaggagacgttcgccaagtatatggcggagcagcggtgggaagacatgaagcatctgttcgaccactgggtgcgctccctcgacgccgccacggggaagcccaaccaccccgacgtcgacctcttcaatcactacctccgcgccaacctcatgaccagggccctgccgcacgagatgctcgatctcgctgaccacatgctcgagttcgagctccaacccaacgctgcatcgtacaacctcgtgctcaagagcatggtcgccagccaggagaccgagggcgccgagaagctcattgaacggatgctgcaaacaggaacatttccagacgatgaatcctacaatttggttgtaggcctgcttatcagacagaacctcgtcgattcatctctgaagtatttggatctgatgcttaaatcgggctacacgttatcactaactgttttcacagattatatccgagcatgtatgagatctgggaggttggacacgttgacatcaattatagagaaatgcaagacaactgataagaacaaagtcttgtgtccggaatggacttggtgcattgacatagcagatgctgcatttgaagctaacaacagcaaattagctctttttgctttggaatatcttgcaagatggattgctcgtggtgagaatgttaaacctcctgttcagctgtcagttaatgaaggtcttgtaatatcagctctgagtgctgctggcagaacttataatactgacctcttgaatgctgcttggtcgctattacggaaatccctgcgccagaaaagggcacccaccccagagacatatcttgccaagatctatgctcattcatcaattggccagcttcaaagggcttttggtacattgcgtgaatttgaaaatgcctatgggaactctgaggacattgatttagagctcttctcaccatttacttctttgcatcctcttgttgttgcttgctgcaaagatggctttagcacattggattcggtgtatggtcagttggagaatctgatacatgctgatccaccgtacaaatctcttgctgctctcaactgtgttgtattggggtgtgcaaacatttgggatattaatcgagcttatgaaacttttgtggctattaaggaaaaatttgacctcactccagacattcattcatacaatgctcttctgtgtgcatttgggaagttgaaacagacaggagaagcatgtaatgtgttccagcatgtattaactcttggtgttaagccaaatgcaacgacatactccttgcttgtcgatgcccatcttgcaaacaaagatccaaaagctgctcttgccataattgatgagatggttgatgctggcttcactccttccaaggataccctcaggaaggttcgaagacggtgctctcgtgaatcagacttcgacagtgacgagaaagtccagtccctggcaaagcagttcaactaccgaatgggtggtgagaaccgtagagagatgctttatagcatagaatacaatcctgtgtactgaaacattgctactgagtttgctagccattgggagagcacagacattgcagcttgtaaattacttggatgtaccaggattcttaagcaaattttcagtttctcgatcatcatttgtgctcgcagggttcgttttaggacttgctaataagatgacactttgagtctgtttggttgtcaggaccagcatatcctggtcaaagcccagatgcaggctgggcatagcctgcatgcattcgtgcaaatcaaaacaactctacttgtttggttgtttgtccacaattaaccaggatcagcagagcctctgtttggtttactgttttgttg

SEQ ID NO: 22717 - DNA, 2995 bp, Zea Mays
cctcatcacgcccgctcatctcaaagatctcagccgccgtcgtctccgtcgctccgccgcacctccccccatcaccgcctctctaaaaccctaatccctagccgccatggcggctgttgcggcggccacctcgcacctcctacgccaccaccgcaacccccaccttctcctcctccgcgcagcgatctcatcctcccgtgctttgccccagcagccggagctgtcccccgacccgaccgccggcacccccgacctcgccggcgcggccccactccctccaaaccccagcacggggagccccttctacacccagaactggcgcaacccagccgccgccaacccgccctcctcgcttctgcccaccgtcgtcgccggcagccccttcggggcgcagcacttcatggccgccttctacgatgcacccgacgtcacggggctcaaggagacgttcgccaagtatatggcggagcagcggtgggaagacatgaagcatctgttcgaccactgggtgcgctccctcgacgccgccacggggaagcccaaccaccccgacgtcgacctcttcaatcactacctccgcgccaacctcatgaccagggccctgccgcacgagatgctcgatctcgctgaccacatgctcgagttcgagctccaacccaacgctgcatcgtacaacctcgtgctcaagagcatggtcgccagccaggagaccgagggcgccgagaagctcattgaacggatgctgcaaacaggaacatttccagacgatgaatcctacaatttggttgtaggcctgcttatcagacagaacctcgtcgattcatctctgaagtatttggatctgatgcttaaatcgggctacacgttatcactaactgttttcacagattatatccgagcatgtatgagatctgggaggttggacacgttgacatcaattatagagaaatgcaagacaactgataagaacaaagtcttgtgtccggaatggacttggtgcattgacatagcagatgctgcatttgaagctaacaacagcaaattagctctttttgctttggaatatcttgcaagatggattgctcgtggtgagaatgttaaacctcctgttcagctgtcagttaatgaaggtcttgtaatatcagctctgagtgctgctggcagaacttataatactgacctcttgaatgctgcttggtcgctattacggaaatccctgcgccagaaaagggcacccaccccagagacatatcttgccaagatctatgctcattcatcaattggccagcttcaaagggcttttggtacattgcgtgaatttgaaaatgcctatgggaactctgaggacattgatttagagctcttctcaccatttacttctttgcatcctcttgttgttgcttgctgcaaagatggctttagcacattggattcggtgtatggtcagttggagaatctgatacatgctgatccaccgtacaaatctcttgctgctctcaactgtgttgtattggggtgtgcaaacatttgggatattaatcgagcttatgaaacttttgtggctattaaggaaaaatttgacctcactccagacattcattcatacaatgctcttctgtgtgcatttgggaagttgaaacagacaggagaagcatgtaatgtgttccagcatgtattaactcttggtgttaagccaaatgcaacgacatactccttgcttgtcgatgcccatcttgcaaacaaagatccaaaagctgctcttgccataattgatgagatggttgatgctggcttcactccttccaaggataccctcaggaaggttcgaagacggtgctctcgtgaatcagacttcgacagtgacgagaaagtccagtccctggcaaagcagttcaactaccgaatgggtggtgagaaccgtagagagatgctttatagcatagaatacaatcctgtgtactgaaacaacgactaccggctgttctgtggagatctaggcaacgaagttaatgatgatgttctatccaaagcattctcacggtttccatccttcaacatggcaagggttgttagagataagaggactggcaagactaaaggttatggatttgtgagcttttcaaaccctactgacttggctgcagcaataaaagagatgaatggaaagtatgttgggaatcgccctattaaattgcgtaagagtaactggaaggagaggacagatgttgaggctctgcaaagacaaaagaatcatgtccaaaggaagcctaaaattcccaagaagagtgttcttcacaagtagagatatataggccctaccgagggtgaagggcagctcatggatgcgctgctgccttgggatgatgctacttctggaatgtcttcactctctgcactactggggggcggaaatcacgcaagggctgttgtttcatgcaaattgcaacgagctactgctgccatctgatgcaatttgtgctccgttttactgtttcccatagtttgcgttcatccatttgcggtgttggagtactgtcatggctactgactaaccaggccgagctgaacaagaaccaaatggaattttcagttttggtttcagcaagtaatagcatgacgtgttgtactatctatctcggttccagctcaaggttatgttcttgtccacggcatccacggccgccagcgtctaggaggccaggagggcctgcacgtacttgagctccagtcacttctccaccccttccccccatcacttccttaaggctctgcagctccagattaatttgatttgtattagcaatttatcctcctttttcaaaagaaagttgcaactgtactgtttctgtttcatgacaacactgcaacttaatgagttaatgacagaataaattatgatactccaaacaatggtgaggcgaaactaccggaccaatggtgagtgcaaccgacaccattgcagatacataataattcagttttggaagggagtgat

SEQ ID NO: 22718 - DNA, 1646 bp, Zea Mays
ctcatcacgcccgctcatctcaaagatctcagccgccgtcgtctccgtcgctccgccgcacctccccccatcaccgcctctctaaaaccctaatccctagccgccatggcggctgttgcggcggccacctcgcacctcctacgccaccaccgcaacccccaccttctcctcctccgcgcagcgatctcatcctcccgtgctttgccccagcagccggagctgtcccccgacccgaccgccggcacccccgacctcgccggcgcggccccactccctccaaaccccagcacggggagccccttctacacccagaactggcgcaacccagccgccgccaacccgccctcctcgcttctgcccaccgtcgtcgccggcagccccttcggggcgcagcacttcatggccgccttctacgatgcacccgacgtcacggggctcaaggagacgttcgccaagtatatggcggagcagcggtgggaagacatgaagcatctgttcgaccactgggtgcgctccctcgacgccgccacggggaagcccaaccaccccgacgtcgacctcttcaatcactacctccgcgccaacctcatgaccagggccctgccgcacgagatgctcgatctcgctgaccacatgctcgagttcgagctccaacccaacgctgcatcgtacaacctcgtgctcaagagcatggtcgccagccaggagaccgagggcgccgagaagctcattgaacggatgctgcaaacaggaacatttccagacgatgaatcctacaatttggttgtaggcctgcttatcagacagaacctcgtcgattcatctctgaagtatttggatctgatgcttaaatcgggctacacgttatcactaactgttttcacagattatatccgagcatgtatgagatctgggaggttggacacgttgacatcaattatagagaaatgcaagacaactgataagaacaaagtcttgtgtccggaatggacttggtgcattgacatagcagatgctgcatttgaagctaacaacagcaaattagctctttttgctttggaatatcttgcaagatggattgctcgtggtgagaatgttaaacctcctgttcagctgtcagttaatgaaggtcttgtaatatcagctctgagtgctgctggcagaacttataatactgacctcttgaatgctgcttggtcgctattacggaaatccctgcgccagaaaagggcacccaccccagagacatatcttgccaagatctatgctcattcatcaattggccagcttcaaagggcttttggtacattgcgtgaatttgaaaatgcctatgggaactctgaggacattgatttagagctcttctcaccatttacttctttgcatcctcttgttgttgcttgctgcaaagatggctttagcacattggattcggtgtatggtcagttggagaatctgatacatgctgatccaccgtacaaatctcttgctgctctcaactgtgttgtattggggtgtgcaaacatttgggatattaatcgagcttatgaaacttttgtggctattaaggaaaaatttgacctcactccagacattcattcatacaatgctcttctgtgtgcatttgggaagttgaaacagaggag

SEQ ID NO: 22719 - DNA, 725 bp, Zea Mays
cgtctccgtcgctccgccgcacctccccccatcaccgcctctctaaaaccctaatccctagccgccatggcggctgttgcggcggccacctcgcacctcctacgccaccaccgcaacccccaccttctcctcctccgcgcagcgatctcatcctcccgtgctttgccccagcagccggagctgtcccccgacccgaccgccggcacccccgacctcgccggcgcggccccactccctccaaaccccagcacggggagccccttctacacccagaactggcgcaacccagccgccgccaacccgccctcctcgcttctgcccaccgtcgtcgccggcagccccttcggggcgcagcacttcatggccgccttctacgatgcacccgacgtcacggggctcaaggagacgttcgccaagtatatggcggagcagcggtgggaagacatgaagcatctgttcgaccactgggtgcgctccctcgacgccgccacggggaagcccaaccaccccgacgtcgacctcttcaatcactacctccgcgccaacctcatgaccagggccctgccgcacgagatgctcgatctcgctgaccacatgctcgagttcgagctccaacccaacgctgcatcgtacaacctcgtgctcaagagcatggtcgccagccaggagaccgagggcgccgagaagctcattgaacggtagcggatgcctccggaagacgggct

SEQ ID NO: 22720 - DNA, 1200 bp, Zea Mays
atggctggggaaggaacatttccagacgatgaatcctacaatttggttgtaggcctgcttatcagacagaacctcgtcgattcatctctgaagtatttggatctgatgcttaaatcgggctacacgttatcactaactgttttcacagattatatccgagcatgtatgagatctgggaggttggacacgttgacatcaattatagagaaatgcaagacaactgataagaacaaagtcttgtgtccggaatggacttggtgcattgacatagcagatgctgcatttgaagctaacaacagcaaattagctctttttgctttggaatatcttgcaagatggattgctcgtggtgtatggtcagttggagaatctgatacatgctgatccaccgtacaaatctcttgctgctctcaactgtgttgtattggggtgtgcaaacatttgggatattaatcgagcttatgaaacttttgtggctattaaggaaaaatttgacctcactccagacattcattcatacaatgctcttctgtgtgcatttgggaagttgaaacagacaggagaagcatgtaatgtgttccagcatgtattaactcttggtgttaagccaaatgcaacgacatactccttgcttgtcgatgcccatcttgcaaacaaagatccaaaagctgctcttgccataattgatgagatggttgatgctggcttcactccttccaaggataccctcaggaaggttcgaagacggtgctctcgtgaatcagacttcgacagtgacgagaaagtccagtccctggcaaagcagttcaactaccgaatgggtggtgagaaccgtagagagatgctttatagcatagaatacaatcctgtgtactgaaacattgctactgagtttgctagccattgggagagcacagacattgcagcttgtaaattacttggatgtaccaggattcttaagcaaattttcagtttctcgatcatcatttgtgctcgcagggttcgttttaggacttgctaataagatgacactttgagtctgtttggttgtcaggaccagcatatcctggtcaaagcccagatgcaggctgggcatagcctgcatgcattcgtgcaaatcaaaacaactctacttgtttggttgtttgtccacaattaaccaggatcagcagagcctctgtttggtttactgttttgttg

SEQ ID NO: 22721 - DNA, 1157 bp, Zea Mays
agaaatccgatcccccaccgcaatcatcaattcatcacggcatcacccccaatttcttctactccaccgaaacataaatctgtagccagcagaaagatcttgcggaaggtggcagacgcatagatgaggacgactaccggctgttctgtggagatctaggcaacgaagttaatgatgatgttctatccaaagcattctcacggtttccatccttcaacatggcaagggttgttagagataagaggactggcaagactaaaggttatggatttgtgagcttttcaaaccctactgacttggctgcagcaataaaagagatgaatggaaagtatgttgggaatcgccctattaaattgcgtaagagtaactggaaggagaggacagatgttgaggctctgcaaagacaaaagaatcatgtccaaaggaagcctaaaattcccaagaagagtgttcttcacaagtagagatatataggccctaccgagggtgaagggcagctcatggatgcgctgctgccttgggatgatgctacttctggaatgtcttcactctctgcactactggggggcggaaatcacgcaagggctgttgtttcatgcaaattgcaacgagctactgctgccatctgatgcaatttgtgctccgttttactgtttcccatagtttgcgttcatccatttgcggtgttggagtactgtcatggctactgactaaccaggccgagctgaacaagaaccaaatggaattttcagttttggtttcagcaagtaatagcatgacgtgttgtactatctatctcggttccagctcaaggttatgttcttgtccacggcatccacggccgccagcgtctaggaggccaggagggcctgcacgtacttgagctccagtcacttctccaccccttccccccatcacttccttaaggctctgcagctccagattaatttgatttgtattagcaatttatcctcctttttcaaaagaaagttgcaactgtactgtttctgtttcatgacaacactgcaacttaatgagttaatgacagaataaattatgatactccaaacaatggtgaggcgaaactaccggaccaatggtgagtgcaaccgacaccattgcagatacataataattcagttttggaagggagtgat

SEQ ID NO: 22722 - DNA, 980 bp, Zea Mays
catcaattcatcacggcatcacccccaatttcttctactccaccgaaacataaatctgtagccagcagaaagatcttgcggaaggtggcagacgcatagatgagggtgagagcatttggcggtagcgcttgacgagcgacgagtaaaccctaatgctttgatcgcggcggcgtcgtttgggacactcccgaatcgatccgcctacatgcctatgaatcctcctcccccgccgcctcctgggtcggcgtcttcggcgccggcggggcccagctacttccctctccctttccacctgcagcagcaccagccgcagccgcagatgccgccgcctatggcggcgagcagctaccaacagtaccagcaacagctgcatcaggcgcatcagctcttccagcgggacgcgcagaccataacccccgaggcgctgcagagcgtcaaggctgctctcgccaccagcgacgtcctcgaccccgccgccgccgcgaacgccaggccctccgatccctctaccagcaagaagcccatcccccgccgcgctgccggacaatcctgggaggatcctaccctcactgactggcctgaaaacgactaccggctgttctgtggagatctaggcaacgaagttaatgatgatgttctatccaaagcattctcacggtttccatccttcaacatggcaagggttgttagagataagaggactggcaagactaaaggttatggatttgtgagcttttcaaaccctactgacttggctgcagcaataaaagagatgaatggaaagtatgttgggaatcgccctattaaattgcgtaagagtaactggaaggagaggacagatgttgaggctctgcaaagacaaaagaatcatgtccaaaggaagcctaaaattcccaagaagagtgttcttcacaagtagagatatataggccctaccgagggtgaagggcagctcatgagttctgatggatgacttatat

SEQ ID NO: 22723 - DNA, 1269 bp, Zea Mays
ggcagtgccactgtgccagccagccagccgctctgcttgtcctccagacagtccaggagtgaccgccagcccctgcactgcacacacaccctccctcattcacccccccccccccccccccccccaatcgcctccgaatctctctgcctcattctctctccaccggcgacggcgagtccgaccgcactgctcctctccgtgcggagatctctcgcgtgctggcaggcgcgtcctggtgactgggacacgggagaagagaccttggtgggtggcagcggcaggccatggaggcgctgctggtgacggtgcttcttctcctcctctcctctaccctcgccgcagcacaatggtgcgtgtgcaggcaggacgcgtcgcaggccgcgctgcagaagaccatcgactacgcgtgcggctccggggcggactgcaactccatccatgagaccggggcgtgctacaaccccaacaccgtcccggcgcactgctcctgggccgccaacagctactaccagaacaacaaggccaagggcgccacctgcgacttcgccggcaccgccaccctcaccaccagcgacccgagctcttcgggctgctcttaccccaccaccagtgcaaggtacgtggcgagcttaaattaactgtgcaccatgatccatgtagttcatgtttcaaacctgcgcgctttgggaactggtacacccccaaggaagttgagcatcatgttgcgccaccagatctttgggccgggatgcagtttgttcggcggattttttgtacttaagaatcgcggaacattcagcatgtgtgtcgtgtatcagtattaccagccacaacactaacagcactgccttgtttacacagcgccgcgggaaccgtgaccccgaccaccggcggcacaatgggaggagcgggaggcccagggaccttgacgcccgccgggacaggcgcaggcacagccggcactaccggcatggggactgcaggcactacgggtaccgggttcggcggcctaggaccagcaggcatggacacagcggcggcggcggcggggggcttgctcctcctcccagaggctgggctgtgcgctgccctcgtcgcgctcctcctctccgccatcgtgctcgcgtgacgccttcacatgacctcggaaacaacaacctactgcctgcatgctagtagtagtagaaagcgctgcccttttgggaggtgtatgtagttcaggagtactctgattatctatggagaaagggtgggaattattggggaaaa

SEQ ID NO: 22724 - DNA, 1545 bp, Zea Mays
ggcagtgccactgtgccagccagccagccgctctgcttgtcctccagacagtccaggagtgaccgccagcccctgcactgcacacacaccctccctcattcacccccccccccccccccccccccaatcgcctccgaatctctctgcctcattctctctccaccggcgacggcgagtccgaccgcactgctcctctccgtgcggagatctctcgcgtgctggcaggcgcgtcctggtgactgggacacgggagaagagaccttggtgggtggcagcggcaggccatggaggcgctgctggtgacggtgcttcttctcctcctctcctctaccctcgccgcagcacaatggtgcgtgtgcaggcaggacgcgtcgcaggccgcgctgcagaagaccatcgactacgcgtgcggctccggggcggactgcaactccatccatgagaccggggcgtgctacaaccccaacaccgtcccggcgcactgctcctgggccgccaacagctactaccagaacaacaaggccaagggcgccacctgcgacttcgccggcaccgccaccctcaccaccagcgacccgagtaagtggaaccaacgaacgatcatgcatgccgtgtagcattgttaagcttcaaggaatcgggttctgtacagggtaattaattttggctatcggtgtagcactgtagcctcgcctaataactaataataggaagaagaagaaaaaaaacaccaactttctgagcgaataactgtaaaataagatttgcaaagtgcaaagctgtttgcggtatatatgctttattattctcgaccctaaaagtaaaaccctatcatagtgtctactgggcagacattggcatcaaagtgcgtccaattttccccccgatttttccaaaagggaaagtaaactgtaacgcggtcttttgttttgttttatgactccaaactccaaagccagattccaatgtcttctatggtgtgtggtgtctgtgttctgctgcttccatgctcttcagtcttgtgacactgtccatttttaccacccattcagagtcctacctgtagtaccttatatgacctttgtgttccaaactttcaggctcttcgggctgctcttaccccaccaccagtgcaagcgccgcgggaaccgtgaccccgaccaccggcggcacaatgggaggagcgggaggcccagggaccttgacgcccgccgggacaggcgcaggcacagccggcactaccggcatggggactgcaggcactacgggtaccgggttcggcggcctaggaccagcaggcatggacacagcggcggcggcggcggggggcttgctcctcctcccagaggctgggctgtgcgctgccctcgtcgcgctcctcctctccgccatcgtgctcgcgtgacgccttcacatgacctcggaaacaacaacctactgcctgcatgctagtagtagtagaaagcgctgcccttttgggaggtgtatgtagttcaggagtactctgattatctatggagaaagggtgggaattattggggaaaa

SEQ ID NO: 22725 - DNA, 1552 bp, Zea Mays
ggcagtgccactgtgccagccagccagccgctctgcttgtcctccagacagtccaggagtgaccgccagcccctgcactgcacacacaccctccctcattcacccccccccccccccccccccccaatcgcctccgaatctctctgcctcattctctctccaccggcgacggcgagtccgaccgcactgctcctctccgtgcggagatctctcgcgtgctggcaggcgcgtcctggtgactgggacacgggagaagagaccttggtgggtggcagcggcaggccatggaggcgctgctggtgacggtgcttcttctcctcctctcctctaccctcgccgcagcacaatggtgcgtgtgcaggcaggacgcgtcgcaggccgcgctgcagaagaccatcgactacgcgtgcggctccggggcggactgcaactccatccatgagaccggggcgtgctacaaccccaacaccgtcccggcgcactgctcctgggccgccaacagctactaccagaacaacaaggccaagggcgccacctgcgacttcgccggcaccgccaccctcaccaccagcgacccgagtaagtggaaccaacgaacgatcatgcatgccgtgtagcattgttaagcttcaaggaatcgggttctgtacagggtaattaattttggctatcggtgtagcactgtagcctcgcctaataactaataataggaagaagaagaaaaaaaacaccaactttctgagcgaataactgtaaaataagatttgcaaagtgcaaagctgtttgcggtatatatgctttattattctcgaccctaaaagtaaaaccctatcatagtgtctactgggcagacattggcatcaaagtgcgtccaattttccccccgatttttccaaaagggaaagtaaactgtaacgcggtcttttgttttgttttatgactccaaactccaaagccagattccaatgtcttctatggtgtgtggtgtctgtgttctgctgcttccatgctcttcagtcttgtgacactgtccatttttaccacccattcagagtcctacctgtagtaccttatatgacctttgtgttccaaactttcaggctcttcgggctgctcttaccccaccaccagtgcaagcgccgcgggaaccgtgaccccgaccaccggcggcacaatgggaggagcgggaggcccagggaccttgacgcccgccgggacaggcgcaggcacagccggcactaccggcatggggactgcaggcactacgggtaccgggttcggcggcctaggaccagcaggcatggacacagcggcggcggcggcggggggcttgctcctcctcccagaggctgggctgtgcgctgccctcgtcgcgctcctcctctccgccatcgtgctcgcgtgacgccttcacatgacctcggaaacaacaacctactgcctgcatgctagtagtagtagaaagcgctgcccttttgggaggtgtatgtagttcaggagtactctgattatctatggagaaagggtgggaattattggggaaaaaaactaa

SEQ ID NO: 22726 - DNA, 2606 bp, Zea Mays
caagccctccaactgagtcgtcggagcggacgtcgagtcgtcgatacgcctgaaccccagctttccactcgcctcgctcgcccctttcgcgtccaccgaccccgaccccgaccccgatccccgccggtgcttcgccaccccgatccccaccgcgcgatggcggagccggctccggctcccccggtgaccgcgccgctggtggggctgctgtacgacgagcggatgtgcgcgcacgcgacgcccaacggggaggaacacccggagaaccccgagcggctgcgctccatctggcgcaagctcaacgccgcgggcgtcgcgtccaggtgtgtggcccttaaggcaaaggaagctgaggacaagtatatagcttctgttcacagcaagaggcatataaagctgatgaaggaaattagctcaacaatatatgatgccagcaggaacaagattgctaggaaattcaattccatttacttgaataagggttcctcggaatctgctgttcttgcagctggttctgtcatagaggtagctgagaaagttgctgcaggtgagttaagttctgctattgctctagtcagacctccaggccaccatgcagaacatgatgaggctatgggattttgcctcttcaacaatgtggcagttgcagctaattatctcttaaacgagaggcctgatttaggtatcaagaagatattgattgtcgattgggatgttcaccatggaaatggcacacagaaaatgttttacgatgatcctcgtgtattgttcttctcagttcacagatttgattatggaagcttctatccttctgaaggggatgcttctcattgtttcatcggggaagaagctggtaaagggtataacatcaatgttccctgggagcatggcaagtgtggtgatgctgattatattgctgcatgggaccatgtactgcttcctgtcactaaagtttttgatcctgatataattctggtatcagcggggtttgatgcagcattgggtgatcctctcggtgggtgctgcattacaccaaatggatatgcactgctactaacaaagttgttaggatttgctcaaggaaggatagtgatggcccttgaaggaggttataaccttaggtccatagcgaactcagtttgtgcttgtgcaaaagttctcttgggagacaaattcacattcaacactccagagatgcaaccatttgaatctacatggagagtaatacaagcggtacgcaatgaattgaagacatgctggcctgttctgagtagcaagttgccagaaaatgtatcattgaggattaagcctgcaccaagcgagtgttattgaagctactggtgttgctataagtgaacacctctcaaagatgaaacttgatgatgacagccttgcagtgaagactaactcaagttgctcagcagcagaacagcatccagttgattcagtaaaagtacataacaatgcatctgttgtgctgaccaaaaaaatatctgatttatctcttgagtggcgatcagatttatcgaaaactgatgtctggtatgccagttttggatcaaacatgtggagaccaagatttctatgttatattcaaggagggaaggctgagggtatgaatataccatgctgcggatcacgtgacacaagctcaccaaaaggaaccgtgtggaagactgtacctcacaggttgcttttcggtagatcgtctaccccttgttggggaactggtggtgtggcttttctcaaccctgagataaactacaatgagaagtcgtatgtctgcatgtacaaaataacgttggagcagttcaatgacatcttgtttcaggagaatcgtttagtgctggaggatggcaaagacggaaacactgtgtatcctgactctcctttgattggttcatctgaaatcaagtttatatctacaaacagagctgttcatcttgaacctattaaggatagctggtactccaatgtactttatcttgggaatgaggatgaagttccaattctaactatgacgtgccccgcatcagatattgagaggtataaatctggtgagctgcgtttagcacctccatcagagacgtatgcggccactctgataaagggactagtggaaggcaagcaaatggatgcggacggagctgccagctacatcaacgctgctgctgcaagagccttgtgaaggcggcttcagcgtgtgcttttgtacagccagtaaggagtagcaaggatacactatctgttagcgtggcgacaccaggaaaccttcattgtccgcaaatggagaacttggatccaatttgaattgggaagcatgattcgagcttgccctagcttgattactggtgaacggtgatctcccctggctggttgattctgggagaaacactagctgtgtcggggtggagcaacactagttggcggttgcaacaggtgctctcactgcactggtatcgtgcttgtctgacataccgtagtatttgcatggcatgctggtgatggtatttgtgcaattactgcattatgttctgttgcctggagttattgttgtttggccgccaccgctgctgctgctgggcagcgtaatatccactcgtcga

SEQ ID NO: 22727 - DNA, 2579 bp, Zea Mays
caagccctccaactgagtcgtcggagcggacgtcgagtcgtcgatacgcctgaaccccagctttccactcgcctcgctcgcccctttcgcgtccaccgaccccgaccccgaccccgatccccgccggtgcttcgccaccccgatccccaccgcgcgatggcggagccggctccggctcccccggtgaccgcgccgctggtggggctgctgtacgacgagcggatgtgcgcgcacgcgacgcccaacggggaggaacacccggagaaccccgagcggctgcgctccatctggcgcaagctcaacgccgcgggcgtcgcgtccaggtgtgtggcccttaaggcaaaggaagctgaggacaagtatatagcttctgttcacagcaagaggcatataaagctgatgaaggaaattagctcaacaatatatgatgccagcaggaacaagattgctaggaaattcaattccatttacttgaataagggttcctcggaatctgctgttcttgcagctggttctgtcatagaggtagctgagaaagttgctgcaggtgagttaagttctgctattgctctagtcagacctccaggccaccatgcagaacatgatgaggctatgggattttgcctcttcaacaatgtggcagttgcagctaattatctcttaaacgagaggcctgatttaggtatcaagaagatattgattgtcgattgggatgttcaccatggaaatggcacacagaaaatgttttacgatgatcctcgtgtattgttcttctcagttcacagatttgattatggaagcttctatccttctgaaggggatgcttctcattgtttcatcggggaagaagctggtaaagggtataacatcaatgttccctgggagcatggcaagtgtggtgatgctgattatattgctgcatgggaccatgtactgcttcctgtcactaaagtttttgatcctgatataattctggtatcagcggggtttgatgcagcattgggtgatcctctcggtgggtgctgcattacaccaaatggatatgcactgctactaacaaagttgttaggatttgctcaaggaaggatagtgatggcccttgaaggaggttataaccttaggtccatagcgaactcagtttgtgcttgtgcaaaagttctcttgggagacaaattcacattcaacactccagagatgcaaccatttgaatctacatggagagtaatacaagcggtacgcaatgaattgaagacatgctggcctgttctgagtagcaagttgccagaaaatgtatcattgaggattaagcctgcaccaagcgagctctacgcttctgattctgaatctgatagtgaagatgttgatgagctccttggcactgttgcatctgtcagtgttattgaagctactggtgttgctataagtgaacacctctcaaagatgaaacttgatgatgacagccttgcagtgaagactaactcaagttgctcagcagcagaacagcatccagttgattcagtaaaattttggatcaaacatgtggagaccaagatttctatgttatattcaaggagggaaggctgagggtatgaatataccatgctgcggatcacgtgacacaagctcaccaaaaggaaccgtgtggaagactgtacctcacaggttgcttttcggtagatcgtctaccccttgttggggaactggtggtgtggcttttctcaaccctgagataaactacaatgagaagtcgtatgtctgcatgtacaaaataacgttggagcagttcaatgacatcttgtttcaggagaatcgtttagtgctggaggatggcaaagacggaaacactgtgtatcctgactctcctttgattggttcatctgaaatcaagtttatatctacaaacagagctgttcatcttgaacctattaaggatagctggtactccaatgtactttatcttgggaatgaggatgaagttccaattctaactatgacgtgccccgcatcagatattgagaggtataaatctggtgagctgcgtttagcacctccatcagagacgtatgcggccactctgataaagggactagtggaaggcaagcaaatggatgcggacggagctgccagctacatcaacgctgctgctgcaagagccttgtgaaggcggcttcagcgtgtgcttttgtacagccagtaaggagtagcaaggatacactatctgttagcgtggcgacaccaggaaaccttcattgtccgcaaatggagaacttggatccaatttgaattgggaagcatgattcgagcttgccctagcttgattactggtgaacggtgatctcccctggctggttgattctgggagaaacactagctgtgtcggggtggagcaacactagttggcggttgcaacaggtgctctcactgcactggtatcgtgcttgtctgacataccgtagtatttgcatggcatgctggtgatggtatttgtgcaattactgcattatgttctgttgcctggagttattgttgtttggccgccaccgctgctgctgctgggcagcgtaatatccactcgtcga

SEQ ID NO: 22728 - DNA, 2383 bp, Zea Mays
cagacctactcccccataaatataaacgggtgtgtggcccttaaggcaaaggaagctgaggacaagtatatagcttctgttcacagcaagaggcatataaagctgatgaaggaaattagctcaacaatatatgatgccagcaggaacaagattgctaggaaattcaattccatttacttgaataagggttcctcggaatctgctgttcttgcagctggttctgtcatagaggtagctgagaaagttgctgcaggtgagttaagttctgctattgctctagtcagacctccaggccaccatgcagaacatgatgaggctatgggattttgcctcttcaacaatgtggcagttgcagctaattatctcttaaacgagaggcctgatttaggtatcaagaagatattgattgtcgattgggatgttcaccatggaaatggcacacagaaaatgttttacgatgatcctcgtgtattgttcttctcagttcacagatttgattatggaagcttctatccttctgaaggggatgcttctcattgtttcatcggggaagaagctggtaaagggtataacatcaatgttccctgggagcatggcaagtgtggtgatgctgattatattgctgcatgggaccatgtactgcttcctgtcactaaagtttttgatcctgatataattctggtatcagcggggtttgatgcagcattgggtgatcctctcggtgggtgctgcattacaccaaatggatatgcactgctactaacaaagttgttaggatttgctcaaggaaggatagtgatggcccttgaaggaggttataaccttaggtccatagcgaactcagtttgtgcttgtgcaaaagttctcttgggagacaaattcacattcaacactccagagatgcaaccatttgaatctacatggagagtaatacaagcggtacgcaatgaattgaagacatgctggcctgttctgagtagcaagttgccagaaaatgtatcattgaggattaagcctgcaccaagcgagctctacgcttctgattctgaatctgatagtgaagatgttgatgagctccttggcactgttgcatctgtcagtgttattgaagctactggtgttgctataagtgaacacctctcaaagatgaaacttgatgatgacagccttgcagtgaagactaactcaagttgctcagcagcagaacagcatccagttgattcagtaaaagtacataacaatgcatctgttgtgctgaccaaaaaaatatctgatttatctcttgagtggcgatcagatttatcgaaaactgatgtctggtatgccagttttggatcaaacatgtggagaccaagatttctatgttatattcaaggagggaaggctgagggtatgaatataccatgctgcggatcacgtgacacaagctcaccaaaaggaaccgtgtggaagactgtacctcacaggttgcttttcggtagatcgtctaccccttgttggggaactggtggtgtggcttttctcaaccctgagataaactacaatgagaagtcgtatgtctgcatgtacaaaataacgttggagcagttcaatgacatcttgtttcaggagaatcgtttagtgctggaggatggcaaagacggaaacactgtgtatcctgactctcctttgattggttcatctgaaatcaagtttatatctacaaacagagctgttcatcttgaacctattaaggatagctggtactccaatgtactttatcttgggaatgaggatgaagttccaattctaactatgacgtgccccgcatcagatattgagaggtataaatctggtgagctgcgtttagcacctccatcagagacgtatgcggccactctgataaagggactagtggaaggcaagcaaatggatgcggacggagctgccagctacatcaacgctgctgctgcaagagccttgtgaaggcggcttcagcgtgtgcttttgtacagccagtaaggagtagcaaggatacactatctgttagcgtggcgacaccaggaaaccttcattgtccgcaaatggagaacttggatccaatttgaattgggaagcatgattcgagcttgccctagcttgattactggtgaacggtgatctcccctggctggttgattctgggagaaacactagctgtgtcggggtggagcaacactagttggcggttgcaacaggtgctctcactgcactggtatcgtgcttgtctgacataccgtagtatttgcatggcatgctggtgatggtatttgtgcaattactgcattatgttctgttgcctggagttattgttgtttggccgccaccgctgctgctgctgggcagcgtaatatccactcgtcga

SEQ ID NO: 22729 - DNA, 2394 bp, Zea Mays
cgcggaccgtccgcgctgctgcagagggcaccgccaggcggtgtgtggcccttaaggcaaaggaagctgaggacaagtatatagcttctgttcacagcaagaggcatataaagctgatgaaggaaattagctcaacaatatatgatgccagcaggaacaagattgctaggaaattcaattccatttacttgaataagggttcctcggaatctgctgttcttgcagctggttctgtcatagaggtagctgagaaagttgctgcaggtgagttaagttctgctattgctctagtcagacctccaggccaccatgcagaacatgatgaggctatgggattttgcctcttcaacaatgtggcagttgcagctaattatctcttaaacgagaggcctgatttaggtatcaagaagatattgattgtcgattgggatgttcaccatggaaatggcacacagaaaatgttttacgatgatcctcgtgtattgttcttctcagttcacagatttgattatggaagcttctatccttctgaaggggatgcttctcattgtttcatcggggaagaagctggtaaagggtataacatcaatgttccctgggagcatggcaagtgtggtgatgctgattatattgctgcatgggaccatgtactgcttcctgtcactaaagtttttgatcctgatataattctggtatcagcggggtttgatgcagcattgggtgatcctctcggtgggtgctgcattacaccaaatggatatgcactgctactaacaaagttgttaggatttgctcaaggaaggatagtgatggcccttgaaggaggttataaccttaggtccatagcgaactcagtttgtgcttgtgcaaaagttctcttgggagacaaattcacattcaacactccagagatgcaaccatttgaatctacatggagagtaatacaagcggtacgcaatgaattgaagacatgctggcctgttctgagtagcaagttgccagaaaatgtatcattgaggattaagcctgcaccaagcgagctctacgcttctgattctgaatctgatagtgaagatgttgatgagctccttggcactgttgcatctgtcagtgttattgaagctactggtgttgctataagtgaacacctctcaaagatgaaacttgatgatgacagccttgcagtgaagactaactcaagttgctcagcagcagaacagcatccagttgattcagtaaaagtacataacaatgcatctgttgtgctgaccaaaaaaatatctgatttatctcttgagtggcgatcagatttatcgaaaactgatgtctggtatgccagttttggatcaaacatgtggagaccaagatttctatgttatattcaaggagggaaggctgagggtatgaatataccatgctgcggatcacgtgacacaagctcaccaaaaggaaccgtgtggaagactgtacctcacaggttgcttttcggtagatcgtctaccccttgttggggaactggtggtgtggcttttctcaaccctgagataaactacaatgagaagtcgtatgtctgcatgtacaaaataacgttggagcagttcaatgacatcttgtttcaggagaatcgtttagtgctggaggatggcaaagacggaaacactgtgtatcctgactctcctttgattggttcatctgaaatcaagtttatatctacaaacagagctgttcatcttgaacctattaaggatagctggtactccaatgtactttatcttgggaatgaggatgaagttccaattctaactatgacgtgccccgcatcagatattgagaggtataaatctggtgagctgcgtttagcacctccatcagagacgtatgcggccactctgataaagggactagtggaaggcaagcaaatggatgcggacggagctgccagctacatcaacgctgctgctgcaagagccttgtgaaggcggcttcagcgtgtgcttttgtacagccagtaaggagtagcaaggatacactatctgttagcgtggcgacaccaggaaaccttcattgtccgcaaatggagaacttggatccaatttgaattgggaagcatgattcgagcttgccctagcttgattactggtgaacggtgatctcccctggctggttgattctgggagaaacactagctgtgtcggggtggagcaacactagttggcggttgcaacaggtgctctcactgcactggtatcgtgcttgtctgacataccgtagtatttgcatggcatgctggtgatggtatttgtgcaattactgcattatgttctgttgcctggagttattgttgtttggccgccaccgctgctgctgctgggcagcgtaatatccactcgtcga

SEQ ID NO: 22730 - DNA, 1743 bp, Zea Mays
gcattgaactgtggatacactatattagaatctatactattggagttctcgtgcatctttgtgcattgggtgatcctctcggtgggtgctgcattacaccaaatggatatgcactgctactaacaaagttgttaggatttgctcaaggaaggatagtgatggcccttgaaggaggttataaccttaggtccatagcgaactcagtttgtgcttgtgcaaaagttctcttgggagacaaattcacattcaacactccagagatgcaaccatttgaatctacatggagagtaatacaagcggtacgcaatgaattgaagacatgctggcctgttctgagtagcaagttgccagaaaatgtatcattgaggattaagcctgcaccaagcgagctctacgcttctgattctgaatctgatagtgaagatgttgatgagctccttggcactgttgcatctgtcagtgttattgaagctactggtgttgctataagtgaacacctctcaaagatgaaacttgatgatgacagccttgcagtgaagactaactcaagttgctcagcagcagaacagcatccagttgattcagtaaaagtacataacaatgcatctgttgtgctgaccaaaaaaatatctgatttatctcttgagtggcgatcagatttatcgaaaactgatgtctggtatgccagttttggatcaaacatgtggagaccaagatttctatgttatattcaaggagggaaggctgagggtatgaatataccatgctgcggatcacgtgacacaagctcaccaaaaggaaccgtgtggaagactgtacctcacaggttgcttttcggtagatcgtctaccccttgttggggaactggtggtgtggcttttctcaaccctgagataaactacaatgagaagtcgtatgtctgcatgtacaaaataacgttggagcagttcaatgacatcttgtttcaggagaatcgtttagtgctggaggatggcaaagacggaaacactgtgtatcctgactctcctttgattggttcatctgaaatcaagtttatatctacaaacagagctgttcatcttgaacctattaaggatagctggtactccaatgtactttatcttgggaatgaggatgaagttccaattctaactatgacgtgccccgcatcagatattgagaggtataaatctggtgagctgcgtttagcacctccatcagagacgtatgcggccactctgataaagggactagtggaaggcaagcaaatggatgcggacggagctgccagctacatcaacgctgctgctgcaagagccttgtgaaggcggcttcagcgtgtgcttttgtacagccagtaaggagtagcaaggatacactatctgttagcgtggcgacaccaggaaaccttcattgtccgcaaatggagaacttggatccaatttgaattgggaagcatgattcgagcttgccctagcttgattactggtgaacggtgatctcccctggctggttgattctgggagaaacactagctgtgtcggggtggagcaacactagttggcggttgcaacaggtgctctcactgcactggtatcgtgcttgtctgacataccgtagtatttgcatggcatgctggtgatggtatttgtgcaattactgcattatgttctgttgcctggagttattgttgtttggccgccaccgctgctgctgctgggcagcgtaatatccactcgtcga

SEQ ID NO: 22731 - DNA, 1686 bp, Zea Mays
ctcgtgcatctttgtgcattgggtgatcctctcggtgggtgctgcattacaccaaatggatatgcactgctactaacaaagttgttaggatttgctcaaggaaggatagtgatggcccttgaaggaggttataaccttaggtccatagcgaactcagtttgtgcttgtgcaaaagttctcttgggagacaaattcacattcaacactccagagatgcaaccatttgaatctacatggagagtaatacaagcggtacgcaatgaattgaagacatgctggcctgttctgagtagcaagttgccagaaaatgtatcattgaggattaagcctgcaccaagcgagctctacgcttctgattctgaatctgatagtgaagatgttgatgagctccttggcactgttgcatctgtcagtgttattgaagctactggtgttgctataagtgaacacctctcaaagatgaaacttgatgatgacagccttgcagtgaagactaactcaagttgctcagcagcagaacagcatccagttgattcagtaaaagtacataacaatgcatctgttgtgctgaccaaaaaaatatctgatttatctcttgagtggcgatcagatttatcgaaaactgatgtctggtatgccagttttggatcaaacatgtggagaccaagatttctatgttatattcaaggagggaaggctgagggtatgaatataccatgctgcggatcacgtgacacaagctcaccaaaaggaaccgtgtggaagactgtacctcacaggttgcttttcggtagatcgtctaccccttgttggggaactggtggtgtggcttttctcaaccctgagataaactacaatgagaagtcgtatgtctgcatgtacaaaataacttcaatgacatcttgtttcaggagaatcgtttagtgctggaggatggcaaagacggaaacactgtgtatcctgactctcctttgattggttcatctgaaatcaagtttatatctacaaacagagctgttcatcttgaacctattaaggatagctggtactccaatgtactttatcttgggaatgaggatgaagttccaattctaactatgacgtgccccgcatcagatattgagaggtataaatctggtgagctgcgtttagcacctccatcagagacgtatgcggccactctgataaagggactagtggaaggcaagcaaatggatgcggacggagctgccagctacatcaacgctgctgctgcaagagccttgtgaaggcggcttcagcgtgtgcttttgtacagccagtaaggagtagcaaggatacactatctgttagcgtggcgacaccaggaaaccttcattgtccgcaaatggagaacttggatccaatttgaattgggaagcatgattcgagcttgccctagcttgattactggtgaacggtgatctcccctggctggttgattctgggagaaacactagctgtgtcggggtggagcaacactagttggcggttgcaacaggtgctctcactgcactggtatcgtgcttgtctgacataccgtagtatttgcatggcatgctggtgatggtatttgtgcaattactgcattatgttctgttgcctggagttattgttgtttggccgccaccgctgctgctgctgggcagcgtaatatccactcgtcga

SEQ ID NO: 22732 - DNA, 691 bp, Zea Mays
gtattcaagttcatctggtcttagaaatgattgtatgatcaggatagctggtactccaatgtactttatcttgggaatgaggatgaagttccaattctaactatgacgtgccccgcatcagatattgagaggtataaatctggtgagctgcgtttagcacctccatcagagacgtatgcggccactctgataaagggactagtggaaggcaagcaaatggatgcggacggagctgccagctacatcaacgctgctgctgcaagagccttgtgaaggcggcttcagcgtgtgcttttgtacagccagtaaggagtagcaaggatacactatctgttagcgtggcgacaccaggaaaccttcattgtccgcaaatggagaacttggatccaatttgaattgggaagcatgattcgagcttgccctagcttgattactggtgaacggtgatctcccctggctggttgattctgggagaaacactagctgtgtcggggtggagcaacactagttggcggttgcaacaggtgctctcactgcactggtatcgtgcttgtctgacataccgtagtatttgcatggcatgctggtgatggtatttgtgcaattactgcattatgttctgttgcctggagttattgttgtttggccgccaccgctgctgctgctgggcagcgtaatatccactcgtcga

SEQ ID NO: 22733 - DNA, 3374 bp, Zea Mays
atctgcttccctcccccgtgcacacaggtgacacgtcatccgcgagggatagctggagaagactaaacccccaaccaccgccgccgtggccgccggcggcgatcgcctccggttttcctcgaggctgatcaacccctgcccgttcggctgtctgcctgtctcgggatgcacttggatttctgaccgtgtgctgctgaagcgtccagattggtacccggagatggatctgcttcttccgtacaagattggggatctcgcggagtccaagtcctttttgaatggttacaggggcgcgtggtttcgttgcaaggtacataatatgcgtgtcaatgattctggatacctggagtgttacttggaatatattgactatgatggggaggatctggattgggttgccgtcttccaagagaacccagcaagctcaagtcaaaattctaaaggaagtactgaagttatgataaggccttctttccctcaatggtattatgggcatgaacctgatcagctcccagttagtgatgtcacagcagttgttgatgaggcctggaaaataggcgatatggttgattggctcaaggacggttgctattggtctgggacaattactaagttactcaaaaaagatatggttaagctacaacttccggcacctcccataggtgaaggcagatgttatattgctaaccataaggatctgagacctacacttgagtggtccttagaaaaaggttggacagtacctcttgcgcaggcaaaccaaaaaagttggtataccgctcgtcttcttcgacaatataaatctgattcagacaagagcacctcaggtgatgaaaatggcgatgatgagaaggggggaatgcagcaataggtgtccagaacttgaaacatgcctcaggaagccccccaggtcccgtggttcctacgaaaacgctcagaaggacgccactgtcactccagtccaaggagagtgtggagatcagctcaacttccaagccaccagacccttgagagcagaactcgttcctgactgatggtgtgaggctgatgatgtcacggacgagtttctggatatgctgaacacggtcgagaccaggctacaaacacctcctggagtgtacgcgggaacttagcgacgacctgctggcttttccatccgctaggcggatgaagtggttctgattacccaaggcgattggaaatacctgttgttgctgtactgctgtttgtagtcgcaggaaacactagtcttgcgcatagagatgaaactggtaagtgcaaaagaggatcatcggttaaaggcagcgtctccgaactggtaagtgcaattcccgtcagccttaaccaaggaattgaagtggggaaacacgagtgtcttcttcttggaggggacctggtacgatctgttggtggtgatccgaaaagttatgcataggacataggagggacgtaggttagatgtaatggatcatgaattgttaccactagggtagcagcacagcggaagaaaggtgtgatacggtagaagtagttatacgtactctacttgcgtttttgcgtaccaatagcaggaacacgtccatccgacaacagcaacaacatcttcatggtatcgaggatgaaacccctacgacgtcgatgcgctagaaccatccgctgacgttgatgtgctagaaccgcgtgcagcgggagaaatgaccgtcttgggcacccgcaaccataggagacgataactaagatgtctcgtgaatcataaaagccacttcgtatatagagatctcatgctaatatacttttatcttagtgttctcatcaatcataaaagtctcttggtcatatattcaacaatctcttacttgcattagagtaaatcatatatgcaacagttctaatcacttagatttcttgttaggttcataagcaaaaatcatttttatccattagtcaatagcagtaatatttttttggtacacatagaacatcgttattttatacttattttgtttttattaaaaactaaaatacatttgagccttactagctaattgggtcctggaacgagttgggccaaaatcgctagaagttgttttatgagctatacccaacaaagacagcgatagggttgagctgaaccagcccaggccgcatgtgtgtgagtgaacgggtttagcggtttagcctagccaggtttcctttactctccgcgaatctgagcctgatcggcctagtaggcccataaaagcacaatggcataccaatctagcccaacttggccgacgtcctgcacacacaaaagaaaagaaagacggccagtttcccgcggtttgcccgcgaaggtgccccaacttcccgccagacaccgctcccgctcttccacgctgagtagggagagccgaggcccaacctagacggatagacgcggagatgtcttcctgggacgctgacgactcggcggcggcgtccgcggccgaggcggccaccacggacgtcgagctgctcaagcgggcgtggcgcaacgagaaggccgcgccggagatcctccgcttcgactcgcccctcgtctctcgcgtccgcgagcagacccagctcctcgaggagacgctggacgacttcgccgacagtggcgtcgacgacctggtggtctcgctctaccagatggacctcgaccgcacgctcttcctcctccgctcctacctccgcctccgcctgcagaagatcgagaagtacacgatgcacatctcccgctccgaagacctcctcagccggctgtcccagcaggagcgccggtttgccaagagttgcgcggagatcatggagaagcatctggagcagtcggtgctgtcgaagctcccgtacgggtatgactcggtttccaggcagtcgctgtcgagcactgaggatgacatggtgccggagcctcagcttgacaccttcgtcttctgtaagaccaagggcgacgtaggtgcattccagctagatgacattggagaggaggttgtggacctggttgctgatgacttgtatgttcttcggtacaagtccgtcaagggactcatagagggtggccggatcgaccttatctgacaacaatcaccacaagtcagaacctggaactctgcaagagagcgagcatgaattcatggaaaggaattgcaaagataacctcaattgaaagatgctgtcttatgtgccatggcgtgtggcctagaattcctatgcatttttgtacatggttgtgatggtacctccatttattaatgagatcagggttatgtgatccccagtcaatagtcgatggctcatataacttaaggcatttgatttgttgcaaaagtatcttcagagtaacctcacaaaaaataaaaggaaaaggg

SEQ ID NO: 22734 - DNA, 2212 bp, Zea Mays
cacaggtgacacgtcatccgcgagggatagctggagaagactaaacccccaaccaccgccgccgtggccgccggcggcgatcgcctccggttttcctcgaggctgatcaacccctgcccgttcggctgtctgcctgtctcgattggtacccggagatggatctgcttcttccgtacaagattggggatctcgcggagtccaagtcctttttgaatggttacaggggcgcgtggtttcgttgcaaggccattcttggtgggagtttcacgtcagtgcgatacatcaacaagtttggtgacatggtctacgaagagatagagttttacgggaggtacataatatgcgtgtcaatgattctggatacctggagtgttacttggaatatattgactatgatggggaggatctggattgggttgccgtcttccaagagaacccagcaagctcaagtcaaaattctaaaggaagtactgaagttatgataaggccttctttccctcaatggtattatgggcatgaacctgatcagctcccagttagtgatgtcacagcagttgttgatgaggcctggaaaataggcgatatggttgattggctcaaggacggttgctattggtctgggacaattactaagttactcaaaaaagatatggttaagctacaacttccggcacctcccataggtgaaggcagatgttatattgctaaccataaggatctgagacctacacttgagtggtccttagaaaaaggttggacagtacctcttgcgcaggcaaaccaaaaaagttggtataccgctcgtcttcttcgacaatataaatctgattcagacaagagcacctcaggtgatgaaaatggcgatgatgagaaggggggaatgcagcaataggtgtccagaacttgaaacatgcctcaggaagccccccaggtcccgtggttcctacgaaaacgctcagaaggacgccactgtcactccagtccaaggagagtgtggagatcagctcaacttccaagccaccagacccttgagagcagaactcgttcctgactgatggtgtgaggctgatgatgtcacggacgagtttctggatatgctgaacacggtcgagaccaggctacaaacacctcctggagtgtacgcgggaacttagcgacgacctgctggcttttccatccgctaggcggatgaagtggttctgattacccaaggcgattggaaatacctgttgttgctgtactgctgtttgtagtcgcaggaaacactagtcttgcgcatagagatgaaactggtaagtgcaaaagaggatcatcggttaaaggcagcgtctccgaactggtaagtgcaattcccgtcagccttaaccaaggaattgaagtggggaaacacgagtgtcttcttcttggaggggacctggtacgatctgttggtggtgatccgaaaagttatgcataggacataggagggacgtaggttagatgtaatggatcatgaattgttaccactagggtagcagcacagcggaagaaaggtgtgatacggtagaagtagttatacgtactctacttgcgtttttgcgtaccaatagcaggaacacgtccatccgacaacagcaacaacatcttcatggtatcgaggatgaaacccctacgacgtcgatgcgctagaaccatccgctgacgttgatgtgctagaaccgcgtgcagcgggagaaatgaccgtcttgggcacccgcaaccataggagacgataactaagatgtctcgtgaatcataaaagccacttcgtatatagagatctcatgctaatatacttttatcttagtgttctcatcaatcataaaagtctcttggtcatatattcaacaatctcttacttgcattagagtaaatcatatatgcaacagttctaatcacttagatttcttgttaggttcataagcaaaaatcatttttatccattagtcaatagcagtaatatttttttggtacacatagaacatcgttattttatacttattttgtttttattaaaaactaaaatacatttgagccttactagctaattgggtcctggaacgagttgggccaaaatcgctagaagttgttttatgagctatacccaacaaagacagcgatagggttgagctgaaccagcccaggccgcatgtgtgtgagtgaacgggtttagcggtttagcctagccaggttt

SEQ ID NO: 22735 - DNA, 1473 bp, Zea Mays
aaataatactgtccattagatttgagtgataaatagattcaatcatctatatgacctagcaatttggatcttgcatgcattgagcttttcagagacaagagcacctcaggtgatgaaaatggcgatgatgagaaggggggaatgcagcaataggtgtccagaacttgaaacatgcctcaggaagccccccaggtcccgtggttcctacgaaaacgctcagaaggacgccactgtcactccagtccaaggagagtgtggagatcagctcaacttccaagccaccagacccttgagagcagaactcgttcctgactgatggtgtgaggctgatgatgtcacggacgagtttctggatatgctgaacacggtcgagaccaggctacaaacacctcctggagtgtacgcgggaacttagcgacgacctgctggcttttccatccgctaggcggatgaagtggttctgattacccaaggcgattggaaatacctgttgttgctgtactgctgtttgtagtcgcaggaaacactagtcttgcgcatagagatgaaactggtaagtgcaaaagaggatcatcggttaaaggcagcgtctccgaactggtaagtgcaattcccgtcagccttaaccaaggaattgaagtggggaaacacgagtgtcttcttcttggaggggacctggtacgatctgttggtggtgatccgaaaagttatgcataggacataggagggacgtaggttagatgtaatggatcatgaattgttaccactagggtagcagcacagcggaagaaaggtgtgatacggtagaagtagttatacgtactctacttgcgtttttgcgtaccaatagcaggaacacgtccatccgacaacagcaacaacatcttcatggtatcgaggatgaaacccctacgacgtcgatgcgctagaaccatccgctgacgttgatgtgctagaaccgcgtgcagcgggagaaatgaccgtcttgggcacccgcaaccataggagacgataactaagatgtctcgtgaatcataaaagccacttcgtatatagagatctcatgctaatatacttttatcttagtgttctcatcaatcataaaagtctcttggtcatatattcaacaatctcttacttgcattagagtaaatcatatatgcaacagttctaatcacttagatttcttgttaggttcataagcaaaaatcatttttatccattagtcaatagcagtaatatttttttggtacacatagaacatcgttattttatacttattttgtttttattaaaaactaaaatacatttgagccttactagctaattgggtcctggaacgagttgggccaaaatcgctagaagttgttttatgagctatacccaacaaagacagcgatagggttgagctgaaccagcccaggccgcatgtgtgtgagtgaacgggtttagcggtttagcctagccaggttt

SEQ ID NO: 22736 - DNA, 569 bp, Zea Mays
tcgtgcctaccttggctaaagtttctcgcttggttggctcgtgttgacggctgagaggatgcagcacgaccagaagaagaaggtcacagtcttctctctgatttcgtggtggtcttgtttgccccccttgcctttccggatcgaaatcttggtgtttagggttctctgtcaactcttacagcttcgtgcaccttcagaaatggattttttcacagagtacggcgaggggagcaggtacaagatagaagaggtcatagggaaaggcagttacggtgtggtttgctctgccttggacactcatactggtgaaaaggtcgccataaagaagataaatgacatctttgagcatgtgtctgatgcgacaaggatacttcgggaaatcaagttgcttagactcctgcggcatccggatatcgtggaaataaagcatattctacttcctccatcaaggagggaattcaggatatttacgttgtgtttgacttatggagtctgatttgcaccaagttataaaggctaatgatgacttgaccccagagcattatcagttcttcttgtatcagttgctt

SEQ ID NO: 22737 - DNA, 2383 bp, Zea Mays
  misc_feature (465)..(564): n is a, c, g, or t
tcgtgcctaccttggctaaagtttctcgcttggttggctcgtgttgacggctgagaggatgcagcacgaccagaagaagaaggcaccttcagaaatggattttttcacagagtacggcgaggggagcaggtacaagatagaagaggtcatagggaaaggcagttacggtgtggtttgctctgccttggacactcatactggtgaaaaggtcgccataaagaagataaatgacatctttgagcatgtgtctgatgcgacaaggatacttcgggaaatcaagttgcttagactcctgcggcatccggatatcgtggaaataaagcatattctacttcctccatcaaggagggaattcaggatatttacgttgtgtttgacttatggagtctgatttgcaccaagttataaaggctaatgatgacttgaccccagagcattatcagttcttcttgtatcagttgcttnnnnnnnnnnnnnnnnnnnnnnnnnnnnnnnnnnnnnnnnnnnnnnnnnnnnnnnnnnnnnnnnnnnnnnnnnnnnnnnnnnnnnnnnnnnnnnnnnnnnattatcagttcttcttgtatcagttgcttcgaggtttgaaatacatacacacagcaaatgtattccatcgagatctcaaaccaaaaaatattctggcaaatgctgattgtaagctcaaaatatgtgattttggcctagcaagagtagctttcagtgatactccaaccgcgatcttttggacagattatgttgcaactaggtggtaccgagcaccggagctgtgtggatcatttttctcaaagtatacaccagcgatagatatatggagtattggttgtatatttgcggaactattaactggaaaaccgcttttcccggggaaaaatgtggtacatcaacttgatataattacagatctcatgggaacaccttctccagaagcaatatcgaggattcgtaatgagaaggccaggcgctacttgagtaatatgaggcggaaaaagcccataccttttacacagaagttcccaaatgcagatccacttgcattaggtttgttagagcgaatgctagcttttgagccaaaagacaggccaagtgctgaagaggctcttgctcatccttattttaagaatatagccaatgtggatagagagccttctgcacaagctgtcacaaagctcgaatttgagttcgagagacggagagtcactaaagatgacataagggaacttatatatagagaaattcttgagtatcatccaaagatgttgaaagaatttattgagggaactgagtcaagtggtttcatgtacccaagtgcagtagataattttaaaaagcagtttgcataccttgaggaacattatgccaagggatctacgggaactccacctgagaggcaacataactcattgccacggccttctgttgtctattcagacaaccaatcacaaagcacggccaatataacagaggatctttccaagtgtataatcagagaaaatgcacagaagtcacagcaatataatgcttcagttgcaaataaatttccatcccatgttcctcaaggtgctgctgcaaggcctggtaaagcagttggttcggtgctgcagtacaacctctctcaagcatctgctgctgagcaatatgagcagcgaagggttgctaggcacccagcagttgccccaaacaacatcccttctggaagctcataccccagaagaaatcagacctgcaagagcgagacaggcgacactgagaggatggacgtgaaccaagctgggcagccgaagtcctatgcagcaaacaaactacctgcaactgttgatggtcgcggcggccattggtagatctccgcgttgtgtaacacgttatcagcatctgttacttgtgctaagcgctacattattctgacaaattcagaaatgtagttctgtacagatccgtattctttccccggattcctaagtactgtagaacggtgctcgaaatcgctgggtttccacctcctgtcgctattcattcactgaaagatctgctggctggtggagatttgtcagactgaagtatactggaagctcactggcagcagcgggaactcaagcaagcagagttcttgactgacgttgtcatttgttcttcagcctggtaggtctaacgagctgaatactgttagttcctgtgaatcatctacacgtcaggtgcagaattctgttgagctagctaggaggtgcaagcatgttgtacgctgaatatcaaagtcattgatcctttactcatgttatcttggttaaacgtgagatatatgctagcgtgtagtatccctgtttcccaacaatatacttactcaccacattgttcacgtatagctgatact

SEQ ID NO: 22738 - DNA, 1824 bp, Zea Mays
attatcagttcttcttgtatcagttgcttcgaggtttgaaatacatacacacagcttattgcagcaaatgtattccatcgagatctcaaaccaaaaaatattctggcaaatgctgattgtaagctcaaaatatgtgattttggcctagcaagagtagctttcagtgatactccaaccgcgatcttttggacagattatgttgcaactaggtggtaccgagcaccggagctgtgtggatcatttttctcaaagtatacaccagcgatagatatatggagtattggttgtatatttgcggaactattaactggaaaaccgcttttcccggggaaaaatgtggtacatcaacttgatataattacagatctcatgggaacaccttctccagaagcaatatcgaggattcgtaatgagaaggccaggcgctacttgagtaatatgaggcggaaaaagcccataccttttacacagaagttcccaaatgcagatccacttgcattaggtttgttagagcgaatgctagcttttgagccaaaagacaggccaagtgctgaagaggctcttgctcatccttattttaagaatatagccaatgtggatagagagccttctgcacaagctgtcacaaagctcgaatttgagttcgagagacggagagtcactaaagatgacataagggaacttatatatagagaaattcttgagtatcatccaaagatgttgaaagaatttattgagggaactgagtcaagtggtttcatgtacccaagtagataattttaaaaagcagtttgcataccttgaggaacattatgccaagggatctacgggaactccacctgagaggcaacataactcattgccacggccttctgttgtctattcagacaaccaatcacaaagcacggccaatataacagaggatctttccaagtgtataatcagagaaaatgcacagaagtcacagcaatataatgcttcagttgcaaataaatttccatcccatgttcctcaaggtgctgctgcaaggcctggtaaagcagttggttcggtgctgcagtacaacctctctcaagcatctgctgctgagcaatatgagcagcgaagggttgctaggcacccagcagttgccccaaacaacatcccttctggaagctcataccccagaagaaatcagacctgcaagagcgagacaggcgacactgagaggatggacgtgaaccaagctgggcagccgaagtcctatgcagcaaacaaactacctgcaactgttgatggtcgcggcggccattggtagatctccgcgttgtgtaacacgttatcagcatctgttacttgtgctaagcgctacattattctgacaaattcagaaatgtagttctgtacagatccgtattctttccccggattcctaagtactgtagaacggtgctcgaaatcgctgggtttccacctcctgtcgctattcattcactgaaagatctgctggctggtggagatttgtcagactgaagtatactggaagctcactggcagcagcgggaactcaagcaagcagagttcttgactgacgttgtcatttgttcttcagcctggtaggtctaacgagctgaatactgttagttcctgtgaatcatctacacgtcaggtgcagaattctgttgagctagctaggaggtgcaagcatgttgtacgctgaatatcaaagtcattgatcctttactcatgttatcttggttaaacgtgagatatatgctagcgtgtagtatccctgtttcccaacaatatacttactcaccacattgttcacgtatagctgatact

SEQ ID NO: 22739 - DNA, 1576 bp, Zea Mays
tatcagttcttcttgtatcagttgcttcgaggtttgaaatacatacacacagcttattgcagcaaatgtattccatcgagatctcaaaccaaaaaatattctggcaaatgctgattgtaagctcaaaatatgtgattttggcctagcaagagtagctttcagtgatactccaaccgcgatcttttggacagattatgttgcaactaggtggtaccgagcaccggagctgtgtggatcatttttctcaaagtatacaccagcgatagatatatggagtattggttgtatatttgcggaactattaactggaaaaccgcttttcccggggaaaaatgtggtacatcaacttgatataattacagatctcatgggaacaccttctccagaagcaatatcgaggattcgtaatgagaaggccaggcgctacttgagtaatatgaggcggaaaaagcccataccttttacacagaagttcccaaatgcagatccacttgcattaggtttgttagagcgaatgctagcttttgagccaaaagacaggccaagtgctgaagaggctcttgctcatccttattttaagaatatagccaatgtggatagagagccttctgcacaagctgtcacaaagctcgaatttgagttcgagagacggagagtcactaaagatgacataagggaacttatatatagagaaattcttgagtatcatccaaagatgttgaaagaatttattgagggaactgagtcaagtggtttcatgtacccaaggtgctgctgcaaggcctggtaaagcagttggttcggtgctgcagtacaacctctctcaagcatctgctgctgagcaatatgagcagcgaagggttgctaggcacccagcagttgccccaaacaacatcccttctggaagctcataccccagaagaaatcagacctgcaagagcgagacaggcgacactgagaggatggacgtgaaccaagctgggcagccgaagtcctatgcagcaaacaaactacctgcaactgttgatggtcgcggcggccattggtagatctccgcgttgtgtaacacgttatcagcatctgttacttgtgctaagcgctacattattctgacaaattcagaaatgtagttctgtacagatccgtattctttccccggattcctaagtactgtagaacggtgctcgaaatcgctgggtttccacctcctgtcgctattcattcactgaaagatctgctggctggtggagatttgtcagactgaagtatactggaagctcactggcagcagcgggaactcaagcaagcagagttcttgactgacgttgtcatttgttcttcagcctggtaggtctaacgagctgaatactgttagttcctgtgaatcatctacacgtcaggtgcagaattctgttgagctagctaggaggtgcaagcatgttgtacgctgaatatcaaagtcattgatcctttactcatgttatcttggttaaacgtgagatatatgctagcgtgtagtatccctgtttcccaacaatatacttactcaccacattgttcacgtatagctgatact

SEQ ID NO: 22740 - DNA, 1812 bp, Zea Mays
tatcagttcttcttgtatcagttgcttcgaggtttgaaatacatacacacagcaaatgtattccatcgagatctcaaaccaaaaaatattctggcaaatgctgattgtaagctcaaaatatgtgattttggcctagcaagagtagctttcagtgatactccaaccgcgatcttttggacagattatgttgcaactaggtggtaccgagcaccggagctgtgtggatcatttttctcaaagtatacaccagcgatagatatatggagtattggttgtatatttgcggaactattaactggaaaaccgcttttcccggggaaaaatgtggtacatcaacttgatataattacagatctcatgggaacaccttctccagaagcaatatcgaggattcgtaatgagaaggccaggcgctacttgagtaatatgaggcggaaaaagcccataccttttacacagaagttcccaaatgcagatccacttgcattaggtttgttagagcgaatgctagcttttgagccaaaagacaggccaagtgctgaagaggctcttgctcatccttattttaagaatatagccaatgtggatagagagccttctgcacaagctgtcacaaagctcgaatttgagttcgagagacggagagtcactaaagatgacataagggaacttatatatagagaaattcttgagtatcatccaaagatgttgaaagaatttattgagggaactgagtcaagtggtttcatgtacccaagtagataattttaaaaagcagtttgcataccttgaggaacattatgccaagggatctacgggaactccacctgagaggcaacataactcattgccacggccttctgttgtctattcagacaaccaatcacaaagcacggccaatataacagaggatctttccaagtgtataatcagagaaaatgcacagaagtcacagcaatataatgcttcagttgcaaataaatttccatcccatgttcctcaaggtgctgctgcaaggcctggtaaagcagttggttcggtgctgcagtacaacctctctcaagcatctgctgctgagcaatatgagcagcgaagggttgctaggcacccagcagttgccccaaacaacatcccttctggaagctcataccccagaagaaatcagacctgcaagagcgagacaggcgacactgagaggatggacgtgaaccaagctgggcagccgaagtcctatgcagcaaacaaactacctgcaactgttgatggtcgcggcggccattggtagatctccgcgttgtgtaacacgttatcagcatctgttacttgtgctaagcgctacattattctgacaaattcagaaatgtagttctgtacagatccgtattctttccccggattcctaagtactgtagaacggtgctcgaaatcgctgggtttccacctcctgtcgctattcattcactgaaagatctgctggctggtggagatttgtcagactgaagtatactggaagctcactggcagcagcgggaactcaagcaagcagagttcttgactgacgttgtcatttgttcttcagcctggtaggtctaacgagctgaatactgttagttcctgtgaatcatctacacgtcaggtgcagaattctgttgagctagctaggaggtgcaagcatgttgtacgctgaatatcaaagtcattgatcctttactcatgttatcttggttaaacgtgagatatatgctagcgtgtagtatccctgtttcccaacaatatacttactcaccacattgttcacgtatagctgatact

SEQ ID NO: 22741 - DNA, 1725 bp, Zea Mays
tatcagttcttcttgtatcagttgcttcgaggtttgaaatacatacacacagcttattgcagcaaatgtattccatcgagatctcaaaccaaaaaatattctggcaaatgctgattgtaagctcaaaatatgtgattttggcctagcaagagtagctttcagtgatactccaaccgcgatcttttggacagattatgttgcaactaggtggtaccgagcaccggagctgtgtggatcatttttctcaaagtatacaccagcgatagatatatggagtattggttgtatatttgcggaactattaactggaaaaccgcttttcccggggaaaaatgtggtacatcaacttgatataattacagatctcatgggaacaccttctccagaagcaatatcgaggattcgtaatgagaaggccaggcgctacttgagtaatatgaggcggaaaaagcccataccttttacacagaagttcccaaatgcagatccacttgcattaggtttgttagagcgaatgctagcttttgagccaaaagacaggccaagtgctgaagaggctcttgctcatccttattttaagaatatagccaatgtggatagagagccttctgcacaagctgtcacaaagctcgaatttgagttcgagagacggagagtcactaaagatgacataagggaacttatatatagagaaattcttgagtatcatccaaagatgttgaaagaatttattgagggaactgagtcaagtggtttcatgtacccaaggccttctgttgtctattcagacaaccaatcacaaagcacggccaatataacagaggatctttccaagtgtataatcagagaaaatgcacagaagtcacagcaatataatgcttcagttgcaaataaatttccatcccatgttcctcaaggtgctgctgcaaggcctggtaaagcagttggttcggtgctgcagtacaacctctctcaagcatctgctgctgagcaatatgagcagcgaagggttgctaggcacccagcagttgccccaaacaacatcccttctggaagctcataccccagaagaaatcagacctgcaagagcgagacaggcgacactgagaggatggacgtgaaccaagctgggcagccgaagtcctatgcagcaaacaaactacctgcaactgttgatggtcgcggcggccattggtagatctccgcgttgtgtaacacgttatcagcatctgttacttgtgctaagcgctacattattctgacaaattcagaaatgtagttctgtacagatccgtattctttccccggattcctaagtactgtagaacggtgctcgaaatcgctgggtttccacctcctgtcgctattcattcactgaaagatctgctggctggtggagatttgtcagactgaagtatactggaagctcactggcagcagcgggaactcaagcaagcagagttcttgactgacgttgtcatttgttcttcagcctggtaggtctaacgagctgaatactgttagttcctgtgaatcatctacacgtcaggtgcagaattctgttgagctagctaggaggtgcaagcatgttgtacgctgaatatcaaagtcattgatcctttactcatgttatcttggttaaacgtgagatatatgctagcgtgtagtatccctgtttcccaacaatatacttactcaccacattgttcacgtatagctgatact

SEQ ID NO: 22742 - DNA, 1747 bp, Zea Mays
tatcagttcttcttgtatcagttgcttcgaggtttgaaatacatacacacagcttattgcagcaaatgtattccatcgagatctcaaaccaaaaaatattctggcaaatgctgattgtaagctcaaaatatgtgattttggcctagcaagagtagctttcagtgatactccaaccgcgatcttttggacagattatgttgcaactaggtggtaccgagcaccggagctgtgtggatcatttttctcaaagtatacaccagcgatagatatatggagtattggttgtatatttgcggaactattaactggaaaaccgcttttcccggggaaaaatgtggtacatcaacttgatataattacagatctcatgggaacaccttctccagaagcaatatcgaggattcgtaatgagaaggccaggcgctacttgagtaatatgaggcggaaaaagcccataccttttacacagaagttcccaaatgcagatccacttgcattaggtttgttagagcgaatgctagcttttgagccaaaagacaggccaagtgctgaagaggctcttgctcatccttattttaagaatatagccaatgtggatagagagccttctgcacaagctgtcacaaagctcgaatttgagttcgagagacggagagtcactaaagatgacataagggaacttatatatagagaaattcttgagtatcatccaaagatgttgaaagaatttattgagggaactgagtcaagtggtttcatgtacccaagtgcagtagataattttaaaaagcagtttgcataccttgaggaacattatgccaagggatctacgggaactccacctgagaggcaacataactcattgccacggccttctgttgtctattcagacaaccaatcacaaagcacggccaatataacagaggatctttccaagtgtataatcagagaaaatgcacagaagtcacagcaatataatgcttcagttgcaaataaatttccatcccatgttcctcaaggtgctgctgcaaggcctggtaaagcagttggttcggtgctgcagtacaacctctctcaagcatctgctgctgagcaatatgagcagcgaagggttgctaggcacccagcagttgccccaaacaacatcccttctggaagctcataccccagaagaaatcagacctgcaagagcgagacaggcgacactgagaggatggacgtgaaccaagctgggcagccgaagtcctatgcagcaaacaaactacctgcaactgttgatggtcgcggcggccattggtagatctccgcgttgtgtaacacgttatcagcatctgttacttgtgctaagcgctacattattctgacaaattcagaaatgtagttctgtacagatccgtattctttccccggattcctaagtactgtagaacggtgctcgaaatcgctgggtttccacctcctgtcgctattcattcactgaaagatctgctggctggtggagatttgtcagactgaagtatactggaagctcactggcagcagcgggaactcaagcaagcagagttcttgactgacgttgtcatttgttcttcagcctggtcatgtttcaggaatcattgatatagagatatcaaattaataatatggatgcatgataaagtttatgttgatggatacaatagagatgttgttgctattgttgcgatattgatcaacaacgaacttgaatagcatgagtgaacgtgtt

SEQ ID NO: 22743 - DNA, 1566 bp, Zea Mays
gcaggtgtacgtacgtaaagcgagagtcgacgcgtgggcgcggcagacgcgagcctcccgccacgttggcctcgttcccgcgccacgcggccacgcctgcctgcctcctcaccttgtttatatgcctcgcgcctccctcaccgtgccaatgccatgcgcgcgctactgcatctgcggctcatcaatccgtgcagtcccagagcaccccgtcttcccgctactcccgcaagggcgctcgtcgcttccttctccggggcgtggcaggcaccttctggtagagcgagagcgagagcagcgccgccggcagttcgcgctatggcgtcccagcaggtgttccgggctcagcagcagcagcagcagcagttcccggctcagcagcaggagtcccagccggggaaggagcacgcgatggacccccggcccgaggccatcgtccaggactacaaggccgccaacaagctcaaggacaaggtggcgctcgtgaccggcggcgactccggcatcgggcgcgccgtgtgcctgtgcttcgcgaaggagggcgcgacggtggccttcaccttcgtgagggggcaggaggagaaggacgcggaggagacgctgcgtgcgctgcgcgacgtgacggaggcggacctggagcgcgtgttccgcaccaacatcttctcctacttcctggtgtccaagcacgcggtgccgcgcatggagcccggcgcctgcatcatcaacacctcctccgtcaacgcgtacaagggcaacaagacgctgctggactacacggccaccaagggcgccatcgtggccgcgcagccggccgagatcgcgcccagcttcgtcttcctcgccagcaaccaggattcgtcctacatgtccggccagatcctccacgtcaacggaggcgtcatcgtcaatagctagatacggaagctgttttgctgtcgtgtccaagtctaagggaacaaagcgagtgtccgtgtgtaccaggtagcagtgtcagtacgtgcacgcaggaaggcaaggcagggttcagttgtagcggtgtgtaatgctgtcagcacagcacttgtaaagaaggaaggtgtctgaataaatatgcgtccaagcatgaagacttcctccgtacgtggtttgcacaaaataatcgtacgtcccggtgcagtggtacttgctagtgcaccattctccccctcttttggacgagctttatcccggccgggacacgttcagtagaacactaaattcgaaaccaaggttcaaagttggtttagcaacacattaaattcgcatatgcatttgagccagatgaatcacgtcgatcatggttacaaccggacgtatagcagtgtgcaacttcaacattcaccacgctaatgagtcagcctttacctttatatattctaaaagcaaaatcacatgtcaacgcttatagcgctgatgttctctcgacactgtttagaaaacaaaaacaaaatatgcaaacaaaaaagacgaagctatcatcttcagccacggcgaagccatctgcttgcttgcgagtcaaaactggagacatcatcttaaagctccctcaac

SEQ ID NO: 22744 - DNA, 9483 bp, Zea Mays
gtgcaaatgaataatttttctggggtacctctaactgcaagatcgctacatcaaaaacaggttagtatgtgtaactactaggacatttccatataatgccactattcaactgctacatgaagcacagttgaaattcctctccaaaactcggcctcacagtttcttaagtcaccttgtgacatttgaggtaacttaaacaaagaagagtacaaaaggtattcatgatgattagtggtatattacaattatctatatctagattgaaatcaaagtctctttcatatttccttattttgaaagaaattccagactaaactgctgccgagttatagacaggcctattccttacaaactcaaaaagtctatataacccccaaatgtttcgatggttgactacataaccccctcaactatgaaaccaggtattgtaaacttaaagtatcccataccattcaaacaaccccaccatggtggttttgaaggcggttatgctgatgtggcatattaaaaggatggtggcataactttgagtcaacaaataatatctttctcatctccatctcttacgttaagaccccatatatcatttatgccttatcaactttgctcaactgctgtttcctgcacaacccagatctccgatggccactgtgcctgttgcccttccgctggccacagtggatgacaaaatctacaagctcatgccctgcatccacaactacaagaaccacgaggaagatactccggctccaggttcatcgttgtctccatggatgctgccacctgcattgtcggacatgtggacattcaggacctcgtcgttcatgccacacttgaggaatcaagggtccttgagctcgggaatcgctcctgctggttcttggctggctcaagatgctgcaatgttcaatgtgaagaaggtctggctagtatcctatctgccaccagggctcaagattctgccatacccacacttcgtcctcgacaacctcctcccaggacataatagccttaaggctttggacattgctggcgtcttccatgtggcgtgtagaccactcatccgttgtggagagaccgaagcaggagagatcacgggaggtgggaagggtgaagaggaagagtagaaataaaaaaaaaagaatataaaccttacaggggggctgtgtactagtgtggcatgctgtcatgtggggccgcacctatacgcgggaccgcgacgccaggagagctgaggctcgggcgttcaaattggacgccaacagcagctcacctaaggaaggttcgtccaaggaaagtggcagcagctcaaccaaggaaggtccgtccaaggaaagtggctagattagtggccaaattgataggccttaatcgtaggggagttggtttccaaacaagtcatttcctaaattagaagttatctagttggtcaggccagtggcctatttatatggaaccgtgaggcaatgaagggaataagaaatatatcaccttaatctcccatctccctgtactctctaagcctacggcggaggaatacctcgccggagaagacggacggcggatacgagctacgtagccacggtccagctactcgagggcttaacgcccttgacaacctggtatcacgatcccggcgatcctcttcccactccaccactacaccagccgccaccacctcaccaccacccccagccgccgcaccaacttcaccgacgtcctctgtggtgtcctgcgttccagccatgggcgattccaacgacttcaaggcctttgccgaggctctcaagtcactgcaagcgtcagtcacggccaacgcccaggccatcgccagcctcacagccgaccgcacgtccgcctcaggccacaagatcggctacggcgagcaccatggggaccggccaccgaggttccaaaagctggactttccccggtacgatggtaaaaccgaccctctcatcttcatcaaccgctgcgaatcctacttccatcagcagcgcatcatggaggaggagaaggtctggatggcatcctacaacttggagcacggggcgcagatgtggtatatccaggtccagacggacgagggtactccatcgtggcgccggttcaaggagttgctcaatctgcgctatggccctcctctccgcgccgcgcctctcttcgagctggccgattgccgccgcacggggtccgtcgcggactatcaggaccgcttctaggcgatccttccacgtgcaggacccctcgacgaggcacaacgggtccaactattcacggggtgtctctgtcccccgctcagccttgacgtccaggtacacaacccgcagtccctagcggctgccatgagcctggcgtgccacctggagcttcgggagcaatatacaccgacgcctcccaagggtgcgccccgtggcctgctgccgacccctgcaccgcgactagctctgcctgccccgccggctgagcagacagccacgcccacagtcatggcagatgggcacaaacgcctatccatgcaggagcaagaggagcgccgtcggcagggcctctgcttcaactgcaacgagcgctacacacgggggcacaaccacgtctgtacgcggatcttctacatcaacggcgtcgagttggacaccgctgacgagtccgccacgggggatgacccacgacacgaagacaccggtgttctcccttcacgccgtcgccggggtattcgtcggcaatacggtacaactgcaggtggtcgtcggcgccgctactttcgtcgcgctcatcgacacgggctcaacacacagcttcatcggggaagcggctgcgcgacgctcggggctaaccatcgagtcgcggcctcgactcacggcaacggtggccaatggggaacgcgtggcctgcccgggcgttcttcgccaagctccggtcgacgtgggcggcatggtattcggcgtcgatctcttcgtaatgccttagccgggtacgacgtcgtcctcggcacgcactggatggccacgctcgggcccattgtatgggacttcaccgcccgaaccatggcattccagtgggaggggtgcgatgtctgctggcgcggcgtggcacctccatctgcgtcgactcttctcgccgccacagccgacgacaccctcatcgacgggctgttacacgccttcgccgatgtattcaccgagccgatcggactacctccagcacggggccgcgagcaccacatagtcctcaagctgggctcctccccggtggcggtgcgaccgtacaggtaccctgcggcgcacaaggacgaacttgagcggcagtgcgccgccatgatcgaccagggcatcgtccgccgcagcgactcagcgttctcgtccccggtcatcctcgtcaagaagccagacgggtcgtggcgcttctgcgtcgactaccgcgcgttgaacgcgctcactgtcaaggacgcgttctcgatcccggtcgtcgacgagctccatggcgcacgcctcttcaccaagctggacctgtggtcggggtatcaccaagtacggatgcggcaggaggacgtccataaaacggcgttccgcacccacgacggcctctacgagttcctggtgatgccgttcgggctgtgcaacgccccagccacattccaggccttgatgaacgacgtcctgcgaacctacctccgccggtttgtgcttgtcttctttgacaacatcttatatacaacacctcatgggtggaccacctccggcacctccacgtcatcctcaacaccctgccagcaccgactctttgtcaagaggtccaagtgctcatttggtgttgactccatcgcctacctcggccacgtcatttcagcggttggcgtcgctatggaccccgcaaaggtccaagccatccacgactggccccaacctcgttcggcgtgagccgtgcgtggcttcctcggtttggcaggctactaccgcaagttcgtccacaactatggcgccattgtagcacccctcacggcactcctgaagaaagaggggttcgtgtggtccgacgaggcaaccgccgctttcagtgccctcaaaggggcagtgacgacagcaccggtgttgacattcccggacttcaccaagcccttcgtcgtggagtgcgacgcgtccacctatggcttcggggcggtgctcatacaggaggctcatctgatctccttcttcagccgaccggtggcgccccgccatcgctccctagcggcctatgagcgcaaactcatcgggcttgtgcttgtcgtacgacattggaggctgtacctgtgggggcgacgcttcgtcgtcaagacagaccactacagcctcaagtacctcctcgatcagcgcctggcgaccattctgcagcatcattgggtgggcaagatcctcgggttcgacttctccgttgagtacaagtcaggagcaacgaacacggtggctgacgcgctctcgcgccgcgacaccgacgaggacggcacggggactctccaggcaatctcagctccccgcttcgacttcatcagccgcctccgacacgcccaggctactgagcccgctctggctgccatccacgacgaagtcagggcaggcacacgcactgctccatgggcggtggctgacgacatggttctctacgacaggcgcctgtacatcccaccggcctcgccacttctgcaggagattgtggcggctgtccataatgatggacatgagggcgtccagcgcacgctacaccgcctccgtcgtgacttccattttcccaacatgtgtcgtgttgtgcaggacttcgtacgggcatgtcccacttgtcagcggtacaagtcggagcatcttcacccggcaggtctcctcatgccactaccgattcccaccgtcgtttgggcggacatcggcctcgacttcattgaagcactgccccgtgtcaacgagaagtcggtgatcctctccgtcgtcgaccgcttcagcaagtactgccacttcatcgccctcggccacccgtacaccgccgagtcggtggcgcaggccttcttcgccgacattgtacgcctccatggcgtgccgcaatccatggtgtccgaccgcggcccggtgttcacctcgacgttctggcgtgagctcatgcggctcatgggcactaagctgcacatgtcgtccgtcttccacccacagtcagacggccagacgaaggcggccaaccgcgtcatcattatgtacctccgttgtttcacaggcgaccgtcctcgacaatggcttcgctggctgccatgggccgaatacgtgtacaacacggcataccagtcctcgctccgggagacgccattccgggtggtgtatggtcgtgacccgccctccatccgctcttatgagcctggtgaaacaagggtggatgcggtcgcacgcgacatggaggaacgcgaggcattcctcgccgatgtgcgccatcgcctcgagcaggcacaggcggtgcagaaacgccactacgacaagcaacaccggccagtgacatacgcagtcggcgactgggcgctccttcgacttcgccagcgagctccgtcctcactgccacaacaaacaacgggcaaattgaagccccgcttcctagggccataccgcgtcatcgagctcatcaacaatgtcgtcgttcgcctggagctaccaccacaggcccgcattcatgacgtcttccacgtgggcaccctgaagaagtttgtaggggcacctccatccgccccaccacccctacccgacatccatcatggggcgattgttccagagccatctcgggtagaacgcactcgcctggcacagggtgttcaacaggtgctggtcccgtggcggggcgaaccagcaacttcggcgacctaggaggacctcgacaagtttcgcgccacctacccagattttcagctcgaggacgagctggacctcgagggggggagagatgtcatgtggggccgcacctatacgcgggcccgcgacgccaggagagctgaggctcggccgttcaaattgggcgccaacagcagctcacctaaggaaggttcgtccaaggaaagtggcagcagctcaaccaaggaaggttcgtccaaagaggaaagtggcagcaactcaaccaaggaaggtccatccaaggaaagtggctagattagtggccaaattgataggccttaattgtaggggagttggtttccaaataagtcatttcctaaattagaagttatctagttggtcaggccagtggcctatttatatggaaccgtgaggcaatgaagggaataagaaatatttcaccttaatctcccatctccctgtactctctaagcctacgacggaggaatacctcgccggagaagacggacgacggatacgagctacgtagccgcggtccagctgctcgagggcttaacgcccttgacacatgccaaggtggcaaaactgccatgcaaaaccagctaaggggttatttgaatagattaattttttttatcgaacacgcatgatagttgtgcatctttatatatttaactttagagagaagaaaaggtcttacaagaaaggtaacttgctaggcaagttccccaaaaccacccacatacaaagggtagtattaaatactttaagggttacaatacctagtttaacagttggaggggttagtcaaccatcaatacattgaggggttagtgcagctccaaaaggacacaaattttcttccccaaggcgtcttattagcgctgttgttaaaaatgagattcctaaaaaaagttaaacccacagtagactcctaataaataagccctaatattttaatgtgggccacaccatgtgctaattgggctggttgctagacttgcatccgtacttgtgtccttaccatcagatggatacgcgtacctggcggctggcattgcaccggagtcagttagctgcgcgtgagatgggcgattggggaaggctccgcgacgcgcaaatttgcggggcagcaagcagcggatgcgggacgcgaagaatatggagacaagagagagctattggaggacttaaaatatgttttctttcctaaaaacacttttggggttggtttacaggatttcttggagatgctctgatataggctctttccttacaaactccttttttgaaggtgcgcataagaaataagaatagataaactgactggtaacacaacgcgccagctccctaagggaccctagcagtttgcctgctggtggtcatttttggtcgggttgttgctctgtgtgcgtggtgcgttgtgttaatttcaggggggtctcggcctaagggcctttgtattaggggttgacaagtcttgtctctcttatgtttctttttcttcttaatataatgacacacaactctcctgcgtttgtgtatatatatatatatatatatatatcagttgatcccattatgctgaatggtacaaaataaattacttataaaaaactgtttttaaaaaactaagaatatcttgaaaatggaaaaatcattttcgtttgaaatgctaggtctgctttcaccatgataaaagatcagcttccataaaaaatacctagataaagactaacctgagcagcaaatgcattgtatccaacaataggtccagcaatatacactggagcatatgtcaagtagcataaatacataagaaatgtatatctgtcaagactgagccctctttcctgcaagaacagtgctttatcaccggaacaaagaatgaatatagttcagttcctaaataaattgcttaagctaaataaagttataaataaaaaaaactcaacaatgatacaatgacataccatagtagaaaagattaaaaatgccaagacctaatttacagacaacctaagtctatattgaattcacctaaaggtcaacctggtgtcagcagaaactaaccattccttagtaagtcttcttccaatatcttctcatgagaggcctgattccttggagacaatttcttatttgacactagtaaagttcatggttcctttcttggccctcaaaatataaattttacctatttgacattagacgtaaatttggttcactatatgacactaccgttaattctgacctctaacggtgttaactttcataagaaaagatgattttacatttttacccctgttgaagatagtatatataacttgtagcaaagtgtaatatatttccataataacctgtattacaccattttgatgctacagaactaacggtaaaattaagtatttatattacaatagtgtactataggttattatgccattatgaaaagagtaaaatgcagtagcggtcctcaaacttggcacgatgtgtcacttaggtcactgaacttaaaaaaccagtaaaacaggtcctctaactttgtaggcctgtgcaaaaccatccaaaaccacttttgctcaaactggatgtcgatgtggcatgtcacattgaattcacttgggtctctgaacttagcatgttgtgtcacttggatccccaaagttgacatgttgtgccacttgagtccaagaactttcattagtatgctccaacgtttttttctcgaaaacgcaggaaaactgcatttcattaaattaagaagcaaaatggtagagcaaaccaagtacaaagggctccttacggaggccggaaacaaagaaacctaaatggactcatctagaaaccaaaaaaacaaacgaccataaccacctcacagaacacttatgaccaaataccacgtagccctacaattccagccatacaacaaagagatgcccatgcctcatctttgatatcctggatgatcttggtaatgctaggtggaacttttatgctccaacgtggcatgccatgtcggcattcggtttgagcaaacccggttttggacggttttacacaggctgacaaagttcgaggactcgttttgctggttttctaagttcggtggcccaagtgatacaaaatgccaagttcgaggaccgctactgtattttactcttatgaaaatatattacactttgcatcaagttatatgtactatcttcaatatgggtaaactcgtcttttcacatgaaagttaacaccactagagatcaaaactaaggtagtgttatatagggaaccaaatttacattcaatgtcaaataaagaagatttatattttgaaggttaagaaaagaaccaggaactttactagtgtcaaataaggaattgtctcaattccttgcccccatgcaaattcatatgcaagtcagtcagcgtgggggcacgaaaaagacctcatgcagtaatcgttaatgtatcaaaataagaatgctagttttgttcttgcttatgccaaaactagttttcatgaaactaaaccagaccttacatatgtctaaaaccttaacacatttagaaaaatggattaattgttacaagaaaattggaagactgaaatacctgcaaagcaaagtag

SEQ ID NO: 22745 - DNA, 50 bp, Zea Mays
gcgttttcgcaccggcctgtgttggaagccgaagcttcgatcgatcggag

SEQ ID NO: 22746 - DNA, 1188 bp, Zea Mays
cgtagatattgttgtgagccgtcgcaacacacaggtaactgactagtaaatgtttatcattcatagcgtcccacgaaataagatgactgtcaaaacctttcctagtctgtgcccaaatcaaacacaacacaaatcacttcgtttgagcacaggaaaaaaatgcttttcgaatcctaagacttgggcccactgtcagcctcggtagatatcacactcactagtccactcccctcttcactcccgtcggtggattccatgtccaaccgcgtcgccggaggccggaaccatgaagcctgtcagtgtcgccgaacacaacaaccaccagcctcgcctgcactcccccacgccggcgtcggcgaccaagatctcgatccccatctcttcgagcgaggcggcgctgttcgggaagggtaggtacaaggtgtgggccctcgcggccatcgcgctcctagcgctctggtccatgttcgccgcctccgtcacgctgcgcttgtcctccgtcgatctcgccaccacgttcggggacgcgagcgatccgctcatcgacgaacttgatcccctggagatggagcaaagagaaaagctagtgcgccggatgtgggatgtgtacacacgcacagataatcatctatatctgagattgctcgcatgtcaatccataggcctgaggttgagcaatcgtcgaataaggattaggagatcagaggaacaggacagatatttggaagggtggaactggtacgctgaaggtgaagaacgttaaaaatggtgccgtcccatctaaagacggagttgcaaagtctgacccttagcgccgcagcaatttaaggagatgtttggtttgaataatcaatctattttagatgaggtgatgtatcataagttcattccacaaatttggtagaataaatttattcctcatattatgactaattattaacctatgaggaataaaattatggtggatcaacctattctattatttaaaccaaaagtaaggagtaagaagatggactatctcatttctcaaactaaacatctcataagctttataagttgcgttgtctttaatttgttagttttgtttacaacctattctattatttaaaccaaaagtaaggagtaagaagatggactatctcatttctcaaaccaaacatctcataagctttataagttgcgttgtct

SEQ ID NO: 22747 - DNA, 640 bp, Zea Mays
cttcgtttgagcacaggaaaaaaatgcttttcgaatcctaagacttgggcccactgtcagcctcggtagatatcacactcactagtccactcccctcttcactcccgtcggtggattccatgtccaaccgcgtcgccggaggccggaaccatgaagcctgtcagtgtcgccgaacacaacaaccaccagcctcgcctgcactcccccacgccggcgtcggcgaccaagatctcgatccccatctcttcgagcgaggcggcgctgttcgggaagggtaggtacaaggtgtgggccctcgcggccatcgcgctcctagcgctctggtccatgttcgccgcctccgtcacgctgcgcttgtcctccgtcgatctcgccaccacgttcggggacgcgagcgatccgctcatcgacgaacttgatcccctggagatggagcaaagagaaaagctagtgcgccggatgtgggatgtgtacacacgcacagataatcatctatatctgagattgctcgcatgtcaatccataggcctgaggttgagcaatcgtcgaataaggattaggtattcttccggaggtggtttccatttctcagtttgaagcaacgtccattggatcttttataattttgagctggttgaac

SEQ ID NO: 22748 - DNA, 1106 bp, Zea Mays
gcttttcgaatcctaagacttgggcccactgtcagcctcggtagatatcacactcactagtccactcccctcttcactcccgtcggtggattccatgtccaaccgcgtcgccggaggccggaaccatgaagcctgtcagtgtcgccgaacacaacaaccaccagcctcgcctgcactcccccacgccggcgtcggcgaccaagatctcgatccccatctcttcgagcgaggcggcgctgttcgggaagggtaggtacaaggtgtgggccctcgcggccatcgcgctcctagcgctctggtccatgttcgccgcctccgtcacgctgcgcttgtcctccgtcgatctcgccaccacgttcggggacgcgagcgatccgctcatcgacgaacttgatcccctggacgattagcagttagcaccatgctaaactgttaataaacagctacacttacatgaactttagtctccattggtgcaaggagatggagcaaagagaaaagctagtgcgccggatgtgggatgtgtacacacgcacagataatcatctatatctgagattgctcgcatgtcaatccataggcctgaggttgagcaatcgtcgaataaggattaggagatcagaggaacaggacagatatttggaagggtggaactggtacgctgaaggtgaagaacgttaaaaatggtgccgtcccatctaaagacggagttgcaaagtctgacccttagcgccgcagcaatttaaggagatgtttggtttgaataatcaatctattttagatgaggtgatgtatcataagttcattccacaaatttggtagaataaatttattcctcatattatgactaattattaacctatgaggaataaaattatggtggatcaacctattctattatttaaaccaaaagtaaggagtaagaagatggactatctcatttctcaaactaaacatctcataagctttataagttgcgttgtctttaatttgttagttttgtttacaacctattctattatttaaaccaaaagtaaggagtaagaagatggactatctcatttctcaaaccaaacatctcataagctttataagttgcgttgtct

SEQ ID NO: 22749 - DNA, 729 bp, Zea Mays
ttctaaggcaggaaaaagtgggaggacgattagcagttagcaccatgctaaactgttaataaacagctacacttacatgaactttagtctccattggtgcaaggagatggagcaaagagaaaagctagtgcgccggatgtgggatgtgtacacacgcacagataatcatctatatctgagattgctcgcatgtcaatccataggcctgaggttgagcaatcgtcgaataaggattaggagatcagaggaacaggacagatatttggaagggtggaactggtacgctgaaggtgaagaacgttaaaaatggtgccgtcccatctaaagacggagttgcaaagtctgacccttagcgccgcagcaatttaaggagatgtttggtttgaataatcaatctattttagatgaggtgatgtatcataagttcattccacaaatttggtagaataaatttattcctcatattatgactaattattaacctatgaggaataaaattatggtggatcaacctattctattatttaaaccaaaagtaaggagtaagaagatggactatctcatttctcaaactaaacatctcataagctttataagttgcgttgtctttaatttgttagttttgtttacaacctattctattatttaaaccaaaagtaaggagtaagaagatggactatctcatttctcaaaccaaacatctcataagctttataagttgcgttgtct

SEQ ID NO: 22750 - DNA, 321 bp, Zea Mays
ctttagtctccattggtgcaaggagatggagcaaagagaaaagctagtgcgccggatgtgggatgtgtacacacgcacagataatcatgtacggctaccacggttctggcaagaagcatttgaggctgcatatgaggagcttgctggtgatgatacgcttactactgatgcagctatatctgagattgctcgcatgtcaatccataggcctgaggttgagcaatcgtcgaataaggattaggtattcttccggaggtggtttccatttctcagtttgaagcaacgtccattggatcttttataattttgagctggttgaac

SEQ ID NO: 22751 - DNA, 1219 bp, Zea Mays
ccaaaccttaaagcgccgcgcccatcccttcttctcacgtactctactacacgtctacaccttggctctccttcggtcctgcacactcccgcgtcagctgccatcccggagctcggagccgtcggcggcagcggcaccactccactcgcatggccgacaagcagctctccacgatcgtcctcaaggttgaccttgaatgcgagacatgctacaaaaagatcagaaaagtcctccgcacaatccaagacaagatgaacatcgagacgatctcgtttgatgagaagagcaatgccgtgacgatctccgggccgttcgactccgacatggtctgcaacaggctctgctgcaaggccggcagggtcatcaaggagatggacgtcaaaggcaacgagaaggacgccaaggccgagaagaaggagggcaagggcgacaaggaggataccaagtcagacagggcagagaaaggaaacaaagacgggaaggcggaggccgagacggtggagttcgacctcgacgtggacggcgtggcctccgcggcggacgcgaagcccggcaaggccatggcgatgccgcccggcatgaccaaggccgacctcggcccgctcctggagaagatgatggcgccgggagccacgcagagcgtggtcgtgccgtccatctggcccgcgtccgccgggttcgtgtccggctactacggctgcaacccgggctacgaggcgccgccgtcctactacggcgctggcgctggcgctgtctacggcggctactacggcgtgccggtgtacgatagccaggggtggtactacggcggcggcgcccggcagcagccgtactacccgcaccagcagcagcactgctgcgaggaccccaatgccgggtgcagcgtcatgtgatggcgatgcccgtaaacaaatggagagccacataaatcagtgtgtggtcagtggtcgtcacacaccatggtcactgactcactggtcagtgccaccgtgccggtggggggtagaaccttttttccccgcgtgtcatcttgttgtccgtgttttctagatagaaacacttttaaacggtaacagtaaaaaattgaagtgttccctaaaatatgttcgcttgcctctctccgggtcactagaggcaatgaaaatacaaataagagtataaagcttataaccgttgcaaccaaagatttctttttatagtatgattatctatcataaac

SEQ ID NO: 22752 - DNA, 669 bp, Zea Mays
gaaaattcgaaatcttttagcctcggataagtcggaaggggcatcgagtgcgggagctctgtgagagtcgtcgtcagataactccaggaggcggatcattgcaatcttggcctattccaccatggacgcacagtttggaaagtgacaagcatggatgccggtctggggttggaggtacgccttgctccgccgctttcagcaaatgcctgtcctggcccgtccctgtctgctcaattcatctccctgctcccagtttgcatccggtgtcatgtcccatgccctacatgatctggcactgcagtgttagatgtcgtctgcacaccactcatcgattatgtttacttcgtgtgttgatcgttcttgtgcgaatgccaggttggagccgttgcagtcttttggctaaatagtagtaagacagtttggagtttggactacagtttcagaacctactttgtcgttggccctctggcagagtggcagaagactatcttgttatctataatagtatgagatgttcctaaagtttagaagccaaacggtcctgcttcatgaaagaaacagcagattgggtaattgtgcggcatgattcaatcaaaacaacatcacaattcacacacaagtttactaagaacattatatttatattccttgcttcttctggcagaaaga

SEQ ID NO: 22753 - DNA, 1068 bp, Zea Mays
ccgtgctgcgcagatagcgtggcgccaaaccagcgccgtccaactgaaccagtggacagggctcgaggaggcagccccgcactacactactcgagggaagcagggaaccgtcgaaccgaggccccgtccgtcccaactcacgtttagcaagaagaaggacggtgccaataaggaggccacagcggccaagccgaagaaggccgcggcgctgccgctgccggagatgatgcaggaggagatcatcccgccgctgaaggccgccttggaggcggaggaggacgtgtcccaggtccagctcgccttcgaaaacaacacgctagagggatccttcataaaggacgacgtcccttattgtttctgggccttctttccaaaaggagacctcacaggacccaagggcttcgcgctatcgtcctacagcaacgaggtgagcaccatcgagccgttcctgatcgacgagaagagggtaacggccaagtacgtggtgttctgggtttacaagaggctggctgggcaaggcatccttccggtctggaaggaagaggagggggaggatcatcaggacgccaagtagaacacacgcaggaggcaggagggtgctgctgtgaacctacacacagtcatcatgtctgaaactgttaaagttcgtctgctaatatatatacagatgctaagagctgctgagacacatgcatttcagcatttggcttctgctgcataggcgcatagccattcgcagtcgcaatcccttcgtaatcttgtgctgcagaagccagtcaaatttgttgaacaatcgaaaccttcgtgggccgggatcgacgacgagtcccgtctgaaagctatggtatctgaatattattatttgttatcgccagtcctgcgtgccgtactctatccgtccagcccttcgccatctgtttagaatagaataccttcatgtaaatcaagagatttcagagattattaatttaagcgaaaactgttatcttattgttcggttgcatggtattctgctccctcacaattttaaatggtaaaaaaaagtaaaaaaatatacataaataaaga

SEQ ID NO: 22754 - DNA, 2020 bp, Zea Mays
atccctaatttttactccacaccagtgaaacacgacccgctggccgctggccgctgccacgctcccacgcccgagcccgagcccgggaccacgaggcagccagaagacgcgcgcgcccctctcgggtctcggccgcgccgtcgcgctcaccaggtctccaccatcaccagagtggcggcgctctctcctatcgcggcgagcgacggcggcgatgggaggaggggagatggcggggtggctgaaggcactggcgtacagcgccgggggcgtagcggtggccggcctagcggcgttggttgcgctgcaggagcgcctcgtctacgtgcccgtgctcccgggtctggcgcgctcgtaccccatcacgcccgcccgcctcggcctcatctacgaggatgtctggctccgtgccgcggacggcgtgcggctccactcctggttcatccgtcactcccccagctaccgaggtccaaccattctgttcttccaagaaaatgctggcaacatcgctcaccgtttggaatttgttcgactaatgatgcagcgactacagtgcaatgtttttatgctttcttatagagggtatggtgagagtgatggttatccttctcagaaagggatcacatatgatgcacaggctgcacttgaccatctagctcagaggaatgacatcgacacaaccaggatagttatctttggaagatctttaggaggtgctgttggagcagttcttgccaaaaacaatcctgacaaggtggccactctaatactggaaaatacatttacatccatactggatatggctggtattatgcttcccttcttaagatggttcataggcgggagctcttctaaaggtccaaaacttttaaactgtgttgttcgctctccatggaatacacttgatattgttggagaggtgagcttttggtggtttgaattaactttctgtgtctctgttttgtgctttgattaccattttcttattattttggttgcagttgaacattaggatgtaggtaacatatttcttacaaaaggttggatagcatattagcatgtattagtttatgttcgctcctttcccctttggcccgtgtgtttgaaatttataagttccaacctagattgaatcgctacatagttcagcatccaaccacaggtttctaagtatttagagcctcaaaacgttgcatctgctcatcttcatcttttttttgttctttaattcgaggacttactggtgtgtgctattcctttgcctgagttcatgttcatcgcaggtcaaacaacccattctcttcctttctggattgcaagatgaactagtcccccctccacacatgaagatgttatatgacaaagcttctgatcataacagaaattgcagatttgttgattttcctagtggtatgcatatggatacctggatgtctggaggggaccgctactggaggacaatccaattgttcttggatcaatacgctcctggagtgcagaatcatgatgccagcttcaaaagtgaaattaccgaggatgatgaagctgctgattgactggaaaatctggatcggactttttccaaatttctgtttcctgatgttgctgcaatttgtcaccaatgaactgaaactcaccgcaaacaattaattcaggcaattattctgctccattgtacctgaagcaaccgaagttgtgaatatttttcgaggatattctccaccatgctctgccgctacatttgcccctggaacttaagttatttgcccatgaaccgaatatatatcctcttgattgaatgtatgaatgatattttttttctcctttgctagtatttggaacattcctaaaaatgtggctgtatgacagcccgatagataggctgtaagctcattggctgaactatttggttttgtgattttgattgtttcctttttcgatgttaaagcatctagacctttaatatgtttggatgacacaagattattgtgattaatgtatgttttgcagaagtgttgaagtt

SEQ ID NO: 22755 - DNA, 1549 bp, Zea Mays
atccctaatttttactccacaccagtgaaacacgacccgctggccgctggccgctgccacgctcccacgcccgagcccgagcccgggaccacgaggcagccagaagacgcgcgcgcccctctcgggtctcggccgcgccgtcgcgctcaccaggtctccaccatcaccagagtggcggcgctctctcctatcgcggcgagcgacggcggcgatgggaggaggggagatggcggggtggctgaaggcactggcgtacagcgccgggggcgtagcggtggccggcctagcggcgttggttgcgctgcaggagcgcctcgtctacgtgcccgtgctcccgggtctggcgcgctcgtaccccatcacgcccgcccgcctcggcctcatctacgaggatgtctggctccgtgccgcggacggcgtgcggctccactcctggttcatccgtcactcccccagctaccgaggtccaaccattctgttcttccaagaaaatgctggcaacatcgctcaccgtttggaatttgttcgactaatgatgcagcgactacagtgcaatgtttttatgctttcttatagagggtatggtgagagtgatggttatccttctcagaaagggatcacatatgatgcacaggctgcacttgaccatctagctcagaggaatgacatcgacacaaccaggatagttatctttggaagatctttaggaggtgctgttggagcagttcttgccaaaaacaatcctgacaaggtggccactctaatactggaaaatacatttacatccatactggatatggctggtattatgcttcccttcttaagatggttcataggcgggagctcttctaaaggtccaaaacttttaaactgtgttgttcgctctccatggaatacacttgatattgttggagagatttgttgattttcctagtggtatgcatatggatacctggatgtctggaggggaccgctactggaggacaatccaattgttcttggatcaatacgctcctggagtgcagaatcatgatgccagcttcaaaagtgaaattaccgaggatgatgaagctgctgattgactggaaaatctggatcggactttttccaaatttctgtttcctgatgttgctgcaatttgtcaccaatgaactgaaactcaccgcaaacaattaattcaggcaattattctgctccattgtacctgaagcaaccgaagttgtgaatatttttcgaggatattctccaccatgctctgccgctacatttgcccctggaacttaagttatttgcccatgaaccgaatatatatcctcttgattgaatgtatgaatgatattttttttctcctttgctagtatttggaacattcctaaaaatgtggctgtatgacagcccgatagataggctgtaagctcattggctgaactatttggttttgtgattttgattgtttcctttttcgatgttaaagcatctagacctttaatatgtttggatgacacaagattattgtgattaatgtatgttttgcagaagtgttgaagtt

SEQ ID NO: 22756 - DNA, 1683 bp, Zea Mays
cccgggcccggcccagcccagcgcaggcgtgcgaacacgaagctcccctggacggagctctatcgcgtagtacggagtccacagggcgaggaaagatgctagcaggcgcccccaccggcgatgcgggccccagctccggcgctgggagcaacccacccactcggccacggaggttccccggggcggcgcagccggagatcatgcgggcggcggagaaggacgatagctacgcagcccacgtcacggaggcatgccgcgacgcatttcggcacctcttcgataaaattgcttggtcagtccctttactacttgctaacaactggttcaggccagcaaacacttggtgaagaatattgtgatatatctcaggttgcaaccttgcatggacttccacctactcctgctaggcggattctattcattttgtaccaaactactgtgccctaccttgctgaacggatcagctccagaattgttgcccgtagtattgtactcaacgaatctcagtttgatgaccatcctgaaagtgataattctagtagtgacattgcacaatccaccacaaatagtgacattccttcaagaagcttaagtgtttctgctctgtcagggttcagaggccgagttcatgccttgtggcaatgggttcttcagaaatggccttcaatgctgccatatgctcaagattttatacagttggctatccggacaaatctaatgttcttctattttgaaggtctgtattatcatttgccaaagcgagcagctggtattcgctatgtattcattggcaagccaatgaatcagagacctaggtatcagatcttgggtatttttctgttgattcagttgtgtattcttggagctgaaagactccgaagaagtaatatatcgtcaatagctagttccattaatcaaatatcatctggaggctatccatcgactacaggtcggggcatccctgttctaaatgaagatggaaatatcatcagtgacatccgcagtggtaaagctgcagatatagcttctcattcagagacctccaatggcaagagcaaatgcaccctttgtctcagcatccggcaaaatcctactgccacaacctgtggacatgttttctgctggaattgcataatggagtggtgcaatgagaagcctgagtgccccctatgcagaactccgattacccattcgagtttgatttgtatatatcattcagatttctagcaaatcatttcgcacagtaggagtccatatcatacttcactggcgtcaaaatttccagaccatatttcggcaagaaaactgcatgccaaaatggtttcgtatacttaagtgggagaagagtacgagaccatttcaagaggttaaagatcagagagttgcatacgataatttgttgtaggttgaaagtttagattgaattagggaccacaggtagtagaaattatttattggcagttcggatagtagataacttgtattggacaccgatgtgaattttattggttagaacaatgtccgactcgaatcatcgagctatttagcaatatgttgtgtccattttcgtcgcacttataccagcttgtatgttttgactaagttaggtgcaggtatgttactataattttcatttatgtttgagtatagaatataaaatagctgggtggacatgtcgtgaag

SEQ ID NO: 22757 - DNA, 1569 bp, Zea Mays
cccgggcccggcccagcccagcgcaggcgtgcgaacacgaagctcccctggacggagctctatcgcgtagtacggagtccacagggcgaggaaagatgctagcaggcgcccccaccggcgatgcgggccccagctccggcgctgggagcaacccacccactcggccacggaggttccccggggcggcgcagccggagatcatgcgggcggcggagaaggacgatagctacgcagcccacgtcacggaggcatgccgcgacgcatttcggcacctcttcggtaccagggttgctgttgcttaccagaatgagataaaattgcttggtcagtccctttactacttgctaacaactggttcaggccagcaaacacttggtgaagaatattgtgatatatctcaggttgcaaccttgcatggacttccacctactcctgctaggcggattctattcattttgtaccaaactactgtgccctaccttgctgaacggatcagggttcagaggccgagttcatgccttgtggcaatgggttcttcagaaatggccttcaatgctgccatatgctcaagattttatacagttggctatccggacaaatctaatgttcttctattttgaaggtctgtattatcatttgccaaagcgagcagctggtattcgctatgtattcattggcaagccaatgaatcagagacctaggtatcagatcttgggtatttttctgttgattcagttgtgtattcttggagctgaaagactccgaagaagtaatatatcgtcaatagctagttccattaatcaaatatcatctggaggctatccatcgactacaggtcggggcatccctgttctaaatgaagatggaaatatcatcagtgacatccgcagtggtaaagctgcagatatagcttctcattcagagacctccaatggcaagagcaaatgcaccctttgtctcagcatccggcaaaatcctactgccacaacctgtggacatgttttctgctggaattgcataatggagtggtgcaatgagaagcctgagtgccccctatgcagaactccgattacccattcgagtttgatttgtatatatcattcagatttctagcaaatcatttcgcacagtaggagtccatatcatacttcactggcgtcaaaatttccagaccatatttcggcaagaaaactgcatgccaaaatggtttcgtatacttaagtgggagaagagtacgagaccatttcaagaggttaaagatcagagagttgcatacgataatttgttgtaggttgaaagtttagattgaattagggaccacaggtagtagaaattatttattggcagttcggatagtagataacttgtattggacaccgatgtgaattttattggttagaacaatgtccgactcgaatcatcgagctatttagcaatatgttgtgtccattttcgtcgcacttataccagcttgtatgttttgactaagttaggtgcaggtatgttactataattttcatttatgtttgagtatagaatataaaatagctgggtggacatgtcgtgaag

SEQ ID NO: 22758 - DNA, 4512 bp, Zea Mays
accagctcaaacactattaaattggcttattaaattgtccaatcaacccaccaaatacgggttatttgaacatttgtaccttaaacccacaataaacccaccgagccaaacccccaaccaccctcgcaaacaacgcaagaagcacggactcgggcactcggctcacggcggagcaaaccctctcggcctctcctcctgagtcctgcctccgtccctcatatattaaccgcaattttgtcttcgcttccgtcgccagattcctccgcaccgccatggatgaccttgagcatgtcatccttcttgcctccgactcacctgctgccgcagcggcgtccccatctatccgcgcggaggctctcgccttctgcgcccgcgcccgcgacgagtccccgccgtcgtcgctcctccgcctctgcctgtccggcatcgcctcctccccgcacgctcaagtccacttttggtgcctccagtccctccacgacgcgctcctccgccgccggctcgtgctccccgacgacctcgcgttgctccgctcctccctcctctcgctggcggtttcctctcacgccggatcgccaccgttcctccgcaacaagctcgcgcagcttgttgcgctcctcatccgcctcgagtacccccatgtttacccctcttacttcattgatctcctcccgcccgcaccgccgcagcctggccccacggacatgttcgcgcgggttctaatctctctcgacgacgacctgctctcccaggagtacccccgcaattctggcgaagccgccgacgctatgcgggtgaaggattccatgcgcgcacagtgcgtgtcccagatcgccagccactggcacgccgccgccgtgactctccgtacagccgaccctgcggctgcggcggtggcccttgacgcggcgcgcaggtgcatctcgtggattgatgtcggactggtcgccaatgatgtcttcgttcctctattctttgacattgcgatgtcccctggaagcgcgtctccactcgctgctgcagcggtggggtgcctttctggtgtggcgtcgaagaggatggactcaagggcgaaggtgggattgctgaggtcactcctggctgcacagcaggggcttggtagcccagacaatgggttgaaaatggcacctttggtgatagcatatgctgcagaggctctcgaatgtcatagcaggcttggccctagtgatgctgatggagctgcagcattggagatgctggaagaggtgctaccagctgtatttgcagctgcagagagcggtaacgatgaagatgtggattctggttccgtgcttgagttcttatctggctatgtgagcacaatgaaggcaccatctgagaagcagttggggcacttgggacggatcttggaggtggtgcgggtacagatgtcatttgatccagtatatagggggcatcttgatgtgcttgacaagatagggaaggaggaggaggacctcatggcagagcaacggaaagatttgatcgtattattccggagcatttgtcgtgttgcaccagctgcagctcagctattcataagtgggctgattgtgacagctctctcatctgcagaagctagtgtggaggatgttgaggttgctcttaccctgttcttccggcttggagaagctgtgggtgaggaggagattcggactggggcagggctgataggccagcttgtgcccatgctcctaactgcgaggttctcgtgtcacacacaccgcttagttgcattggtgtacctggagacagtaacccgctacatgaagttcatgcaggagcatgtgcagtatgtaccacacctgcttggcgtgttcttggataaccgtggaatacaccatcagaatgcccacgtgagccgtcgtgcaggatacttattcatgagggcagtcaagtcattgaaggcaaagctagtgccttacctggataccatactgcagagcctgcaagatgtactaagtcaattcacttctatgaattggccaaacaaggatactaagtttcccagctcagaggacggcagccaaatttttgaggctgttggattactgataggcattgaagaggtatcaccagagaagcaggctcagttcttgaccgctcttctaaatcctctctgtcatcaggttgagtcacttgttatggatgccaaagcacgagggcttgaggaatcatcaccaatggctattagccttcaacaaattattgttgcattgaatatggtcagcaagggcttcaatgagcgtcttgtgatggtaaataggccagctattgggatcatgtttaagaaaacccttgatgtagttttgcaagtccttgtttcatttcctagcgtgagacctctgcgatctaaggtcatatcgtttctgcatcgtatgatcgagatattaggtctctcagtgcttccctgtattccaattgcactgagactattgcttcttgacaacgaggctaaagatatggtggaatttctcgtattggtaaaccaaataatctgcaaatttaaatcgtcagctagcgccatattggaggaaatatttcctactattgcaagtcgtttgtctgcgatattatcacaagatgcattttcagctggtcctgcaagcaatactgaggaaatgcgagaactgcaagagctgcagaggacattatacacattcttgcatgctatggcaacacatgatctttctgcagttctccttactcctagctctagggagtatctggagaccataatgcagttgcttttatttacctcatacaaacatagagatatactactgcgcaaggcatgtgtacaaatttttgtgaatcttgtaaaagactggtgctctaactctgaagataaggttccaggcttccgagtatttatgattgagaagtttgctactaattgctgtttatacagcgtccttgataaatcatttgatttacgcgatgcaaactcgcttgtcctttttggtgaaattgtgctggcccagaagattatgtatgaaagatttgggggggatttcattgtgaactttatagcaaaaggtctttctggagttcactgcccaccggacctagctgaacagtactaccagaagttaaagggaaatgatatcaaggcattcaggtcattttatcaatcgcttgttgagagaataagaccgcaggggaatgggagtcttgttttcagatagcatcatcctttcattttcaatatgttttccaccaaaagatacctcaactgtgttatttaattatatttataggctagttgtgccgtcaatgtacatagagctaccatttctgcgatcggaagacgtattactgcggcattatctttaccaagtctggcaaccatggttgtgcccttattcattgtattctatctgaggtgcaggggaattcatcctgcaatagtttgtactaggaaggaatcacagggttccattttcttattttgcctatatccccaaatcataggctgttctgctgtctgggcctgaaattttgcaaggtacttccagtgaactactgcctccgttctcgaatatttgttgcccgctagtatatttttaaactaaaccacgacaaataaaaaagaacggagcgagtaatcggtaagggggcaaaagagtgttgcgtaggctgtgtttttcatgacaaaaaatgccgcaccgcctgttgtgtcgtgagtcgtgctacaccagttttgcgaaacggcaactggttttgcaccccctattgccatctggggtgatgtacatattcttttttttctttctcgttttccccatttgatttcataaattattttgtcgcctacttcaccaatctgatgatccagtgatgacagagcatgccatgtcatgctggtgcctgcaaatgctgtatctgatgaggaattccatggcccatgttgctgttgtctcaactgctgcaagttttgttggtcggttcttatttgagcccatcctgttcggtattggagcttgtacagaacaacaccgaggtgcatgatattcttgactgaataaaattaattgacgacactgtttttacgtaaggaaggatgaggataatttggagacataggtctaaccaccggaaatagtaagcgggaatctcttgtatgtctttttttatatagtgtggcatgagtcgtgtcaaccctcagctcagctgaaagggctcaagttcgtgccacaacacaactggaagagctgcggccgtggccaaggagggaaatgccaaacaacagcaacaccattacaccaacaaaactaagggagaaagaccagggtgttacttgtattgtatatatcactccgcagaatttttgtcgtcacaaagacacaaatgaaggagcgctaacaaccattatcggtgttaataataatattgtatttggctgctatcgtcttgttcgatgtggcttgactgactgtggctgtgatttatataatattttgtctctattgcagtttcagcaatttaaac

SEQ ID NO: 22759 - DNA, 4860 bp, Zea Mays
gtccaatcaacccaccaaatacgggttatttgaacatttgtaccttaaacccacaataaacccaccgagccaaacccccaaccaccctcgcaaacaacgcaagaagcacggactcgggcactcggctcacggcggagcaaaccctctcggcctctcctcctgagtcctgcctccgtccctcatatattaaccgcaattttgtcttcgcttccgtcgccagattcctccgcaccgccatggatgaccttgagcatgtcatccttcttgcctccgactcacctgctgccgcagcggcgtccccatctatccgcgcggaggctctcgccttctgcgcccgcgcccgcgacgagtccccgccgtcgtcgctcctccgcctctgcctgtccggcatcgcctcctccccgcacgctcaagtccacttttggtgcctccagtccctccacgacgcgctcctccgccgccggctcgtgctccccgacgacctcgcgttgctccgctcctccctcctctcgctggcggtttcctctcacgccggatcgccaccgttcctccgcaacaagctcgcgcagcttgttgcgctcctcatccgcctcgagtacccccatgtttacccctcttacttcattgatctcctcccgcccgcaccgccgcagcctggccccacggacatgttcgcgcgggttctaatctctctcgacgacgacctgctctcccaggagtacccccgcaattctggcgaagccgccgacgctatgcgggtgaaggattccatgcgcgcacagtgcgtgtcccagatcgccagccactggcacgccgccgccgtgactctccgtacagccgaccctgcggctgcggcggtggcccttgacgcggcgcgcaggtgcatctcgtggattgatgtcggactggtcgccaatgatgtcttcgttcctctattctttgacattgcgatgtcccctggaagcgcgtctccactcgctgctgcagcggtggggtgcctttctggtgtggcgtcgaagaggatggactcaagggcgaaggtgggattgctgaggtcactcctggctgcacagcaggggcttggtagcccagacaatgggttgaaaatggcacctttggtgatagcatatgctgcagaggctctcgaatgtcatagcaggcttggccctagtgatgctgatggagctgcagcattggagatgctggaagaggtgctaccagctgtatttgcagctgcagagagcggtaacgatgaagatgtggattctggttccgtgcttgagttcttatctggctatgtgagcacaatgaaggcaccatctgagaagcagttggggcacttgggacggatcttggaggtggtgcgggtacagatgtcatttgatccagtatatagggggcatcttgatgtgcttgacaagatagggaaggaggaggaggacctcatggcagagcaacggaaagatttgatcgtattattccggagcatttgtcgtgttgcaccagctgcagctcagctattcataagtgggctgattgtgacagctctctcatctgcagaagctagtgtggaggatgttgaggttgctcttaccctgttcttccggcttggagaagctgtgggtgaggaggagattcggactggggcagggctgataggccagcttgtgcccatgctcctaactgcgaggttctcgtgtcacacacaccgcttagttgcattggtgtacctggagacagtaacccgctacatgaagttcatgcaggagcatgtgcagtatgtaccacacctgcttggcgtgttcttggataaccgtggaatacaccatcagaatgcccacgtgagccgtcgtgcaggatacttattcatgagggcagtcaagtcattgaaggcaaagctagtgccttacctggataccatactgcagagcctgcaagatgtactaagtcaattcacttctatgaattggccaaacaaggatactaagtttcccagctcagaggacggcagccaaatttttgaggctgttggattactgataggcattgaagaggtatcaccagagaagcaggctcagttcttgaccgctcttctaaatcctctctgtcatcaggttgagtcacttgttatggatgccaaagcacgagggcttgaggaatcatcaccaatggctattagccttcaacaaattattgttgcattgaatatggtcagcaagggcttcaatgagcgtcttgtgatggtaaataggccagctattgggatcatgtttaagaaaacccttgatgtagttttgcaagtccttgtttcatttcctagcgtgagacctctgcgatctaaggtcatatcgtttctgcatcgtatgatcgagatattaggtctctcagtgcttccctgtattccaattgcactgagactattgcttcttgacaacgaggctaaagatatggtggaatttctcgtattggtaaaccaaataatctgcaaatttaaatcgtcagctagcgccatattggaggaaatatttcctactattgcaagtcgtttgtctgcgatattatcacaagatgcattttcagctggtcctgcaagcaatactgaggaaatgcgagaactgcaagagctgcagaggacattatacacattcttgcatgctatggcaacacatgatctttctgcagttctccttactcctagctctagggagtatctggagaccataatgcagttgcttttatttacctcatacaaacatagagatatactactgcgcaaggcatgtgtacaaatttttgtgaatcttgtaaaagactggtgctctaactctgaagataaggttccaggcttccgagtatttatgattgagaagtttgctactaattgctgtttatacagcgtccttgataaatcatttgatttacgcgatgcaaactcgcttgtcctttttggtgaaattgtgctggcccagaagattatgtatgaaagatttgggggggatttcattgtgaactttatagcaaaaggtctttctggagttcactgcccaccggacctagctgaacagtactaccagaagttaaagggaaatgatatcaaggcattcaggtcattttatcaatcgcttgttgagagaataagaccgcaggggaatgggagtcttgttttcagatagcatcatcctttcattttcaatatgttttccaccaaaagatacctcaactgtgttatttaattatatttataggctagttgtgccgtcaatgtacatagagctaccatttctgcgatcggaaggtaatctctcttgtctctaatacaattgaagctatctaccccctcccccatctcttttggttgtaactctccaatgtgtgttttgtcattcgtatgccctttctcgggtacttttatgttgttctgagcatccaactcgagtagctcaatatgtgtggagtcattcatagaccccatacattcgtgtcccatatctgacttcagatttgtgaacttgtgaccctaatgcctattttagcttggtgtaacagaattggctaaatgcattatttgcttttacaccaccactgaaaacaaattagtgcaatttcactctttttttttctcagttcagtttattttggctacatgcactttatcataatttactcttatgctttgcagacgtattactgcggcattatctttaccaagtctggcaaccatggttgtgcccttattcattgtattctatctgaggtgcaggggaattcatcctgcaatagtttgtactaggaaggaatcacagggttccattttcttattttgcctatatccccaaatcataggctgttctgctgtctgggcctgaaattttgcaaggtacttccagtgaactactgcctccgttctcgaatatttgttgcccgctagtatatttttaaactaaaccacgacaaataaaaaagaacggagcgagtaatcggtaagggggcaaaagagtgttgcgtaggctgtgtttttcatgacaaaaaatgccgcaccgcctgttgtgtcgtgagtcgtgctacaccagttttgcgaaacggcaactggttttgcaccccctattgccatctggggtgatgtacatattcttttttttctttctcgttttccccatttgatttcataaattattttgtcgcctacttcaccaatctgatgatccagtgatgacagagcatgccatgtcatgctggtgcctgcaaatgctgtatctgatgaggaattccatggcccatgttgctgttgtctcaactgctgcaagttttgttggtcggttcttatttgagcccatcctgttcggtattggagcttgtacagaacaacaccgaggtgcatgatattcttgactgaataaaattaattgacgacactgtttttacgtaaggaaggatgaggataatttggagacataggtctaaccaccggaaatagtaagcgggaatctcttgtatgtctttttttatatagtgtggcatgagtcgtgtcaaccctcagctcagctgaaagggctcaagttcgtgccacaacacaactggaagagctgcggccgtggccaaggagggaaatgccaaacaacagcaacaccattacaccaacaaaactaagggagaaagaccagggtgttacttgtattgtatatatcactccgcagaatttttgtcgtcacaaagacacaaatgaaggagcgctaacaaccattatcggtgttaataataatattgtatttggctgctatcgtcttgttcgatgtggcttgactgactgtggctgtgatttatataatattttgtctctattgcagtttcagcaatttaaac

SEQ ID NO: 22760 - DNA, 3899 bp, Zea Mays
aatcaacccaccaaatacgggttatttgaacatttgtaccttaaacccacaataaacccaccgagccaaacccccaaccaccctcgcaaacaacgcaagaagcacggactcgggcactcggctcacggcggagcaaaccctctcggcctctcctcctgagtcctgcctccgtccctcatatattaaccgcaattttgtcttcgcttccgtcgccagattcctccgcaccgccatggatgaccttgagcatgtcatccttcttgcctccgactcacctgctgccgcagcggcgtccccatctatccgcgcggaggctctcgccttctgcgcccgcgcccgcgacgagtccccgccgtcgtcgctcctccgcctctgcctgtccggcatcgcctcctccccgcacgctcaagtccacttttggtgcctccagtccctccacgacgcgctcctccgccgccggctcgtgctccccgacgacctcgcgttgctccgctcctccctcctctcgctggcggtttcctctcacgccggatcgccaccgttcctccgcaacaagctcgcgcagcttgttgcgctcctcatccgcctcgagtacccccatgtttacccctcttacttcattgatctcctcccgcccgcaccgccgcagcctggccccacggacatgttcgcgcgggttctaatctctctcgacgacgacctgctctcccaggagtacccccgcaattctggcgaagccgccgacgctatgcgggtgaaggattccatgcgcgcacagtgcgtgtcccagatcgccagccactggcacgccgccgccgtgactctccgtacagccgaccctgcggctgcggcggtggcccttgacgcggcgcgcaggtgcatctcgtggattgatgtcggactggtcgccaatgatgtcttcgttcctctattctttgacattgcgatgtcccctggaagcgcgtctccactcgctgctgcagcggtggggtgcctttctggtgtggcgtcgaagaggatggactcaagggcgaaggtgggattgctgaggtcactcctggctgcacagcaggggcttggtagcccagacaatgggttgaaaatggcacctttggtgatagcatatgctgcagaggctctcgaatgtcatagcaggcttggccctagtgatgctgatggagctgcagcattggagatgctggaagaggtgctaccagctgtatttgcagctgcagagagcggtaacgatgaagatgtggattctggttccgtgcttgagttcttatctggctatgtgagcacaatgaaggcaccatctgagaagcagttggggcacttgggacggatcttggaggtggtgcgggtacagatgtcatttgatccagtatatagggggcatcttgatgtgcttgacaagatagggaaggaggaggaggacctcatggcagagcaacggaaagatttgatcgtattattccggagcatttgtcgtgttgcaccagctgcagctcagctattcataagtgggctgattgtgacagctctctcatctgcagaagctagtgtggaggatgttgaggttgctcttaccctgttcttccggcttggagaagctgtgggtgaggaggagattcggactggggcagggctgataggccagcttgtgcccatgctcctaactgcgaggttctcgtgtcacacacaccgcttagttgcattggtgtacctggagacagtaacccgctacatgaagttcatgcaggagcatgtgcagtatgtaccacacctgcttggcgtgttcttggataaccgtggaatacaccatcagaatgcccacgtgagccgtcgtgcaggatacttattcatgagggcagtcaagtcattgaaggcaaagctagtgccttacctggataccatactgcaggctgttggattactgataggcattgaagaggtatcaccagagaagcaggctcagttcttgaccgctcttctaaatcctctctgtcatcaggttgagtcacttgttatggatgccaaagcacgagggcttgaggaatcatcaccaatggctattagccttcaacaaattattgttgcattgaatatggtcagcaagggcttcaatgagcgtcttgtgatggtaaataggccagctattgggatcatgtttaagaaaacccttgatgtagttttgcaagtccttgtttcatttcctagcgtgagacctctgcgatctaaggtcatatcgtttctgcatcgtatgatcgagatattaggtctctcagtgcttccctgtattccaattgcactgagactattgcttcttgacaacgaggctaaagatatggtggaatttctcgtattggtaaaccaaataatctgcaaatttaaatcgtcagctagcgccatattggaggaaatatttcctactattgcaagtcgtttgtctgcgatattatcacaagatgcattttcagctggtcctgcaagcaatactgaggaaatgcgagaactgcaagagctgcagaggacattatacacattcttgcatgctatggcaacacatgatctttctgcagttctccttactcctagctctagggagtatctggagaccataatgcagttgcttttatttacctcatacaaacatagagatatactactgcgcaaggcatgtgtacaaatttttgtgaatcttgtaaaagactggtgctctaactctgaagataaggttccaggcttccgagtatttatgattgagaagtttgctactaattgctgtttatacagcgtccttgataaatcatttgatttacgcgatgcaaactcgcttgtcctttttggtgaaattgtgctggcccagaagattatgtatgaaagatttgggggggatttcattgtgaactttatagcaaaaggtctttctggagttcactgcccaccggacctagctgaacagtactaccagaagttaaagggaaatgatatcaaggcattcaggtcattttatcaatcgcttgttgagagaataagaccgcaggggaatgggagtcttgttttcagatagcatcatcctttcattttcaatatgttttccaccaaaagatacctcaactgtgttatttaattatatttataggctagttgtgccgtcaatgtacatagagctaccatttctgcgatcggaagacgtattactgcggcattatctttaccaagtctggcaaccatggttgtgcccttattcattgtattctatctgaggtgcaggggaattcatcctgcaatagtttgtactaggaaggaatcacagggttccattttcttattttgcctatatccccaaatcataggctgttctgctgtctgggcctgaaattttgcaagagcatgccatgtcatgctggtgcctgcaaatgctgtatctgatgaggaattccatggcccatgttgctgttgtctcaactgctgcaagttttgttggtcggttcttatttgagcccatcctgttcggtattggagcttgtacagaacaacaccgagtgtggcatgagtcgtgtcaaccctcagctcagctgaaagggctcaagttcgtgccacaacacaactggaagagctgcggccgtggccaaggagggaaatgccaaacaacagcaacaccattacaccaacaaaactaagggagaaagaccagggtgttacttgtattgtatatatcactccgcagaatttttgtcgtcacaaagacacaaatgaaggagcgctaacaaccattatcggtgttaataataatattgtatttggctgctatcgtcttgttcgatgtggcttgactgactgtggctgtgatttatataatattttgtctctattgcagtttcagcaatttaaac

SEQ ID NO: 22761 - DNA, 4023 bp, Zea Mays
cgggcactcggctcacggcggagcaaaccctctcggcctctcctcctgagtcctgcctccgtccctcatatattaaccgcaattttgtcttcgcttccgtcgccagattcctccgcaccgccatggatgaccttgagcatgtcatccttcttgcctccgactcacctgctgccgcagcggcgtccccatctatccgcgcggaggctctcgccttctgcgcccgcgcccgcgacgagtccccgccgtcgtcgctcctccgcctctgcctgtccggcatcgcctcctccccgcacgctcaagtccacttttggtgcctccagtccctccacgacgcgctcctccgccgccggctcgtgctccccgacgacctcgcgttgctccgctcctccctcctctcgctggcggtttcctctcacgccggatcgccaccgttcctccgcaacaagctcgcgcagcttgttgcgctcctcatccgcctcgagtacccccatgtttacccctcttacttcattgatctcctcccgcccgcaccgccgcagcctggccccacggacatgttcgcgcgggttctaatctctctcgacgacgacctgctctcccaggagtacccccgcaattctggcgaagccgccgacgctatgcgggtgaaggattccatgcgcgcacagtgcgtgtcccagatcgccagccactggcacgccgccgccgtgactctccgtacagccgaccctgcggctgcggcggtggcccttgacgcggcgcgcaggtgcatctcgtggattgatgtcggactggtcgccaatgatgtcttcgttcctctattctttgacattgcgatgtcccctggaagcgcgtctccactcgctgctgcagcggtggggtgcctttctggtgtggcgtcgaagaggatggactcaagggcgaaggtgggattgctgaggtcactcctggctgcacagcaggggcttggtagcccagacaatgggttgaaaatggcacctttggtgatagcatatgctgcagaggctctcgaatgtcatagcaggcttggccctagtgatgctgatggagctgcagcattggagatgctggaagaggtgctaccagctgtatttgcagctgcagagagcggtaacgatgaagatgtggattctggttccgtgcttgagttcttatctggctatgtgagcacaatgaaggcaccatctgagaagcagttggggcacttgggacggatcttggaggtggtgcgggtacagatgtcatttgatccagtatatagggggcatcttgatgtgcttgacaagatagggaaggaggaggaggacctcatggcagagcaacggaaagatttgatcgtattattccggagcatttgtcgtgttgcaccagctgcagctcagctattcataagtgggctgattgtgacagctctctcatctgcagaagctagtgtggaggatgttgaggttgctcttaccctgttcttccggcttggagaagctgtgggtgaggaggagattcggactggggcagggctgataggccagcttgtgcccatgctcctaactgcgaggttctcgtgtcacacacaccgcttagttgcattggtgtacctggagacagtaacccgctacatgaagttcatgcaggagcatgtgcagtatgtaccacacctgcttggcgtgttcttggataaccgtggaatacaccatcagaatgcccacgtgagccgtcgtgcaggatacttattcatgagggcagtcaagtcattgaaggcaaagctagtgccttacctggataccatactgcagagcctgcaagatgtactaagtcaattcacttctatgaattggccaaacaaggatactaagtttcccagctcagaggacggcagccaaatttttgaggctgttggattactgataggcattgaagaggtatcaccagagaagcaggctcagttcttgaccgctcttctaaatcctctctgtcatcaggttgagtcacttgttatggatgccaaagcacgagggcttgaggaatcatcaccaatggctattagccttcaacaaattattgttgcattgaatatggtcagcaagggcttcaatgagcgtcttgtgatggtaaataggccagctattgggatcatgtttaagaaaacccttgatgtagttttgcaagtccttgtttcatttcctagcgtgagacctctgcgatctaaggtcatatcgtttctgcatcgtatgatcgagatattaggtctctcagtgcttccctgtattccaattgcactgagactattgcttcttgacaacgaggctaaagatatggtggaatttctcgtattggtaaaccaaataatctgcaaatttaaatcgtcagctagcgccatattggaggaaatatttcctactattgcaagtcgtttgtctgcgatattatcacaagatgcattttcagctggtcctgcaagcaatactgaggaaatgcgagaactgcaagagctgcagaggacattatacacattcttgcatgctatggcaacacatgatctttctgcagttctccttactcctagctctagggagtatctggagaccataatgcagttgcttttatttacctcatacaaacatagagatatactactgcgcaaggcatgtgtacaaatttttgtgaatcttgtaaaagactggtgctctaactctgaagataaggttccaggcttccgagtatttatgattgagaagtttgctactaattgctgtttatacagcgtccttgataaatcatttgatttacgcgatgcaaactcgcttgtcctttttggtgaaattgtgctggcccagaagattatgtatgaaagatttgggggggatttcattgtgaactttatagcaaaaggtctttctggagttcactgcccaccggacctagctgaacagtactaccagaagttaaagggaaatgatatcaaggcattcaggtcattttatcaatcgcttgttgagagaataagaccgcaggggaatgggagtcttgttttcagatagcatcatcctttcattttcaatatgttttccaccaaaagatacctcaactgtgttatttaattatatttataggctagttgtgccgtcaatgtacatagagctaccatttctgcgatcggaagacgtattactgcggcattatctttaccaagtctggcaaccatggttgtgcccttattcattgtattctatctgaggtgcaggggaattcatcctgcaatagtttgtactaggaaggaatcacagggttccattttcttattttgcctatatccccaaatcataggctgttctgctgtctgggcctgaaattttgcaagagcatgccatgtcatgctggtgcctgcaaatgctgtatctgatgaggaattccatggcccatgttgctgttgtctcaactgctgcaagttttgttggtcggttcttatttgagcccatcctgttcggtattggagcttgtacagaacaacaccgaggtgcatgatattcttgactgaataaaattaattgacgacactgtttttacgtaaggaaggatgaggataatttggagacataggtctaaccaccggaaatagtaagcgggaatctcttgtatgtctttttttatatagtgtggcatgagtcgtgtcaaccctcagctcagctgaaagggctcaagttcgtgccacaacacaactggaagagctgcggccgtggccaaggagggaaatgccaaacaacagcaacaccattacaccaacaaaactaagggagaaagaccagggtgttacttgtattgtatatatcactccgcagaatttttgtcgtcacaaagacacaaatgaaggagcgctaacaaccattatcggtgttaataataatattgtatttggctgctatcgtcttgttcgatgtggcttgactgactgtggctgtgatttatataatattttgtctctattgcagtttcagcaatttaaac

SEQ ID NO: 22762 - DNA, 3906 bp, Zea Mays
tctcggcctctcctcctgagtcctgcctccgtccctcatatattaaccgcaattttgtcttcgcttccgtcgccagattcctccgcaccgccatggatgaccttgagcatgtcatccttcttgcctccgactcacctgctgccgcagcggcgtccccatctatccgcgcggaggctctcgccttctgcgcccgcgcccgcgacgagtccccgccgtcgtcgctcctccgcctctgcctgtccggcatcgcctcctccccgcacgctcaagtccacttttggtgcctccagtccctccacgacgcgctcctccgccgccggctcgtgctccccgacgacctcgcgttgctccgctcctccctcctctcgctggcggtttcctctcacgccggatcgccaccgttcctccgcaacaagctcgcgcagcttgttgcgctcctcatccgcctcgagtacccccatgtttacccctcttacttcattgatctcctcccgcccgcaccgccgcagcctggccccacggacatgttcgcgcgggttctaatctctctcgacgacgacctgctctcccaggagtacccccgcaattctggcgaagccgccgacgctatgcgggtgaaggattccatgcgcgcacagtgcgtgtcccagatcgccagccactggcacgccgccgccgtgactctccgtacagccgaccctgcggctgcggcggtggcccttgacgcggcgcgcaggtgcatctcgtggattgatgtcggactggtcgccaatgatgtcttcgttcctctattctttgacattgcgatgtcccctggaagcgcgtctccactcgctgctgcagcggtggggtgcctttctggtgtggcgtcgaagaggatggactcaagggcgaaggtgggattgctgaggtcactcctggctgcacagcaggggcttggtagcccagacaatgggttgaaaatggcacctttggtgatagcatatgctgcagaggctctcgaatgtcatagcaggcttggccctagtgatgctgatggagctgcagcattggagatgctggaagaggtgctaccagctgtatttgcagctgcagagagcggtaacgatgaagatgtggattctggttccgtgcttgagttcttatctggctatgtgagcacaatgaaggcaccatctgagaagcagttggggcacttgggacggatcttggaggtggtgcgggtacagatgtcatttgatccagtatatagggggcatcttgatgtgcttgacaagatagggaaggaggaggaggacctcatggcagagcaacggaaagatttgatcgtattattccggagcatttgtcgtgttgcaccagctgcagctcagctattcataagtgggctgattgtgacagctctctcatctgcagaagctagtgtggaggatgttgaggttgctcttaccctgttcttccggcttggagaagctgtgggtgaggaggagattcggactggggcagggctgataggccagcttgtgcccatgctcctaactgcgaggttctcgtgtcacacacaccgcttagttgcattggtgtacctggagacagtaacccgctacatgaagttcatgcaggagcatgtgcagtatgtaccacacctgcttggcgtgttcttggataaccgtggaatacaccatcagaatgcccacgtgagccgtcgtgcaggatacttattcatgagggcagtcaagtcattgaaggcaaagctagtgccttacctggataccatactgcaggctgttggattactgataggcattgaagaggtatcaccagagaagcaggctcagttcttgaccgctcttctaaatcctctctgtcatcaggttgagtcacttgttatggatgccaaagcacgagggcttgaggaatcatcaccaatggctattagccttcaacaaattattgttgcattgaatatggtcagcaagggcttcaatgagcgtcttgtgatggtaaataggccagctattgggatcatgtttaagaaaacccttgatgtagttttgcaagtccttgtttcatttcctagcgtgagacctctgcgatctaaggtcatatcgtttctgcatcgtatgatcgagatattaggtctctcagtgcttccctgtattccaattgcactgagactattgcttcttgacaacgaggctaaagatatggtggaatttctcgtattggtaaaccaaataatctgcaaatttaaatcgtcagctagcgccatattggaggaaatatttcctactattgcaagtcgtttgtctgcgatattatcacaagatgcattttcagctggtcctgcaagcaatactgaggaaatgcgagaactgcaagagctgcagaggacattatacacattcttgcatgctatggcaacacatgatctttctgcagttctccttactcctagctctagggagtatctggagaccataatgcagttgcttttatttacctcatacaaacatagagatatactactgcgcaaggcatgtgtacaaatttttgtgaatcttgtaaaagactggtgctctaactctgaagataaggttccaggcttccgagtatttatgattgagaagtttgctactaattgctgtttatacagcgtccttgataaatcatttgatttacgcgatgcaaactcgcttgtcctttttggtgaaattgtgctggcccagaagattatgtatgaaagatttgggggggatttcattgtgaactttatagcaaaaggtctttctggagttcactgcccaccggacctagctgaacagtactaccagaagttaaagggaaatgatatcaaggcattcaggtcattttatcaatcgcttgttgagagaataagaccgcaggggaatgggagtcttgttttcagatagcatcatcctttcattttcaatatgttttccaccaaaagatacctcaactgtgttatttaattatatttataggctagttgtgccgtcaatgtacatagagctaccatttctgcgatcggaagacgtattactgcggcattatctttaccaagtctggcaaccatggttgtgcccttattcattgtattctatctgaggtgcaggggaattcatcctgcaatagtttgtactaggaaggaatcacagggttccattttcttattttgcctatatccccaaatcataggctgttctgctgtctgggcctgaaattttgcaagtgatgacagagcatgccatgtcatgctggtgcctgcaaatgctgtatctgatgaggaattccatggcccatgttgctgttgtctcaactgctgcaagttttgttggtcggttcttatttgagcccatcctgttcggtattggagcttgtacagaacaacaccgaggtgcatgatattcttgactgaataaaattaattgacgacactgtttttacgtaaggaaggatgaggataatttggagacataggtctaaccaccggaaatagtaagcgggaatctcttgtatgtctttttttatatagtgtggcatgagtcgtgtcaaccctcagctcagctgaaagggctcaagttcgtgccacaacacaactggaagagctgcggccgtggccaaggagggaaatgccaaacaacagcaacaccattacaccaacaaaactaagggagaaagaccagggtgttacttgtattgtatatatcactccgcagaatttttgtcgtcacaaagacacaaatgaaggagcgctaacaaccattatcggtgttaataataatattgtatttggctgctatcgtcttgttcgatgtggcttgactgactgtggctgtgatttatataatattttgtctctattgcagtttcagcaatttaaac

SEQ ID NO: 22763 - DNA, 4215 bp, Zea Mays
cctgcctccgtccctcatatattaaccgcaattttgtcttcgcttccgtcgccagattcctccgcaccgccatggatgaccttgagcatgtcatccttcttgcctccgactcacctgctgccgcagcggcgtccccatctatccgcgcggaggctctcgccttctgcgcccgcgcccgcgacgagtccccgccgtcgtcgctcctccgcctctgcctgtccggcatcgcctcctccccgcacgctcaagtccacttttggtgcctccagtccctccacgacgcgctcctccgccgccggctcgtgctccccgacgacctcgcgttgctccgctcctccctcctctcgctggcggtttcctctcacgccggatcgccaccgttcctccgcaacaagctcgcgcagcttgttgcgctcctcatccgcctcgagtacccccatgtttacccctcttacttcattgatctcctcccgcccgcaccgccgcagcctggccccacggacatgttcgcgcgggttctaatctctctcgacgacgacctgctctcccaggagtacccccgcaattctggcgaagccgccgacgctatgcgggtgaaggattccatgcgcgcacagtgcgtgtcccagatcgccagccactggcacgccgccgccgtgactctccgtacagccgaccctgcggctgcggcggtggcccttgacgcggcgcgcaggtgcatctcgtggattgatgtcggactggtcgccaatgatgtcttcgttcctctattctttgacattgcgatgtcccctggaagcgcgtctccactcgctgctgcagcggtggggtgcctttctggtgtggcgtcgaagaggatggactcaagggcgaaggtgggattgctgaggtcactcctggctgcacagcaggggcttggtagcccagacaatgggttgaaaatggcacctttggtgatagcatatgctgcagaggctctcgaatgtcatagcaggcttggccctagtgatgctgatggagctgcagcattggagatgctggaagaggtgctaccagctgtatttgcagctgcagagagcggtaacgatgaagatgtggattctggttccgtgcttgagttcttatctggctatgtgagcacaatgaaggcaccatctgagaagcagttggggcacttgggacggatcttggaggtggtgcgggtacagatgtcatttgatccagtatatagggggcatcttgatgtgcttgacaagatagggaaggaggaggaggacctcatggcagagcaacggaaagatttgatcgtattattccggagcatttgtcgtgttgcaccagctgcagctcagctattcataagtgggctgattgtgacagctctctcatctgcagaagctagtgtggaggatgttgaggttgctcttaccctgttcttccggcttggagaagctgtgggtgaggaggagattcggactggggcagggctgataggccagcttgtgcccatgctcctaactgcgaggttctcgtgtcacacacaccgcttagttgcattggtgtacctggagacagtaacccgctacatgaagttcatgcaggagcatgtgcagtatgtaccacacctgcttggcgtgttcttggataaccgtggaatacaccatcagaatgcccacgtgagccgtcgtgcaggatacttattcatgagggcagtcaagtcattgaaggcaaagctagtgccttacctggataccatactgcagagcctgcaagatgtactaagtcaattcacttctatgaattggccaaacaaggatactaagtttcccagctcagaggacggcagccaaatttttgaggctgttggattactgataggcattgaagaggtatcaccagagaagcaggctcagttcttgaccgctcttctaaatcctctctgtcatcaggttgagtcacttgttatggatgccaaagcacgagggcttgaggaatcatcaccaatggctattagccttcaacaaattattgttgcattgaatatggtcagcaagggcttcaatgagcgtcttgtgatggtaaataggccagctattgggatcatgtttaagaaaacccttgatgtagttttgcaagtccttgtttcatttcctagcgtgagacctctgcgatctaaggctaaagatatggtggaatttctcgtattggtaaaccaaataatctgcaaatttaaatcgtcagctagcgccatattggaggaaatatttcctactattgcaagtcgtttgtctgcgatattatcacaagatgcattttcagctggtcctgcaagcaatactgaggaaatgcgagaactgcaagagctgcagaggacattatacacattcttgcatgctatggcaacacatgatctttctgcagttctccttactcctagctctagggagtatctggagaccataatgcagttgcttttatttacctcatacaaacatagagatatactactgcgcaaggcatgtgtacaaatttttgtgaatcttgtaaaagactggtgctctaactctgaagataaggttccaggcttccgagtatttatgattgagaagtttgctactaattgctgtttatacagcgtccttgataaatcatttgatttacgcgatgcaaactcgcttgtcctttttggtgaaattgtgctggcccagaagattatgtatgaaagatttgggggggatttcattgtgaactttatagcaaaaggtctttctggagttcactgcccaccggacctagctgaacagtactaccagaagttaaagggaaatgatatcaaggcattcaggtcattttatcaatcgcttgttgagagaataagaccgcaggggaatgggagtcttgttttcagatagcatcatcctttcattttcaatatgttttccaccaaaagatacctcaactgtgttatttaattatatttataggctagttgtgccgtcaatgtacatagagctaccatttctgcgatcggaagacgtattactgcggcattatctttaccaagtctggcaaccatggttgtgcccttattcattgtattctatctgaggtgcaggggaattcatcctgcaatagtttgtactaggaaggaatcacagggttccattttcttattttgcctatatccccaaatcataggctgttctgctgtctgggcctgaaattttgcaaggtacttccagtgaactactgcctccgttctcgaatatttgttgcccgctagtatatttttaaactaaaccacgacaaataaaaaagaacggagcgagtaatcggtaagggggcaaaagagtgttgcgtaggctgtgtttttcatgacaaaaaatgccgcaccgcctgttgtgtcgtgagtcgtgctacaccagttttgcgaaacggcaactggttttgcaccccctattgccatctggggtgatgtacatattcttttttttctttctcgttttccccatttgatttcataaattattttgtcgcctacttcaccaatctgatgatccagtgatgacagagcatgccatgtcatgctggtgcctgcaaatgctgtatctgatgaggaattccatggcccatgttgctgttgtctcaactgctgcaagttttgttggtcggttcttatttgagcccatcctgttcggtattggagcttgtacagaacaacaccgaggtgcatgatattcttgactgaataaaattaattgacgacactgtttttacgtaaggaaggatgaggataatttggagacataggtctaaccaccggaaatagtaagcgggaatctcttgtatgtctttttttatatagtgtggcatgagtcgtgtcaaccctcagctcagctgaaagggctcaagttcgtgccacaacacaactggaagagctgcggccgtggccaaggagggaaatgccaaacaacagcaacaccattacaccaacaaaactaagggagaaagaccagggtgttacttgtattgtatatatcactccgcagaatttttgtcgtcacaaagacacaaatgaaggagcgctaacaaccattatcggtgttaataataatattgtatttggctgctatcgtcttgttcgatgtggcttgactgactgtggctgtgatttatataatattttgtctctattgcagtttcagcaatttaaac

SEQ ID NO: 22764 - DNA, 2258 bp, Zea Mays
ctaagtttcccagctcagaggacggcagccaaatttttgaggctgttggattactgataggcattgaagaggtatcaccagagaagcaggctcagttcttgaccgctcttctaaatcctctctgtcatcaggttgagtcacttgttatggatgccaaagcacgagggcttgaggaatcatcaccaatggctattagccttcaacaaattattgttgcattgaatatggtcagcaagggcttcaatgagcgtcttgtgatggtaaataggccagctattgggatcatgtttaagaaaacccttgatgtagttttgcaagtccttgtttcatttcctagcgtgagacctctgcgatctaaggctaaagatatggtggaatttctcgtattggtaaaccaaataatctgcaaatttaaatcgtcagctagcgccatattggaggaaatatttcctactattgcaagtcgtttgtctgcgatattatcacaagatgcattttcagctggtcctgcaagcaatactgaggaaatgcgagaactgcaagagctgcagaggacattatacacattcttgcatgctatggcaacacatgatctttctgcagttctccttactcctagctctagggagtatctggagaccataatgcagttgcttttatttacctcatacaaacatagagatatactactgcgcaaggcatgtgtacaaatttttgtgaatcttgtaaaagactggtgctctaactctgaagataaggttccaggcttccgagtatttatgattgagaagtttgctactaattgctgtttatacagcgtccttgataaatcatttgatttacgcgatgcaaactcgcttgtcctttttggtgaaattgtgctggcccagaagattatgtatgaaagatttgggggggatttcattgtgaactttatagcaaaaggtctttctggagttcactgcccaccggacctagctgaacagtactaccagaagttaaagggaaatgatatcaaggcattcaggctagttgtgccgtcaatgtacatagagctaccatttctgcgatcggaagacgtattactgcggcattatctttaccaagtctggcaaccatggttgtgcccttattcattgtattctatctgaggtgcaggggaattcatcctgcaatagtttgtactaggaaggaatcacagggttccattttcttattttgcctatatccccaaatcataggctgttctgctgtctgggcctgaaattttgcaaggtacttccagtgaactactgcctccgttctcgaatatttgttgcccgctagtatatttttaaactaaaccacgacaaataaaaaagaacggagcgagtaatcggtaagggggcaaaagagtgttgcgtaggctgtgtttttcatgacaaaaaatgccgcaccgcctgttgtgtcgtgagtcgtgctacaccagttttgcgaaacggcaactggttttgcaccccctattgccatctggggtgatgtacatattcttttttttctttctcgttttccccatttgatttcataaattattttgtcgcctacttcaccaatctgatgatccagtgatgacagagcatgccatgtcatgctggtgcctgcaaatgctgtatctgatgaggaattccatggcccatgttgctgttgtctcaactgctgcaagttttgttggtcggttcttatttgagcccatcctgttcggtattggagcttgtacagaacaacaccgaggtgcatgatattcttgactgaataaaattaattgacgacactgtttttacgtaaggaaggatgaggataatttggagacataggtctaaccaccggaaatagtaagcgggaatctcttgtatgtctttttttatatagtgtggcatgagtcgtgtcaaccctcagctcagctgaaagggctcaagttcgtgccacaacacaactggaagagctgcggccgtggccaaggagggaaatgccaaacaacagcaacaccattacaccaacaaaactaagggagaaagaccagggtgttacttgtattgtatatatcactccgcagaatttttgtcgtcacaaagacacaaatgaaggagcgctaacaaccattatcggtgttaataataatattgtatttggctgctatcgtcttgttcgatgtggcttgactgactgtggctgtgatttatataatattttgtctctattgcagtttcagcaatttaaac

SEQ ID NO: 22765 - DNA, 1222 bp, Zea Mays
ggacaggatacttgttggttcggtcggttgtgtagggcttttgagggtcggtgacgagggagtgacccttcttgcttcggaggtcgagggctccccgatcaggttcgcggacgcggcgatcgaggcatccgacggcacggtctacttcagtgacgccagcaccaggttcggcttcgaccggtggttccacgacttcctagagttcagctccaccggccgcctgctccggtacgacccgcgcagcggcgagacgtccgtcgtgctcgaccgactcggcttcgccaacggcgttgcgctgccgagggacgaggccttcgtcgtcgtctgcgagaccatgaggttcaggtgcatcaaagtgtggctgaaaggggataaggccggcgaggcagagacgttcgtcgaccttccggggtggccggacaacatccgcctcgggtcagacggtcacttctggattgccgtcctccagctgaggtcgccatggctggacttcatcacccgctggaccttcacgaagagagtggtggcctcgttccccgcgctcagcgagtggagcaagggggcggcgaagggagccatggtcgctcaggtgtccgaggacggcaccatcctccgcgtgctcgacgactcccaggggaaggtgatcaacttcgtcacgtcggtgacggagttcaacggggacatcttcctcggcagcctcgcgaccaacttcgtcggcaaactatctctggcgcgggtggcacagaagcagggagcagtatcttcgtagacgtttgggttcttcatgtcagtttagccctgtttgtttatcctttatattatataatccagtttaaataagttaatagacaaacaaacaaaacaggttattagatgtattgtataatctagatacctagattatgataatacataaacagataattatgtgcttattatataatccataagctagattatataattctgaaaggaaaaaaaaaccttaatcaagggaacatatacacatttgagttcttcatgtgagtttaaatagacactctttgctctttaagcatcgtcactactcaattctcaaacggctctgatgtacaataatcggctaccagttaagatttgcatgtaaaccgaacaagtttatccatcgagaaagtttgtacatcataccttaggttaggaaaaaagaggaagtttctacatcataccttaggttagaaaaaaa

SEQ ID NO: 22766 - DNA, 554 bp, Zea Mays
ttctattgttattttattcaccttgccggatttgacgtcatcacgatgtcacccctgacatcacatatacgtgatccttgctagccgatcctatctcctttagttctggggcgtataaatatacgcgggttgtgactccctcggccatcgtcgagactcgtgaggcctccgagcaagcagcggagagatcaaactgagagatggagagagaaagccagatgccgctgctgtgttggccaccaccaccgactggggcaagagagaaggagagaaggaagatgccgtggtgaccggcggtacggatcttcttcacgcgcgaggtattgggatggatgcactcggttcgttggtcgacggcgagcttcgatgcttgcgttgtcgtcggggggacggagaaggacctcgtggccaccagaatttctcacccatgccgctgctccgccgcggaaccactagcgccgtggtcggagaatatcagcatcctcaccattgcgtaaggtcacgagtcacctgatgagcaagttggtacctggaatctcaagtgccaggcaagt

SEQ ID NO: 22767 - DNA, 645 bp, Zea Mays
ttctattgttattttattcaccttgccggatttgacgtcatcacgatgtcacccctgacatcacatatacgtgatccttgctagccgatcctatctcctttagttctggggcgtataaatatacgcgggttgtgactccctcggccatcgtcgagactcgtgaggcctccgagcaagcagcggagagatcaaactgagagatggagagagaaagccagatgccgctgctgtgttggccaccaccaccgactggggcaagagagaaggagagaaggaagatgccgtggtgaccggcggtacggatcttcttcacgcgcgaggtattgggatggatgcactcggttcgttggtcgacggcgagcttcgatgcttgcgttgtcgtcggggggacggagaaggacctcgtggccaccagaatttctcacccatgccgctgctccgccgcggaaccactagcgccgtggtcggagaatatcagcatcctcaccattggtcaagaacaggtaccgtaggatgaggcgcatggaggatgctgcgatgtgttcgtgagaggtctaggccgtcgtctctcagtcaactttgggttgctggaccgttgtctccgtataatgtaattatttatttattttgtacaggactcctgtt

SEQ ID NO: 22768 - DNA, 2841 bp, Zea Mays
gtcgacgcgacgccactctcttacgcacacggcggcgcatcccttccacgcaggcggccacgccccagcccggcagcaagccctcctgcccctgtcgacccacggctcaccatttccttccccgggcgatggtgaatgtgcaggagcaagtttcttcgttaaccacctcgcccttcgccttcattccttcacccggacgcagcggtggccaaacaaataacacgcctcgacgacgcggcgcgctccgtcttcctccctccccgccaccttccctccaaatcaaaaccagccagatcgccgcctcgtcctctccctctgccatcctcccgggatcgccgtcgggctcgccgcgccggaaccctagcggattgtcattcgttcgcgcgcgccccgcctcgccatggaggacttcgcgcgcgcggtggaggacgggctcaagctctcgaagcggctcgtgctcccgggaggggtgccgccgccgcgcccgccggcggggatggagcgcaccatgtcgtccgcctcggcgtcgggtcccgacccgcggctgctccccacggcgccgatggcctacgcggtggtcaccgacccggccgccatcgacacccccgacgtgcccagctaccaaccctacgtctacggccacctcgacccgcccgcgctcatcccgctgcagatgaaggaggtcgacttggccgtcgactgcgcgctcgacgccgcgcacgtcaccctgcgcgcgcgctggtggctgcactgcatcacgcgaagccgcgactgcgacgtgcgcctcgtcgtgcccttgggcgagcaggagcagggttcaattctaggcgctgaggttactgtcggaagaagatcatataatacccaagtaatcgaagtagaagaaactttggagaatcatgcaaaaattgagagtggtggccttctgaagccacatctgtttttcttgacaatatctcaggttgagggaggagcagatatctgtgctacatttcgatggtctcagaagttactatatgatagtgggtgtttctctgttgacatacctttccattttccatactttgtcaacccattaccaaaagtgttcatgaagagggaaaaagttcagttgactgcgaacactggtttcagtaaagaggtttttctgcaaggaacaagccacccgttgaaggaaaagagtaggcaaggagataaattgtttttcctgcatgaagccattgttgagaattggtcgagcaaagtttttaatttttcgtacagtgtttactcaggtgatttgtctggtggtgtgtttgtgcaaccctcaatattatgtgactatgatgatagagatagcttctgcatttttcttttacctggaagtggcaacagaaaggtattcagaaaagcagttgtgtttgttgttgacacaagtggaagcatgcaaggaaagcctcttgagaatgtcaagcatgcagtttctaccgctctttcagagcttgtgcaaggggattacttcaatattataacatttaatgatgagcttcactcattctcttcctgtttggagcaagtaaatgacaaagcaatagcaagtgcaactgattggatgaatgcaaacttagttgctgagggtggcacagatattatgcatcctttgagtgaggcaatggcattactatcaagtgttcatgacacacttccgcaaatatatcttattactgatggttctgttgatgatgagcataacatctgccaaactacaaaaaccgaagtcaccaacagagggtctaaatctccccgaatttctactttcggactaggatcatattgtaaccactatttcctgcgcatgctagcatcagttggcaaaggacattacaatgctgcacttgagacagcatcaatcgagaatcagattgttaagtggttcaggagagcatcaagtacaattgtggaaaatatctccattgatgctatgacacatcttgatgaatttgaagtggattctgagtacattccggacctttcagcaaattctcctttgtgtgtgtctggaaaataccgaggaaaattcccagacacagtgaaagctaaaggttacttagctgacatgaaggaagtcctgattgaactgaaggtccaacaactaaaggaagtaactcttgacaaagtattggtgacacaacatattgatcttatgacagcaaaggcatggctttctgcggccaaacaactggagagaaaggtgattaaattaagcatacaaaatggtgttccatcggagtacacagatatggtattacttcaaacaaatttggacaatactggaacacaaaaggtcaagcaaaaactaaaaggacagaaaggcagagatgagcaacagatcccgctccatgggctgaaactgggattcggtaacaactaacaaggacgctacaagggaaaatctcgtcacaggattttgggacgtgaactcagcagagaaaattgtgatgctccaaaagggacctggctgttgcagccgcgtcgctgactgcctttgctgcatgtgctgcatcagggcgtgcaacaggatgaacgaccagtgtgctattctgatggcacaggtctgtgcggctctagcgtgcctcggctgctacgaatgctgtgcggaggtgtgctgtggagggtcggagtcgtagtaggaagtatggaagattggagatttggagtgtacataatcgagttcgcggaagccggattgtgaggcgaggaaggatgaaatgcaatatatcagcttgatcgacgattggtcttggttgtacattgtctccttccaaacattctaattttctcttgttacatgcaatgcaaaag

SEQ ID NO: 22769 - DNA, 2751 bp, Zea Mays
gtcgacgcgacgccactctcttacgcacacggcggcgcatcccttccacgcaggcggccacgccccagcccggcagcaagccctcctgcccctgtcgacccacggctcaccatttccttccccgggcgatggtgaatgtgcaggagcaagtttcttcgttaaccacctcgcccttcgccttcattccttcacccggacgcagcggtggccaaacaaataacacgcctcgacgacgcggcgcgctccgtcttcctccctccccgccaccttccctccaaatcaaaaccagccagatcgccgcctcgtcctctccctctgccatcctcccgggatcgccgtcgggctcgccgcgccggaaccctagcggattgtcattcgttcgcgcgcgccccgcctcgccatggaggacttcgcgcgcgcggtggaggacgggctcaagctctcgaagcggctcgtgctcccgggaggggtgccgccgccgcgcccgccggcggggatggagcgcaccatgtcgtccgcctcggcgtcgggtcccgacccgcggctgctccccacggcgccgatggcctacgcggtggtcaccgacccggccgccatcgacacccccgacgtgcccagctaccaaccctacgtctacggccacctcgacccgcccgcgctcatcccgctgcagatgaaggaggtcgacttggccgtcgactgcgcgctcgacgccgcgcacgtcaccctgcgcgcgcgctggtggctgcactgcatcacgcgaagccgcgactgcgacgtgcgcctcgtcgtgcccttgggcgagcaggagcagggttcaattctaggcgctgaggttactgtcggaagaagatcatataatacccaagtaatcgaagtagaagaaactttggagaatcatgcaaaaattgagagtggtggccttctgaagccacatctgtttttcttgacaatatctcaggttgagggaggagcagatatctgtgctacatttcgatggtctcagaagttactatatgatagtgggtgtttctctgttgacatacctttccattttccatactttgtcaacccattaccaaaagtgttcatgaagagggaaaaagttcagttgactgcgaacactggtttcagtaaagaggtttttctgcaaggaacaagccacccgttgaaggtttactcaggtgatttgtctggtggtgtgtttgtgcaaccctcaatattatgtgactatgatgatagagatagcttctgcatttttcttttacctggaagtggcaacagaaaggtattcagaaaagcagttgtgtttgttgttgacacaagtggaagcatgcaaggaaagcctcttgagaatgtcaagcatgcagtttctaccgctctttcagagcttgtgcaaggggattacttcaatattataacatttaatgatgagcttcactcattctcttcctgtttggagcaagtaaatgacaaagcaatagcaagtgcaactgattggatgaatgcaaacttagttgctgagggtggcacagatattatgcatcctttgagtgaggcaatggcattactatcaagtgttcatgacacacttccgcaaatatatcttattactgatggttctgttgatgatgagcataacatctgccaaactacaaaaaccgaagtcaccaacagagggtctaaatctccccgaatttctactttcggactaggatcatattgtaaccactatttcctgcgcatgctagcatcagttggcaaaggacattacaatgctgcacttgagacagcatcaatcgagaatcagattgttaagtggttcaggagagcatcaagtacaattgtggaaaatatctccattgatgctatgacacatcttgatgaatttgaagtggattctgagtacattccggacctttcagcaaattctcctttgtgtgtgtctggaaaataccgaggaaaattcccagacacagtgaaagctaaaggttacttagctgacatgaaggaagtcctgattgaactgaaggtccaacaactaaaggaagtaactcttgacaaagtattggtgacacaacatattgatcttatgacagcaaaggcatggctttctgcggccaaacaactggagagaaaggtgattaaattaagcatacaaaatggtgttccatcggagtacacagatatggtattacttcaaacaaatttggacaatactggaacacaaaaggtcaagcaaaaactaaaaggacagaaaggcagagatgagcaacagatcccgctccatgggctgaaactgggattcggtaacaactaacaaggacgctacaagggaaaatctcgtcacaggattttgggacgtgaactcagcagagaaaattgtgatgctccaaaagggacctggctgttgcagccgcgtcgctgactgcctttgctgcatgtgctgcatcagggcgtgcaacaggatgaacgaccagtgtgctattctgatggcacaggtctgtgcggctctagcgtgcctcggctgctacgaatgctgtgcggaggtgtgctgtggagggtcggagtcgtagtaggaagtatggaagattggagatttggagtgtacataatcgagttcgcggaagccggattgtgaggcgaggaaggatgaaatgcaatatatcagcttgatcgacgattggtcttggttgtacattgtctccttccaaacattctaattttctcttgttacatgcaatgcaaaag

SEQ ID NO: 22770 - DNA, 2762 bp, Zea Mays
gtcgacgcgacgccactctcttacgcacacggcggcgcatcccttccacgcaggcggccacgccccagcccggcagcaagccctcctgcccctgtcgacccacggctcaccatttccttccccgggcgatggtgaatgtgcaggagcaagtttcttcgttaaccacctcgcccttcgccttcattccttcacccggacgcagcggtggccaaacaaataacacgcctcgacgacgcggcgcgctccgtcttcctccctccccgccaccttccctccaaatcaaaaccagccagatcgccgcctcgtcctctccctctgccatcctcccgggatcgccgtcgggctcgccgcgccggaaccctagcggattgtcattcgttcgcgcgcgccccgcctcgccatggaggacttcgcgcgcgcggtggaggacgggctcaagctctcgaagcggctcgtgctcccgggaggggtgccgccgccgcgcccgccggcggggatggagcgcaccatgtcgtccgcctcggcgtcgggtcccgacccgcggctgctccccacggcgccgatggcctacgcggtggtcaccgacccggccgccatcgacacccccgacgtgcccagctaccaaccctacgtctacggccacctcgacccgcccgcgctcatcccgctgcagatgaaggaggtcgacttggccgtcgactgcgcgctcgacgccgcgcacgtcaccctgcgcgcgcgctggtggctgcactgcatcacgcgaagccgcgactgcgacgtgcgcctcgtcgtgcccttgggcgagcaggagcagggttcaattctaggcgctgaggttactgtcggaagaagatcatataatacccaagtaatcgaagtagaagaaactttggagaatcatgcaaaaattgagagtggtggccttctgaagccacatctgtttttcttgacaatatctcaggttgagggaggagcagatatctgtgctacatttcgatggtctcagaagttactatatgatagtgggtgtttctctgttgacatacctttccattttccatactttgtcaacccattaccaaaagtgttcatgaagagggaaaaagttcagttgactgcgaacactggtttcagtaaagaggtttttctgcaaggaacaagccacccgttgaaggaaaagagtaggcaaggagataaattgtttttcctgcatgaagccattgttgagaattggtcgagcaaagtttttaatttttcgtacagtgtttactcaggtgatttgtctggtggtgtgtttgtgcaaccctcaatattatgtgactatgatgatagagatagcttctgcatttttcttttacctggaagtggcaacagaaaggtattcagaaaagcagttgtgtttgttgttgacacaagtggaagcatgcaaggaaagcctcttgagaatgtcaagcatgcagtttctaccgctctttcagagcttgtgcaaggggattacttcaatattataacatttaatgatgagcttcactcattctcttcctgtttggagcaagtaaatgacaaagcaatagcaagtgcaactgattggatgaatgcaaacttagttgctgagggtggcacagatattatgcatcctttgagtgaggcaatggcattactatcaagtgttcatgacacacttccgcaaatatatcttattactgatggttctgttgatgatgagcataacatctgccaaactacaaaaaccgaagtcaccaacagagggtctaaatctccccgaatttctactttcggactaggatcatattgtaaccactatttcctgcgcatgctagcatcagttggcaaaggacattacaatgctgcacttgagacagcatcaatcgagaatcagattgttaagtggttcaggagagcatcaagtacaattgtggaaaatatctccattgatgctatgacacatcttgatgaatttgaagtggattctgagtacattccggacctttcagcaaattctcctttgtgtgtgtctggaaaataccgaggaaaattcccagacacagtgaaagctaaaggttacttagctgacatgaaggaagtcctgattgaactgaaggtccaacaactaaaggaagtaactcttgacaaagtattggtgacacaacatattgatcttatgacagcaaaggcatggctttctgcggccaaacaactggagagaaaggtggggtatttggtgattaaattaagcatacaaaatggtgttccatcggagtacacagatatggtattacttcaaacaaatttggacaatactggaacacaaaaggacgctacaagggaaaatctcgtcacaggattttgggacgtgaactcagcagagaaaattgtgatgctccaaaagggacctggctgttgcagccgcgtcgctgactgcctttgctgcatgtgctgcatcagggcgtgcaacaggatgaacgaccagtgtgctattctgatggcacaggtctgtgcggctctagcgtgcctcggctgctacgaatgctgtgcggaggtgtgctgtggagggtcggagtcgtagtaggaagtatggaagattggagatttggagtgtacataatcgagttcgcggaagccggattgtgaggcgaggaaggatgaaatgcaatatatcagcttgatcgacgattggtcttggttgtacattgtctccttccaaacattctaattttctcttgttacatgcaatgcaaaag

SEQ ID NO: 22771 - DNA, 5621 bp, Zea Mays
gtcgacgcgacgccactctcttacgcacacggcggcgcatcccttccacgcaggcggccacgccccagcccggcagcaagccctcctgcccctgtcgacccacggctcaccatttccttccccgggcgatggtgaatgtgcaggagcaagtttcttcgttaaccacctcgcccttcgccttcattccttcacccggacgcagcggtggccaaacaaataacacgcctcgacgacgcggcgcgctccgtcttcctccctccccgccaccttccctccaaatcaaaaccagccagatcgccgcctcgtcctctccctctgccatcctcccgggatcgccgtcgggctcgccgcgccggaaccctagcggattgtcattcgttcgcgcgcgccccgcctcgccatggaggacttcgcgcgcgcggtggaggacgggctcaagctctcgaagcggctcgtgctcccgggaggggtgccgccgccgcgcccgccggcggggatggagcgcaccatgtcgtccgcctcggcgtcgggtcccgacccgcggctgctccccacggcgccgatggcctacgcggtggtcaccgacccggccgccatcgacacccccgacgtgcccagctaccaaccctacgtctacggccacctcgacccgcccgcgctcatcccgctgcagatgaaggaggtcgacttggccgtcgactgcgcgctcgacgccgcgcacgtcaccctgcgcgcgcgctggtggctgcactgcatcacgcgaagccgcgactgcgacgtgcgcctcgtcgtgcccttgggcgagcaggagcagggttcaattctaggcgctgaggttactgtcggaagaagatcatataatacccaagtaatcgaagtagaagaaactttggagaatcatgcaaaaattgagagtggtggccttctgaagccacatctgtttttcttgacaatatctcaggttgagggaggagcagatatctgtgctacatttcgatggtctcagaagttactatatgatagtgggtgtttctctgttgacatacctttccattttccatactttgtcaacccattaccaaaagtgttcatgaagagggaaaaagttcagttgactgcgaacactggtttcagtaaagaggtttttctgcaaggaacaagccacccgttgaaggtttactcaggtgatttgtctggtggtgtgtttgtgcaaccctcaatattatgtgactatgatgatagagatagcttctgcatttttcttttacctggaagtggcaacagaaaggtattcagaaaagcagttgtgtttgttgttgacacaagtggaagcatgcaaggaaagcctcttgagaatgtcaagcatgcagtttctaccgctctttcagagcttgtgcaaggggattacttcaatattataacatttaatgatgagcttcactcattctcttcctgtttggagcaagtaaatgacaaagcaatagcaagtgcaactgattggatgaatgcaaacttagttgctgagggtggcacagatattatgcatcctttgagtgaggcaatggcattactatcaagtgttcatgacacacttccgcaaatatatcttattactgatggttctgttgatgatgagcataacatctgccaaactacaaaaaccgaagtcaccaacagagggtctaaatctccccgaatttctactttcggactaggatcatattgtaaccactatttcctgcgcatgctagcatcagttggcaaaggacattacaatgctgcacttgagacagcatcaatcgagaatcagattgttaagtggttcaggagagcatcaagtacaattgtggaaaatatctccattgatgctatgacacatcttgatgaatttgaagtggattctgagtacattccggacctttcagcaaattctcctttgtgtgtgtctggaaaataccgaggaaaattcccagacacagtgaaagctaaaggttacttagctgacatgaaggaagtcctgattgaactgaaggtccaacaactaaaggaagtaactcttgacaaagtattggtgacacaacatattgatcttatgacagcaaaggcatggctttctgcggccaaacaactggagagaaaggtggggtatttggtgattaaattaagcatacaaaatggtgttccatcggagtacacagatatggtattacttcaaacaaatttggacaatactggaacacaaaaggacgctacaagggaaaatctcgtcacaggattttgggacgtgaactcagcagagaaaattgtgatgctccaaaagggacctggctgttgcagccgcgtcgctgactgcctttgctgcatgtgctgcatcagggcgtgcaacaggatgaacgaccagtgtgctattctgatggcacaggatatgtttgtagatattcaagatgaaaagattttgaaacattttcgaggcttaagaactcggaagataaatttacctcgcaacatcaactcatgctataacctctttttctctcaggtggtccttttcatcggcttgcaagtaagattggtccatgaagtgtagtttatgcacagctcatccctgcttctggtggtactgtcaatgtaaggaggggatcagcatcccttgtctatgcgccgggcggccccattgtttctgcaccaagcccgtgtaatcaggagctattgcccagtgacgcacctttcctctcaggcttgttggttgaacagctctgataatgaagagcccagtcagagtttcgcttacggtgattatagaagtcgtcgtctgcttcccttgatcacacaagcattgcgggcttcgaactgggacgctgccagaaatataagcttcagggagtgtgtgaggttatacgggtcatctcaatcagttggtttgtttgctttgatcatgcaggcattcttgccacggagaatcagagaggtacggtgcttgattcggagcattgttgattactgtggaaatgctgggtcagagttgtttgagttggctcctatgttggtcagcaatttgggtcagtcaatgaccctgttacaagtttatgctgcagtcatccgtatttttgtagagtcttcgatgtttgaggacgctcttctcacttatattcaggccaagaacattggtgttgacagacgtttgtgcaatttcttgttgaagtgtttagttgaggggaatcaaatcatgtacgctaggagcttatttgatgacatgaaaagttgtggtccttcacccaatgtctgctcttattcaattttgatgagtatgtacacacatggagagagatcatgcttggaggaagcttttgagcttctttgtgaaatggaatcaaatggtgtgagaccaaacgctacaacatatggaacttatctctatgggctttgccgttccagacaggtaacatctgcatgggactttcttcaaactctttctcagagtggaggcccttgcagcaattattgtttcaatgctgtgattcatggtttctgttgtgaaggtcaggttgacaaagccatagaggtatttcatggaatgaagaaatgtgggtatgtaccagatgtccatagctacagcatattagttgatgggttatgcaaacaaggggatttattgaaaggttatgatatgcttgaagaaatggcaagaaatggaatatgtcctaatcaagtgagttacagttcacttctgcatggcctttgcaaaactggacaggttgcattggcattgaagattttcaagaatctccaagaccatggttttgagcatgaccagataaattacagcatcattcttcatggctgttgccaacacttagatctcaaggccatctctgacctttggtttgacatgattcatcataatatcgctccagatgtttacaactataccagtctgatctacgcattatgtagacatagaaacctccaagatgcattgggagtgtttgagctcatgcttgaaaatgggttgtctcccaacatcgtgacatgcacaatcctagttgacagctttagcaaacaagggctagttggtgaagctttcctattcctggatagaatgcatcagtcattgggaatcgtcccaaacctttgcatgtacagagttatgatcaatggcctttgcaagaccaacaaatatagtggtgtgtggaatgtttttgcggacatgataaagaggggctatgttcctgatgttgtcctgtacagtattattattgagggcttcgtgaaagctctgaagttgcaggaggcgttaaggttgtaccataagatgttggatgaaggtgtaaaacctaacatatttacgtattctagcctcataaatgggctgtgtaatgatgatagacttcctgaagctatgggattgattagggatatgattggggaagacctgttacttgacaatgttttgtacacatctatcattgcttgttattgtagacgtttaaatatgaaggctgctatggaaatggctcaaagagatggaaagaagcggtgtgttgccagatgcttttgtatatacttgtatgattgatggctatagtaaacttcctgcaatggatgctgcacgcttgatgatggaagaaatggaaaaaagaaagcttaaacctactatagtaacctacacagctctcattattggataccttaaaatgggggatgagaaggaagcttgtatgatgtacgagagtatgcgtcatgtaggcattgctccagatggaaagctgtgttgcattttgggcattggcaatgacaggggtgattgtgatgattctcagaaagcgaagggtgtaacataattacataattttcacagagatttattaacttgatgaagggacttctctatgatggctgaatggctctgagctctccagtgcaggacacactgtttgctccatttgtttcctccacttccacactgccatcctatggacaaggaatggaaagcagtaacctgaaatgtggcagttaaatccgtggacaactgctgagggtgtgaccgatacaggttagcctttgtattgtgcaaataatcagataagaagtctgcattctgaaaatgcttcttttgttcaaagtgttacatcaacagttttaacttccggttacttgagatatagcatcatactgaaaatttccctgcttttcaagtttcatgtttagaaaggttttctccatttgtttctaaatacatttaaccatgctgttattttctagattgttttcctgtagaatctttttttaccatctgtagcacctgtaaagctatgagtttgacagatctgaaagatcacagcaattcatgaaagcaattaaatggatgcactccacacatgaagccaatgccatgtgcccatgtcactaataagttgattgatgcttcatggaccgccttccctgccttttcatcctcttcgggccatgttcggtaggcatggatttaatccccaggtggaattaatccagacgtggattgaatggatcccctgttgtcactctttccctaggtggttcattaatccattacccttgggctttggactctctggaaccacagaaatggatgtgtttttgat

SEQ ID NO: 22772 - DNA, 5689 bp, Zea Mays
gtcgacgcgacgccactctcttacgcacacggcggcgcatcccttccacgcaggcggccacgccccagcccggcagcaagccctcctgcccctgtcgacccacggctcaccatttccttccccgggcgatggtgaatgtgcaggagcaagtttcttcgttaaccacctcgcccttcgccttcattccttcacccggacgcagcggtggccaaacaaataacacgcctcgacgacgcggcgcgctccgtcttcctccctccccgccaccttccctccaaatcaaaaccagccagatcgccgcctcgtcctctccctctgccatcctcccgggatcgccgtcgggctcgccgcgccggaaccctagcggattgtcattcgttcgcgcgcgccccgcctcgccatggaggacttcgcgcgcgcggtggaggacgggctcaagctctcgaagcggctcgtgctcccgggaggggtgccgccgccgcgcccgccggcggggatggagcgcaccatgtcgtccgcctcggcgtcgggtcccgacccgcggctgctccccacggcgccgatggcctacgcggtggtcaccgacccggccgccatcgacacccccgacgtgcccagctaccaaccctacgtctacggccacctcgacccgcccgcgctcatcccgctgcagatgaaggaggtcgacttggccgtcgactgcgcgctcgacgccgcgcacgtcaccctgcgcgcgcgctggtggctgcactgcatcacgcgaagccgcgactgcgacgtgcgcctcgtcgtgcccttgggcgagcaggagcagggttcaattctaggcgctgaggttactgtcggaagaagatcatataatacccaagtaatcgaagtagaagaaactttggagaatcatgcaaaaattgagagtggtggccttctgaagccacatctgtttttcttgacaatatctcaggttgagggaggagcagatatctgtgctacatttcgatggtctcagaagttactatatgatagtgggtgtttctctgttgacatacctttccattttccatactttgtcaacccattaccaaaagtgttcatgaagagggaaaaagttcagttgactgcgaacactggtttcagtaaagaggtttttctgcaaggaacaagccacccgttgaaggaaaagagtaggcaaggagataaattgtttttcctgcatgaagccattgttgagaattggtcgagcaaagtttttaatttttcgtacagtgtttactcaggtgatttgtctggtggtgtgtttgtgcaaccctcaatattatgtgactatgatgatagagatagcttctgcatttttcttttacctggaagtggcaacagaaaggtattcagaaaagcagttgtgtttgttgttgacacaagtggaagcatgcaaggaaagcctcttgagaatgtcaagcatgcagtttctaccgctctttcagagcttgtgcaaggggattacttcaatattataacatttaatgatgagcttcactcattctcttcctgtttggagcaagtaaatgacaaagcaatagcaagtgcaactgattggatgaatgcaaacttagttgctgagggtggcacagatattatgcatcctttgagtgaggcaatggcattactatcaagtgttcatgacacacttccgcaaatatatcttattactgatggttctgttgatgatgagcataacatctgccaaactacaaaaaccgaagtcaccaacagagggtctaaatctccccgaatttctactttcggactaggatcatattgtaaccactatttcctgcgcatgctagcatcagttggcaaaggacattacaatgctgcacttgagacagcatcaatcgagaatcagattgttaagtggttcaggagagcatcaagtacaattgtggaaaatatctccattgatgctatgacacatcttgatgaatttgaagtggattctgagtacattccggacctttcagcaaattctcctttgtgtgtgtctggaaaataccgaggaaaattcccagacacagtgaaagctaaaggttacttagctgacatgaaggaagtcctgattgaactgaaggtccaacaactaaaggaagtaactcttgacaaagtattggtgacacaacatattgatcttatgacagcaaaggcatggctttctgcggccaaacaactggagagaaaggtggggtatttggtgattaaattaagcatacaaaatggtgttccatcggagtacacagatatggtattacttcaaacaaatttggacaatactggaacacaaaaggacgctacaagggaaaatctcgtcacaggattttgggacgtgaactcagcagagaaaattgtgatgctccaaaagggacctggctgttgcagccgcgtcgctgactgcctttgctgcatgtgctgcatcagggcgtgcaacaggatgaacgaccagtgtgctattctgatggcacaggatatgtttgtagatattcaagatgaaaagattttgaaacattttcgaggcttaagaactcggaagataaatttacctcgcaacatcaactcatggtggtccttttcatcggcttgcaagtaagattggtccatgaagtgtagtttatgcacagctcatccctgcttctggtggtactgtcaatgtaaggaggggatcagcatcccttgtctatgcgccgggcggccccattgtttctgcaccaagcccgtgtaatcaggagctattgcccagtgacgcacctttcctctcaggcttgttggttgaacagctctgataatgaagagcccagtcagagtttcgcttacggtgattatagaagtcgtcgtctgcttcccttgatcacacaagcattgcgggcttcgaactgggacgctgccagaaatataagcttcagggagtgtgtgaggttatacgggtcatctcaatcagttggtttgtttgctttgatcatgcaggcattcttgccacggagaatcagagaggtacggtgcttgattcggagcattgttgattactgtggaaatgctgggtcagagttgtttgagttggctcctatgttggtcagcaatttgggtcagtcaatgaccctgttacaagtttatgctgcagtcatccgtatttttgtagagtcttcgatgtttgaggacgctcttctcacttatattcaggccaagaacattggtgttgacagacgtttgtgcaatttcttgttgaagtgtttagttgaggggaatcaaatcatgtacgctaggagcttatttgatgacatgaaaagttgtggtccttcacccaatgtctgctcttattcaattttgatgagtatgtacacacatggagagagatcatgcttggaggaagcttttgagcttctttgtgaaatggaatcaaatggtgtgagaccaaacgctacaacatatggaacttatctctatgggctttgccgttccagacaggtaacatctgcatgggactttcttcaaactctttctcagagtggaggcccttgcagcaattattgtttcaatgctgtgattcatggtttctgttgtgaaggtcaggttgacaaagccatagaggtatttcatggaatgaagaaatgtgggtatgtaccagatgtccatagctacagcatattagttgatgggttatgcaaacaaggggatttattgaaaggttatgatatgcttgaagaaatggcaagaaatggaatatgtcctaatcaagtgagttacagttcacttctgcatggcctttgcaaaactggacaggttgcattggcattgaagattttcaagaatctccaagaccatggttttgagcatgaccagataaattacagcatcattcttcatggctgttgccaacacttagatctcaaggccatctctgacctttggtttgacatgattcatcataatatcgctccagatgtttacaactataccagtctgatctacgcattatgtagacatagaaacctccaagatgcattgggagtgtttgagctcatgcttgaaaatgggttgtctcccaacatcgtgacatgcacaatcctagttgacagctttagcaaacaagggctagttggtgaagctttcctattcctggatagaatgcatcagtcattgggaatcgtcccaaacctttgcatgtacagagttatgatcaatggcctttgcaagaccaacaaatatagtggtgtgtggaatgtttttgcggacatgataaagaggggctatgttcctgatgttgtcctgtacagtattattattgagggcttcgtgaaagctctgaagttgcaggaggcgttaaggttgtaccataagatgttggatgaaggtgtaaaacctaacatatttacgtattctagcctcataaatgggctgtgtaatgatgatagacttcctgaagctatgggattgattagggatatgattggggaagacctgttacttgacaatgttttgtacacatctatcattgcttgttattgtagacgtttaaatatgaaggctgctatggaaatggctcaaagagatggaaagaagcggtgtgttgccagatgcttttgtatatacttgtatgattgatggctatagtaaacttcctgcaatggatgctgcacgcttgatgatggaagaaatggaaaaaagaaagcttaaacctactatagtaacctacacagctctcattattggataccttaaaatgggggatgagaaggaagcttgtatgatgtacgagagtatgcgtcatgtaggcattgctccagatggaaagctgtgttgcattttgggcattggcaatgacaggggtgattgtgatgattctcagaaagcgaagggtgtaacataattacataattttcacagagatttattaacttgatgaagggacttctctatgatggctgaatggctctgagctctccagtgcaggacacactgtttgctccatttgtttcctccacttccacactgccatcctatggacaaggaatggaaagcagtaacctgaaatgtggcagttaaatccgtggacaactgctgagggtgtgaccgatacaggttagcctttgtattgtgcaaataatcagataagaagtctgcattctgaaaatgcttcttttgttcaaagtgttacatcaacagttttaacttccggttacttgagatatagcatcatactgaaaatttccctgcttttcaagtttcatgtttagaaaggttttctccatttgtttctaaatacatttaaccatgctgttattttctagattgttttcctgtagaatctttttttaccatctgtagcacctgtaaagctatgagtttgacagatctgaaagatcacagcaattcatgaaagcaattaaatggatgcactccacacatgaagccaatgccatgtgcccatgtcactaataagttgattgatgcttcatggaccgccttccctgccttttcatcctcttcgggccatgttcggtaggcatggatttaatccccaggtggaattaatccagacgtggattgaatggatcccctgttgtcactctttccctaggtggttcattaatccattacccttgggctttggactctctggaaccacagaaatggatgtgtttttgat

SEQ ID NO: 22773 - DNA, 5790 bp, Zea Mays
gtcgacgcgacgccactctcttacgcacacggcggcgcatcccttccacgcaggcggccacgccccagcccggcagcaagccctcctgcccctgtcgacccacggctcaccatttccttccccgggcgatggtgaatgtgcaggagcaagtttcttcgttaaccacctcgcccttcgccttcattccttcacccggacgcagcggtggccaaacaaataacacgcctcgacgacgcggcgcgctccgtcttcctccctccccgccaccttccctccaaatcaaaaccagccagatcgccgcctcgtcctctccctctgccatcctcccgggatcgccgtcgggctcgccgcgccggaaccctagcggattgtcattcgttcgcgcgcgccccgcctcgccatggaggacttcgcgcgcgcggtggaggacgggctcaagctctcgaagcggctcgtgctcccgggaggggtgccgccgccgcgcccgccggcggggatggagcgcaccatgtcgtccgcctcggcgtcgggtcccgacccgcggctgctccccacggcgccgatggcctacgcggtggtcaccgacccggccgccatcgacacccccgacgtgcccagctaccaaccctacgtctacggccacctcgacccgcccgcgctcatcccgctgcagatgaaggaggtcgacttggccgtcgactgcgcgctcgacgccgcgcacgtcaccctgcgcgcgcgctggtggctgcactgcatcacgcgaagccgcgactgcgacgtgcgcctcgtcgtgcccttgggcgagcaggagcagggttcaattctaggcgctgaggttactgtcggaagaagatcatataatacccaagtaatcgaagtagaagaaactttggagaatcatgcaaaaattgagagtggtggccttctgaagccacatctgtttttcttgacaatatctcaggttgagggaggagcagatatctgtgctacatttcgatggtctcagaagttactatatgatagtgggtgtttctctgttgacatacctttccattttccatactttgtcaacccattaccaaaagtgttcatgaagagggaaaaagttcagttgactgcgaacactggtttcagtaaagaggtttttctgcaaggaacaagccacccgttgaaggaaaagagtaggcaaggagataaattgtttttcctgcatgaagccattgttgagaattggtcgagcaaagtttttaatttttcgtacagtgtttactcaggtgatttgtctggtggtgtgtttgtgcaaccctcaatattatgtgactatgatgatagagatagcttctgcatttttcttttacctggaagtggcaacagaaaggtattcagaaaagcagttgtgtttgttgttgacacaagtggaagcatgcaaggaaagcctcttgagaatgtcaagcatgcagtttctaccgctctttcagagcttgtgcaaggggattacttcaatattataacatttaatgatgagcttcactcattctcttcctgtttggagcaagtaaatgacaaagcaatagcaagtgcaactgattggatgaatgcaaacttagttgctgagggtggcacagatattatgcatcctttgagtgaggcaatggcattactatcaagtgttcatgacacacttccgcaaatatatcttattactgatggttctgttgatgatgagcataacatctgccaaactacaaaaaccgaagtcaccaacagagggtctaaatctccccgaatttctactttcggactaggatcatattgtaaccactatttcctgcgcatgctagcatcagttggcaaaggacattacaatgctgcacttgagacagcatcaatcgagaatcagattgttaagtggttcaggagagcatcaagtacaattgtggaaaatatctccattgatgctatgacacatcttgatgaatttgaagtggattctgagtacattccggacctttcagcaaattctcctttgtgtgtgtctggaaaataccgaggaaaattcccagacacagtgaaagctaaaggttacttagctgacatgaaggaagtcctgattgaactgaaggtccaacaactaaaggaagtaactcttgacaaagtattggtgacacaacatattgatcttatgacagcaaaggcatggctttctgcggccaaacaactggagagaaaggtgattaaattaagcatacaaaatggtgttccatcggagtacacagatatggtattacttcaaacaaatttggacaatactggaacacaaaaggtcaagcaaaaactaaaaggacagaaaggcagagatgagcaacagatcccgctccatgggctgaaactgggattcggtaacaactaacaaggacgctacaagggaaaatctcgtcacaggattttgggacgtgaactcagcagagaaaattgtgatgctccaaaagggacctggctgttgcagccgcgtcgctgactgcctttgctgcatgtgctgcatcagggcgtgcaacaggatgaacgaccagtgtgctattctgatggcacaggatatgtttgtagatattcaagatgaaaagattttgaaacattttcgaggcttaagaactcggaagataaatttacctcgcaacatcaactcatgctataacctctttttctctcaggtggtccttttcatcggcttgcaagtaagattggtccatgaagtgtagtttatgcacagctcatccctgcttctggtggtactgtcaatgtaaggaggggatcagcatcccttgtctatgcgccgggcggccccattgtttctgcaccaagcccgtgtaatcaggagctattgcccagtgacgcacctttcctctcaggcttgttggttgaacagctctgataatgaagagcccagtcagagtttcgcttacggtgattatagaagtcgtcgtctgcttcccttgatcacacaagcattgcgggcttcgaactgggacgctgccagaaatataagcttcagggagtgtgtgaggttatacgggtcatctcaatcagttggtttgtttgctttgatcatgcaggcattcttgccacggagaatcagagaggtacggtgcttgattcggagcattgttgattactgtggaaatgctgggtcagagttgtttgagttggctcctatgttggtcagcaatttgggtcagtcaatgaccctgttacaagtttatgctgcagtcatccgtatttttgtagagtcttcgatgtttgaggacgctcttctcacttatattcaggccaagaacattggtgttgacagacgtttgtgcaatttcttgttgaagtgtttagttgaggggaatcaaatcatgtacgctaggagcttatttgatgacatgaaaagttgtggtccttcacccaatgtctgctcttattcaattttgatgagtatgtacacacatggagagagatcatgcttggaggaagcttttgagcttctttgtgaaatggaatcaaatggtgtgagaccaaacgctacaacatatggaacttatctctatgggctttgccgttccagacaggtaacatctgcatgggactttcttcaaactctttctcagagtggaggcccttgcagcaattattgtttcaatgctgtgattcatggtttctgttgtgaaggtcaggttgacaaagccatagaggtatttcatggaatgaagaaatgtgggtatgtaccagatgtccatagctacagcatattagttgatgggttatgcaaacaaggggatttattgaaaggttatgatatgcttgaagaaatggcaagaaatggaatatgtcctaatcaagtgagttacagttcacttctgcatggcctttgcaaaactggacaggttgcattggcattgaagattttcaagaatctccaagaccatggttttgagcatgaccagataaattacagcatcattcttcatggctgttgccaacacttagatctcaaggccatctctgacctttggtttgacatgattcatcataatatcgctccagatgtttacaactataccagtctgatctacgcattatgtagacatagaaacctccaagatgcattgggagtgtttgagctcatgcttgaaaatgggttgtctcccaacatcgtgacatgcacaatcctagttgacagctttagcaaacaagggctagttggtgaagctttcctattcctggatagaatgcatcagtcattgggaatcgtcccaaacctttgcatgtacagagttatgatcaatggcctttgcaagaccaacaaatatagtggtgtgtggaatgtttttgcggacatgataaagaggggctatgttcctgatgttgtcctgtacagtattattattgagggcttcgtgaaagctctgaagttgcaggaggcgttaaggttgtaccataagatgttggatgaaggtgtaaaacctaacatatttacgtattctagcctcataaatgggctgtgtaatgatgatagacttcctgaagctatgggattgattagggatatgattggggaagacctgttacttgacaatgttttgtacacatctatcattgcttgttattgtagacgtttaaatatgaaggctgctatggaaatggctcaaagagatggaaagaagcggtgtgttgccagatgcttttgtatatacttgtatgattgatggctatagtaaacttcctgcaatggatgctgcacgcttgatgatggaagaaatggaaaaaagaaagcttaaacctactatagtaacctacacagctctcattattggataccttaaaatgggggatgagaaggaagcttgtatgatgtacgagagtatgcgtcatgtaggcattgctccagatggaaagctgtgttgcattttgggcattggcaatgacaggggtgattgtgatgattctcagaaagcgaagggtgtaacataattacataattttcacagagatttattaacttgatgaagggacttctctatgatggctgaatggctctgagctctccagtgcaggacacactgtttgctccatttgtttcctccacttccacactgccatcctatggacaaggaatggaaagcagtaacctgaaatgtggcagttaaatccgtggacaactgctgagggtgtgaccgatacaggttagcctttgtattgtgcaaataatcagataagaagtctgcattctgaaaatgcttcttttgttcaaagtgttacatcaacagttttaacttccggttacttgagatatagcatcatactgaaaatttccctgcttttcaagtttcatgtttagaaaggttttctccatttgtttctaaatacatttaaccatgctgttattttctagattgttttcctgtagaatctttttttaccatctgtagcacctgtaaagctatgagtttgacagatctgaaagatcacagcaattcatgaaagcaattaaatggatgcactccacacatgaagccaatgccatgtgcccatgtcactaataagttgattgatgcttcatggaccgccttccctgccttttcatcctcttcgggccatgttcggtaggcatggatttaatccccaggtggaattaatccagacgtggattgaatggatcccctgttgtcactctttccctaggtggttcattaatccattacccttgggctttggactctctggaaccacagaaatggatgtgtttttgat

SEQ ID NO: 22774 - DNA, 5700 bp, Zea Mays
gtcgacgcgacgccactctcttacgcacacggcggcgcatcccttccacgcaggcggccacgccccagcccggcagcaagccctcctgcccctgtcgacccacggctcaccatttccttccccgggcgatggtgaatgtgcaggagcaagtttcttcgttaaccacctcgcccttcgccttcattccttcacccggacgcagcggtggccaaacaaataacacgcctcgacgacgcggcgcgctccgtcttcctccctccccgccaccttccctccaaatcaaaaccagccagatcgccgcctcgtcctctccctctgccatcctcccgggatcgccgtcgggctcgccgcgccggaaccctagcggattgtcattcgttcgcgcgcgccccgcctcgccatggaggacttcgcgcgcgcggtggaggacgggctcaagctctcgaagcggctcgtgctcccgggaggggtgccgccgccgcgcccgccggcggggatggagcgcaccatgtcgtccgcctcggcgtcgggtcccgacccgcggctgctccccacggcgccgatggcctacgcggtggtcaccgacccggccgccatcgacacccccgacgtgcccagctaccaaccctacgtctacggccacctcgacccgcccgcgctcatcccgctgcagatgaaggaggtcgacttggccgtcgactgcgcgctcgacgccgcgcacgtcaccctgcgcgcgcgctggtggctgcactgcatcacgcgaagccgcgactgcgacgtgcgcctcgtcgtgcccttgggcgagcaggagcagggttcaattctaggcgctgaggttactgtcggaagaagatcatataatacccaagtaatcgaagtagaagaaactttggagaatcatgcaaaaattgagagtggtggccttctgaagccacatctgtttttcttgacaatatctcaggttgagggaggagcagatatctgtgctacatttcgatggtctcagaagttactatatgatagtgggtgtttctctgttgacatacctttccattttccatactttgtcaacccattaccaaaagtgttcatgaagagggaaaaagttcagttgactgcgaacactggtttcagtaaagaggtttttctgcaaggaacaagccacccgttgaaggtttactcaggtgatttgtctggtggtgtgtttgtgcaaccctcaatattatgtgactatgatgatagagatagcttctgcatttttcttttacctggaagtggcaacagaaaggtattcagaaaagcagttgtgtttgttgttgacacaagtggaagcatgcaaggaaagcctcttgagaatgtcaagcatgcagtttctaccgctctttcagagcttgtgcaaggggattacttcaatattataacatttaatgatgagcttcactcattctcttcctgtttggagcaagtaaatgacaaagcaatagcaagtgcaactgattggatgaatgcaaacttagttgctgagggtggcacagatattatgcatcctttgagtgaggcaatggcattactatcaagtgttcatgacacacttccgcaaatatatcttattactgatggttctgttgatgatgagcataacatctgccaaactacaaaaaccgaagtcaccaacagagggtctaaatctccccgaatttctactttcggactaggatcatattgtaaccactatttcctgcgcatgctagcatcagttggcaaaggacattacaatgctgcacttgagacagcatcaatcgagaatcagattgttaagtggttcaggagagcatcaagtacaattgtggaaaatatctccattgatgctatgacacatcttgatgaatttgaagtggattctgagtacattccggacctttcagcaaattctcctttgtgtgtgtctggaaaataccgaggaaaattcccagacacagtgaaagctaaaggttacttagctgacatgaaggaagtcctgattgaactgaaggtccaacaactaaaggaagtaactcttgacaaagtattggtgacacaacatattgatcttatgacagcaaaggcatggctttctgcggccaaacaactggagagaaaggtgattaaattaagcatacaaaatggtgttccatcggagtacacagatatggtattacttcaaacaaatttggacaatactggaacacaaaaggtcaagcaaaaactaaaaggacagaaaggcagagatgagcaacagatcccgctccatgggctgaaactgggattcggtaacaactaacaaggacgctacaagggaaaatctcgtcacaggattttgggacgtgaactcagcagagaaaattgtgatgctccaaaagggacctggctgttgcagccgcgtcgctgactgcctttgctgcatgtgctgcatcagggcgtgcaacaggatgaacgaccagtgtgctattctgatggcacaggatatgtttgtagatattcaagatgaaaagattttgaaacattttcgaggcttaagaactcggaagataaatttacctcgcaacatcaactcatgctataacctctttttctctcaggtggtccttttcatcggcttgcaagtaagattggtccatgaagtgtagtttatgcacagctcatccctgcttctggtggtactgtcaatgtaaggaggggatcagcatcccttgtctatgcgccgggcggccccattgtttctgcaccaagcccgtgtaatcaggagctattgcccagtgacgcacctttcctctcaggcttgttggttgaacagctctgataatgaagagcccagtcagagtttcgcttacggtgattatagaagtcgtcgtctgcttcccttgatcacacaagcattgcgggcttcgaactgggacgctgccagaaatataagcttcagggagtgtgtgaggttatacgggtcatctcaatcagttggtttgtttgctttgatcatgcaggcattcttgccacggagaatcagagaggtacggtgcttgattcggagcattgttgattactgtggaaatgctgggtcagagttgtttgagttggctcctatgttggtcagcaatttgggtcagtcaatgaccctgttacaagtttatgctgcagtcatccgtatttttgtagagtcttcgatgtttgaggacgctcttctcacttatattcaggccaagaacattggtgttgacagacgtttgtgcaatttcttgttgaagtgtttagttgaggggaatcaaatcatgtacgctaggagcttatttgatgacatgaaaagttgtggtccttcacccaatgtctgctcttattcaattttgatgagtatgtacacacatggagagagatcatgcttggaggaagcttttgagcttctttgtgaaatggaatcaaatggtgtgagaccaaacgctacaacatatggaacttatctctatgggctttgccgttccagacaggtaacatctgcatgggactttcttcaaactctttctcagagtggaggcccttgcagcaattattgtttcaatgctgtgattcatggtttctgttgtgaaggtcaggttgacaaagccatagaggtatttcatggaatgaagaaatgtgggtatgtaccagatgtccatagctacagcatattagttgatgggttatgcaaacaaggggatttattgaaaggttatgatatgcttgaagaaatggcaagaaatggaatatgtcctaatcaagtgagttacagttcacttctgcatggcctttgcaaaactggacaggttgcattggcattgaagattttcaagaatctccaagaccatggttttgagcatgaccagataaattacagcatcattcttcatggctgttgccaacacttagatctcaaggccatctctgacctttggtttgacatgattcatcataatatcgctccagatgtttacaactataccagtctgatctacgcattatgtagacatagaaacctccaagatgcattgggagtgtttgagctcatgcttgaaaatgggttgtctcccaacatcgtgacatgcacaatcctagttgacagctttagcaaacaagggctagttggtgaagctttcctattcctggatagaatgcatcagtcattgggaatcgtcccaaacctttgcatgtacagagttatgatcaatggcctttgcaagaccaacaaatatagtggtgtgtggaatgtttttgcggacatgataaagaggggctatgttcctgatgttgtcctgtacagtattattattgagggcttcgtgaaagctctgaagttgcaggaggcgttaaggttgtaccataagatgttggatgaaggtgtaaaacctaacatatttacgtattctagcctcataaatgggctgtgtaatgatgatagacttcctgaagctatgggattgattagggatatgattggggaagacctgttacttgacaatgttttgtacacatctatcattgcttgttattgtagacgtttaaatatgaaggctgctatggaaatggctcaaagagatggaaagaagcggtgtgttgccagatgcttttgtatatacttgtatgattgatggctatagtaaacttcctgcaatggatgctgcacgcttgatgatggaagaaatggaaaaaagaaagcttaaacctactatagtaacctacacagctctcattattggataccttaaaatgggggatgagaaggaagcttgtatgatgtacgagagtatgcgtcatgtaggcattgctccagatggaaagctgtgttgcattttgggcattggcaatgacaggggtgattgtgatgattctcagaaagcgaagggtgtaacataattacataattttcacagagatttattaacttgatgaagggacttctctatgatggctgaatggctctgagctctccagtgcaggacacactgtttgctccatttgtttcctccacttccacactgccatcctatggacaaggaatggaaagcagtaacctgaaatgtggcagttaaatccgtggacaactgctgagggtgtgaccgatacaggttagcctttgtattgtgcaaataatcagataagaagtctgcattctgaaaatgcttcttttgttcaaagtgttacatcaacagttttaacttccggttacttgagatatagcatcatactgaaaatttccctgcttttcaagtttcatgtttagaaaggttttctccatttgtttctaaatacatttaaccatgctgttattttctagattgttttcctgtagaatctttttttaccatctgtagcacctgtaaagctatgagtttgacagatctgaaagatcacagcaattcatgaaagcaattaaatggatgcactccacacatgaagccaatgccatgtgcccatgtcactaataagttgattgatgcttcatggaccgccttccctgccttttcatcctcttcgggccatgttcggtaggcatggatttaatccccaggtggaattaatccagacgtggattgaatggatcccctgttgtcactctttccctaggtggttcattaatccattacccttgggctttggactctctggaaccacagaaatggatgtgtttttgat

SEQ ID NO: 22775 - DNA, 5638 bp, Zea Mays
gtcgacgcgacgccactctcttacgcacacggcggcgcatcccttccacgcaggcggccacgccccagcccggcagcaagccctcctgcccctgtcgacccacggctcaccatttccttccccgggcgatggtgaatgtgcaggagcaagtttcttcgttaaccacctcgcccttcgccttcattccttcacccggacgcagcggtggccaaacaaataacacgcctcgacgacgcggcgcgctccgtcttcctccctccccgccaccttccctccaaatcaaaaccagccagatcgccgcctcgtcctctccctctgccatcctcccgggatcgccgtcgggctcgccgcgccggaaccctagcggattgtcattcgttcgcgcgcgccccgcctcgccatggaggacttcgcgcgcgcggtggaggacgggctcaagctctcgaagcggctcgtgctcccgggaggggtgccgccgccgcgcccgccggcggggatggagcgcaccatgtcgtccgcctcggcgtcgggtcccgacccgcggctgctccccacggcgccgatggcctacgcggtggtcaccgacccggccgccatcgacacccccgacgtgcccagctaccaaccctacgtctacggccacctcgacccgcccgcgctcatcccgctgcagatgaaggaggtcgacttggccgtcgactgcgcgctcgacgccgcgcacgtcaccctgcgcgcgcgctggtggctgcactgcatcacgcgaagccgcgactgcgacgtgcgcctcgtcgtgcccttgggcgagcaggagcagggttcaattctaggcgctgaggttactgtcggaagaagatcatataatacccaagtaatcgaagtagaagaaactttggagaatcatgcaaaaattgagagtggtggccttctgaagccacatctgtttttcttgacaatatctcaggttgagggaggagcagatatctgtgctacatttcgatggtctcagaagttactatatgatagtgggtgtttctctgttgacatacctttccattttccatactttgtcaacccattaccaaaagtgttcatgaagagggaaaaagttcagttgactgcgaacactggtttcagtaaagaggtttttctgcaaggaacaagccacccgttgaaggaaaagagtaggcaaggagataaattgtttttcctgcatgaagccattgttgagaattggtcgagcaaagtttttaatttttcgtacagtgtttactcaggtgatttgtctggtggtgtgtttgtgcaaccctcaatattatgtgactatgatgatagagatagcttctgcatttttcttttacctggaagtggcaacagaaaggtattcagaaaagcagttgtgtttgttgttgacacaagtggaagcatgcaaggaaagcctcttgagaatgtcaagcatgcagtttctaccgctctttcagagcttgtgcaaggggattacttcaatattataacatttaatgatgagcttcactcattctcttcctgtttggagcaagtaaatgacaaagcaatagcaagtgcaactgattggatgaatgcaaacttagttgctgagggtggcacagatattatgcatcctttgagtgaggcaatggcattactatcaagtgttcatgacacacttccgcaaatatatcttattactgatggttctgttgatgatgagcataacatctgccaaactacaaaaaccgaagtcaccaacagagggtctaaatctccccgaatttctactttcggactaggatcatattgtaaccactatttcctgcgcatgctagcatcagttggcaaaggacattacaatgctgcacttgagacagcatcaatcgagaatcagattgttaagtggttcaggagagcatcaagtacaattgtggaaaatatctccattgatgctatgacacatcttgatgaatttgaagtggattctgagtacattccggacctttcagcaaattctcctttgtgtgtgtctggaaaataccgaggaaaattcccagacacagtgaaagctaaaggttacttagctgacatgaaggaagtcctgattgaactgaaggtccaacaactaaaggaagtaactcttgacaaagtattggtgacacaacatattgatcttatgacagcaaaggcatggctttctgcggccaaacaactggagagaaaggtgattaaattaagcatacaaaatggtgttccatcggagtacacagatatggtattacttcaaacaaatttggacaatactggaacacaaaaggtcaagcaaaaactaaaaggacagaaaggcagagatgagcaacagatcccgctccatgggctgaaactgggattcggtaacaactaacaaggacgctacaagggaaaatctcgtcacaggattttgggacgtgaactcagcagagaaaattgtgatgctccaaaagggacctggctgttgcagccgcgtcgctgactgcctttgctgcatgtgctgcatcagggcgtgcaacaggatgaacgaccagtgtgctattctgatggcacaggatatgtttgtagatattcaagatgaaaagattttgaaacattttcgaggcttaagaactcggaagataaatttacctcgcaacatcaactcatgctataacctctttttctctcaggtggtccttttcatcggcttgcaagtaagattggtccatgaagtgtagtttatgcacagctcatccctgcttctggtggtactgtcaatgtaaggaggggatcagcatcccttgtctatgcgccgggcggccccattgtttctgcaccaagcccgtgtaatcaggagctattgcccagtgacgcacctttcctctcaggcttgttggttgaacagctctgataatgaagagcccagtcagagtttcgcttacggtgattatagaagtcgtcgtctgcttcccttgatcacacaagcattgcgggcttcgaactgggacgctgccagaaatataagcttcagggagtgtgtgaggttatacgggtcatctcaatcagttggtttgtttgctttgatcatgcaggcattcttgccacggagaatcagagaggtacggtgcttgattcggagcattgttgattactgtggaaatgctgggtcagagttgtttgagttggctcctatgttggtcagcaatttgggtcagtcaatgaccctgttacaagtttatgctgcagtcatccgtatttttgtagagtcttcgatgtttgaggacgctcttctcacttatattcaggccaagaacattggtgttgacagacgtttgtgcaatttcttgttgaagtgtttagttgaggggaatcaaatcatgtacgctaggagcttatttgatgacatgaaaagttgtggtccttcacccaatgtctgctcttattcaattttgatgagtatgtacacacatggagagagatcatgcttggaggaagcttttgagcttctttgtgaaatggaatcaaatggtgtgagaccaaacgctacaacatatggaacttatctctatgggctttgccgttccagacaggtaacatctgcatgggactttcttcaaactctttctcagagtggaggcccttgcagcaattattgtttcaatgctgtgattcatggtttctgttgtgaaggtcaggttgacaaagccatagaggtatttcatggaatgaagaaatgtgggtatgtaccagatgtccatagctacagcatattagttgatgggttatgcaaacaaggggatttattgaaaggttatgatatgcttgaagaaatggcaagaaatggaatatgtcctaatcaagtgagttacagttcacttctgcatggcctttgcaaaactggacaggttgcattggcattgaagattttcaagaatctccaagaccatggttttgagcatgaccagataaattacagcatcattcttcatggctgttgccaacacttagatctcaaggccatctctgacctttggtttgacatgattcatcataatatcgctccagatgtttacaactataccagtctgatctacgcattatgtagacatagaaacctccaagatgcattgggagtgtttgagctcatgcttgaaaatgggttgtctcccaacatcgtgacatgcacaatcctagttgacagctttagcaaacaagggctagttggtgaagctttcctattcctggatagaatgcatcagtcattgggaatcgtcccaaacctttgcatgtacagagttatgatcaatggcctttgcaagaccaacaaatatagtggtgtgtggaatgtttttgcggacatgataaagaggggctatgttcctgatgttgtcctgtacagtattattattgagggcttcgtgaaagctctgaagttgcaggaggcgttaaggttgtaccataagatgttggatgaaggtgtaaaacctaacatatttacgtattctagcctcataaatgggctgtgtaatgatgatagacttcctgaagctatgggattgattagggatatgattggggaagacctgttacttgacaatgttttgtacacatctatcattgcttgttattgtagacgtttaaatatgaaggctgctatggaaatggctcaaagagatggaaagaagcggtgtgttgccagatgcttttgtatatacttgtatgattgatggctatagtaaacttcctgcaatggatgctgcacgcttgatgatggaagaaatggaaaaaagaaagcttaaacctactatagtaacctacacagctctcattattggataccttaaaatgggggatgagaaggaagcttgtatgatgtacgagagtatgcgtcatgtaggcattgctccagatggaaagctgtgttgcattttgggcattggcaatgacaggggtgattgtgatgattctcagaaagcgaagggtgtaacataattacataattttcacagagatttattaacttgatgaagggacttctctatgatggctgaatggctctgagctctccagtgcaggacacactgtttgctccatttgtttcctccacttccacactgccatcctatggacaaggaatggaaagcagtaacctgaaatgtggcagttaaatccgtggacaactgctgagggtgtgaccgatacagatgaacacacaataccatgactccggcaaaatactcccatattttgcttgaagatttactgacaattaatatagaaaaagccatggatttggatgtacccatgtaagtttttctcctgacaaagaaacacttaaattccatttatggtgcaactttctaactcactatttgtgttgcagtttgctaaatatattgcattttcagatgatgacaatagtgtcgtaaatcaatagcaaaggaactcaaaaatagatgttgaatcttcacatgaggctcaagcaaatctctggaacacaacttcctcatgaaagaaatattgtcacaggctcaaacaaattcgattatgcagatccacttacatgacaagatgaaggtgaatgcccgtgcgttgcaacggaaatatataatacaacgat

SEQ ID NO: 22776 - DNA, 5665 bp, Zea Mays
gtcgacgcgacgccactctcttacgcacacggcggcgcatcccttccacgcaggcggccacgccccagcccggcagcaagccctcctgcccctgtcgacccacggctcaccatttccttccccgggcgatggtgaatgtgcaggagcaagtttcttcgttaaccacctcgcccttcgccttcattccttcacccggacgcagcggtggccaaacaaataacacgcctcgacgacgcggcgcgctccgtcttcctccctccccgccaccttccctccaaatcaaaaccagccagatcgccgcctcgtcctctccctctgccatcctcccgggatcgccgtcgggctcgccgcgccggaaccctagcggattgtcattcgttcgcgcgcgccccgcctcgccatggaggacttcgcgcgcgcggtggaggacgggctcaagctctcgaagcggctcgtgctcccgggaggggtgccgccgccgcgcccgccggcggggatggagcgcaccatgtcgtccgcctcggcgtcgggtcccgacccgcggctgctccccacggcgccgatggcctacgcggtggtcaccgacccggccgccatcgacacccccgacgtgcccagctaccaaccctacgtctacggccacctcgacccgcccgcgctcatcccgctgcagatgaaggaggtcgacttggccgtcgactgcgcgctcgacgccgcgcacgtcaccctgcgcgcgcgctggtggctgcactgcatcacgcgaagccgcgactgcgacgtgcgcctcgtcgtgcccttgggcgagcaggagcagggttcaattctaggcgctgaggttactgtcggaagaagatcatataatacccaagtaatcgaagtagaagaaactttggagaatcatgcaaaaattgagagtggtggccttctgaagccacatctgtttttcttgacaatatctcaggttgagggaggagcagatatctgtgctacatttcgatggtctcagaagttactatatgatagtgggtgtttctctgttgacatacctttccattttccatactttgtcaacccattaccaaaagtgttcatgaagagggaaaaagttcagttgactgcgaacactggtttcagtaaagaggtttttctgcaaggaacaagccacccgttgaaggaaaagagtaggcaaggagataaattgtttttcctgcatgaagccattgttgagaattggtcgagcaaagtttttaatttttcgtacagtgtttactcaggtgatttgtctggtggtgtgtttgtgcaaccctcaatattatgtgactatgatgatagagatagcttctgcatttttcttttacctggaagtggcaacagaaaggtattcagaaaagcagttgtgtttgttgttgacacaagtggaagcatgcaaggaaagcctcttgagaatgtcaagcatgcagtttctaccgctctttcagagcttgtgcaaggggattacttcaatattataacatttaatgatgagcttcactcattctcttcctgtttggagcaagtaaatgacaaagcaatagcaagtgcaactgattggatgaatgcaaacttagttgctgagggtggcacagatattatgcatcctttgagtgaggcaatggcattactatcaagtgttcatgacacacttccgcaaatatatcttattactgatggttctgttgatgatgagcataacatctgccaaactacaaaaaccgaagtcaccaacagagggtctaaatctccccgaatttctactttcggactaggatcatattgtaaccactatttcctgcgcatgctagcatcagttggcaaaggacattacaatgctgcacttgagacagcatcaatcgagaatcagattgttaagtggttcaggagagcatcaagtacaattgtggaaaatatctccattgatgctatgacacatcttgatgaatttgaagtggattctgagtacattccggacctttcagcaaattctcctttgtgtgtgtctggaaaataccgaggaaaattcccagacacagtgaaagctaaaggttacttagctgacatgaaggaagtcctgattgaactgaaggtccaacaactaaaggaagtaactcttgacaaagtattggtgacacaacatattgatcttatgacagcaaaggcatggctttctgcggccaaacaactggagagaaaggtgattaaattaagcatacaaaatggtgttccatcggagtacacagatatggtattacttcaaacaaatttggacaatactggaacacaaaaggacgctacaagggaaaatctcgtcacaggattttgggacgtgaactcagcagagaaaattgtgatgctccaaaagggacctggctgttgcagccgcgtcgctgactgcctttgctgcatgtgctgcatcagggcgtgcaacaggatgaacgaccagtgtgctattctgatggcacaggatatgtttgtagatattcaagatgaaaagattttgaaacattttcgaggcttaagaactcggaagataaatttacctcgcaacatcaactcatgctataacctctttttctctcaggtggtccttttcatcggcttgcaagcattcttgccacggagaatcagagaggtacggtgcttgattcggagcattgttgattactgtggaaatgctgggtcagagttgtttgagttggctcctatgttggtcagcaatttgggtcagtcaatgaccctgttacaagtttatgctgcagtcatccgtatttttgtagagtcttcgatgtttgaggacgctcttctcacttatattcaggccaagaacattggtgttgacagacgtttgtgcaatttcttgttgaagtgtttagttgaggggaatcaaatcatgtacgctaggagcttatttgatgacatgaaaagttgtggtccttcacccaatgtctgctcttattcaattttgatgagtatgtacacacatggagagagatcatgcttggaggaagcttttgagcttctttgtgaaatggaatcaaatggtgtgagaccaaacgctacaacatatggaacttatctctatgggctttgccgttccagacaggtaacatctgcatgggactttcttcaaactctttctcagagtggaggcccttgcagcaattattgtttcaatgctgtgattcatggtttctgttgtgaaggtcaggttgacaaagccatagaggtatttcatggaatgaagaaatgtgggtatgtaccagatgtccatagctacagcatattagttgatgggttatgcaaacaaggggatttattgaaaggttatgatatgcttgaagaaatggcaagaaatggaatatgtcctaatcaagtgagttacagttcacttctgcatggcctttgcaaaactggacaggttgcattggcattgaagattttcaagaatctccaagaccatggttttgagcatgaccagataaattacagcatcattcttcatggctgttgccaacacttagatctcaaggccatctctgacctttggtttgacatgattcatcataatatcgctccagatgtttacaactataccagtctgatctacgcattatgtagacatagaaacctccaagatgcattgggagtgtttgagctcatgcttgaaaatgggttgtctcccaacatcgtgacatgcacaatcctagttgacagctttagcaaacaagggctagttggtgaagctttcctattcctggatagaatgcatcagtcattgggaatcgtcccaaacctttgcatgtacagagttatgatcaatggcctttgcaagaccaacaaatatagtggtgtgtggaatgtttttgcggacatgataaagaggggctatgttcctgatgttgtcctgtacagtattattattgagggcttcgtgaaagctctgaagttgcaggaggcgttaaggttgtaccataagatgttggatgaaggtgtaaaacctaacatatttacgtattctagcctcataaatgggctgtgtaatgatgatagacttcctgaagctatgggattgattagggatatgattggggaagacctgttacttgacaatgttttgtacacatctatcattgcttgttattgtagacgtttaaatatgaaggctgctatggaaatggctcaaagagatggaaagaagcggtgtgttgccagatgcttttgtatatacttgtatgattgatggctatagtaaacttcctgcaatggatgctgcacgcttgatgatggaagaaatggaaaaaagaaagcttaaacctactatagtaacctacacagctctcattattggataccttaaaatgggggatgagaaggaagcttgtatgatgtacgagagtatgcgtcatgtaggcattgctccagatggaaagctgtgttgcattttgggcattggcaatgacaggggtgattgtgatgattctcagaaagcgaagggtgtaacataattacataattttcacagagatttattaacttgatgaagggacttctctatgatggctgaatggctctgagctctccagtgcaggacacactgtttgctccatttgtttcctccacttccacactgccatcctatggacaaggaatggaaagcagtaacctgaaatgtggcagttaaatccgtggacaactgctgagggtgtgaccgatacagatgaacacacaataccatgactccggcaaaatactcccatattttgcttgaagatttactgacaattaatatagaaaaagccatggatttggatgtacccatgtaagtttttctcctgacaaagaaacacttaaattccatttatggtgcaactttctaactcactatttgtgttgcagtttgctaaatatattgcattttcagatgatgacaatagtgtcgtaaatcaatagcaaaggaactcaaaaatagatgttgaatcttcacatgaggctcaagcaaatctctggaacacaacttcctcatgaaagaaatattgtcacaggctcaaacaaattcgattatgcagatccacttacatgacaagatgaagggccagcaactttagtttgctgctaaatttcatctgcgtccgtttggtcgatgggcaggttcgatggagattgccgccgttggcgtttcgatcgccatatttaaccaagtctccaaggaacaccataatcaatgcgaacctatgcccgcacatggatatgagatggattgttatatatgcccaaatgtgaagtacttaagagaaggtgctttcattaatgttgatattgaaaaggggatacaagatggacagaaagcagttggcgacgaagcaactgttgtaaagaagcggtaaggatccatatggcgtggaattgggcagccgtccgtctaccttgcgtgccttcccccagctgcatgtatctgtgtttccgtcttgccacaagcagcccacaaccacaacttggtgtcttgtatacctgtgccttgctttccttggttggtggtgacagggccatcatgaattaggcatgacttgtttccattctggtattgtaatgtgtatcattactgctagctgctatatcttggcagtccaca

SEQ ID NO: 22777 - DNA, 5496 bp, Zea Mays
gtcgacgcgacgccactctcttacgcacacggcggcgcatcccttccacgcaggcggccacgccccagcccggcagcaagccctcctgcccctgtcgacccacggctcaccatttccttccccgggcgatggtgaatgtgcaggagcaagtttcttcgttaaccacctcgcccttcgccttcattccttcacccggacgcagcggtggccaaacaaataacacgcctcgacgacgcggcgcgctccgtcttcctccctccccgccaccttccctccaaatcaaaaccagccagatcgccgcctcgtcctctccctctgccatcctcccgggatcgccgtcgggctcgccgcgccggaaccctagcggattgtcattcgttcgcgcgcgccccgcctcgccatggaggacttcgcgcgcgcggtggaggacgggctcaagctctcgaagcggctcgtgctcccgggaggggtgccgccgccgcgcccgccggcggggatggagcgcaccatgtcgtccgcctcggcgtcgggtcccgacccgcggctgctccccacggcgccgatggcctacgcggtggtcaccgacccggccgccatcgacacccccgacgtgcccagctaccaaccctacgtctacggccacctcgacccgcccgcgctcatcccgctgcagatgaaggaggtcgacttggccgtcgactgcgcgctcgacgccgcgcacgtcaccctgcgcgcgcgctggtggctgcactgcatcacgcgaagccgcgactgcgacgtgcgcctcgtcgtgcccttgggcgagcaggagcagggttcaattctaggcgctgaggttactgtcggaagaagatcatataatacccaagtaatcgaagtagaagaaactttggagaatcatgcaaaaattgagagtggtggccttctgaagccacatctgtttttcttgacaatatctcaggttgagggaggagcagatatctgtgctacatttcgatggtctcagaagttactatatgatagtgggtgtttctctgttgacatacctttccattttccatactttgtcaacccattaccaaaagtgttcatgaagagggaaaaagttcagttgactgcgaacactggtttcagtaaagaggtttttctgcaaggaacaagccacccgttgaaggaaaagagtaggcaaggagataaattgtttttcctgcatgaagccattgttgagaattggtcgagcaaagtttttaatttttcgtacagtgtttactcaggtgatttgtctggtggtgtgtttgtgcaaccctcaatattatgtgactatgatgatagagatagcttctgcatttttcttttacctggaagtggcaacagaaaggtattcagaaaagcagttgtgtttgttgttgacacaagtggaagcatgcaaggaaagcctcttgagaatgtcaagcatgcagtttctaccgctctttcagagcttgtgcaaggggattacttcaatattataacatttaatgatgagcttcactcattctcttcctgtttggagcaagtaaatgacaaagcaatagcaagtgcaactgattggatgaatgcaaacttagttgctgagggtggcacagatattatgcatcctttgagtgaggcaatggcattactatcaagtgttcatgacacacttccgcaaatatatcttattactgatggttctgttgatgatgagcataacatctgccaaactacaaaaaccgaagtcaccaacagagggtctaaatctccccgaatttctactttcggactaggatcatattgtaaccactatttcctgcgcatgctagcatcagttggcaaaggacattacaatgctgcacttgagacagcatcaatcgagaatcagattgttaagtggttcaggagagcatcaagtacaattgtggaaaatatctccattgatgctatgacacatcttgatgaatttgaagtggattctgagtacattccggacctttcagcaaattctcctttgtgtgtgtctggaaaataccgaggaaaattcccagacacagtgaaagctaaaggttacttagctgacatgaaggaagtcctgattgaactgaaggtccaacaactaaaggaagtaactcttgacaaagtattggtgacacaacatattgatcttatgacagcaaaggcatggctttctgcggccaaacaactggagagaaaggtggggtatttggtgattaaattaagcatacaaaatggtgttccatcggagtacacagatatggtattacttcaaacaaatttggacaatactggaacacaaaaggacgctacaagggaaaatctcgtcacaggattttgggacgtgaactcagcagagaaaattgtgatgctccaaaagggacctggctgttgcagccgcgtcgctgactgcctttgctgcatgtgctgcatcagggcgtgcaacaggatgaacgaccagtgtgctattctgatggcacaggatatgtttgtagatattcaagatgaaaagattttgaaacattttcgaggcttaagaactcggaagataaatttacctcgcaacatcaactcatgctataacctctttttctctcaggtggtccttttcatcggcttgcaagcattcttgccacggagaatcagagaggtacggtgcttgattcggagcattgttgattactgtggaaatgctgggtcagagttgtttgagttggctcctatgttggtcagcaatttgggtcagtcaatgaccctgttacaagtttatgctgcagtcatccgtatttttgtagagtcttcgatgtttgaggacgctcttctcacttatattcaggccaagaacattggtgttgacagacgtttgtgcaatttcttgttgaagtgtttagttgaggggaatcaaatcatgtacgctaggagcttatttgatgacatgaaaagttgtggtccttcacccaatgtctgctcttattcaattttgatgagtatgtacacacatggagagagatcatgcttggaggaagcttttgagcttctttgtgaaatggaatcaaatggtgtgagaccaaacgctacaacatatggaacttatctctatgggctttgccgttccagacaggtaacatctgcatgggactttcttcaaactctttctcagagtggaggcccttgcagcaattattgtttcaatgctgtgattcatggtttctgttgtgaaggtcaggttgacaaagccatagaggtatttcatggaatgaagaaatgtgggtatgtaccagatgtccatagctacagcatattagttgatgggttatgcaaacaaggggatttattgaaaggttatgatatgcttgaagaaatggcaagaaatggaatatgtcctaatcaagtgagttacagttcacttctgcatggcctttgcaaaactggacaggttgcattggcattgaagattttcaagaatctccaagaccatggttttgagcatgaccagataaattacagcatcattcttcatggctgttgccaacacttagatctcaaggccatctctgacctttggtttgacatgattcatcataatatcgctccagatgtttacaactataccagtctgatctacgcattatgtagacatagaaacctccaagatgcattgggagtgtttgagctcatgcttgaaaatgggttgtctcccaacatcgtgacatgcacaatcctagttgacagctttagcaaacaagggctagttggtgaagctttcctattcctggatagaatgcatcagtcattgggaatcgtcccaaacctttgcatgtacagagttatgatcaatggcctttgcaagaccaacaaatatagtggtgtgtggaatgtttttgcggacatgataaagaggggctatgttcctgatgttgtcctgtacagtattattattgagggcttcgtgaaagctctgaagttgcaggaggcgttaaggttgtaccataagatgttggatgaaggtgtaaaacctaacatatttacgtattctagcctcataaatgggctgtgtaatgatgatagacttcctgaagctatgggattgattagggatatgattggggaagacctgttacttgacaatgttttgtacacatctatcattgcttgttattgtagacgtttaaatatgaaggctgctatggaaatggctcaaagagatggaaagaagcggtgtgttgccagatgcttttgtatatacttgtatgattgatggctatagtaaacttcctgcaatggatgctgcacgcttgatgatggaagaaatggaaaaaagaaagcttaaacctactatagtaacctacacagctctcattattggataccttaaaatgggggatgagaaggaagcttgtatgatgtacgagagtatgcgtcatgtaggcattgctccagatggaaagctgtgttgcattttgggcattggcaatgacaggggtgattgtgatgattctcagaaagcgaagggtgtaacataattacataattttcacagagatttattaacttgatgaagggacttctctatgatggctgaatggctctgagctctccagtgcaggacacactgtttgctccatttgtttcctccacttccacactgccatcctatggacaaggaatggaaagcagtaacctgaaatgtggcagttaaatccgtggacaactgctgagggtgtgaccgatacaggctcaagcaaatctctggaacacaacttcctcatgaaagaaatattgtcacaggctcaaacaaattcgattatgcagatccacttacatgacaagatgaagggccagcaactttagtttgctgctaaatttcatctgcgtccgtttggtcgatgggcaggttcgatggagattgccgccgttggcgtttcgatcgccatatttaaccaagtctccaaggtccatgaacatcaggacactgcagcagggtccggatggtaaagatcaaagcaaatatcaacatctatagcatgacacaacaggatatgataagattgaaaacgccttcgataatgctgtccgaattaataactaagtggattgttatatatgcccaaatgtgaagtacttaagagaaggtgctttcattaatgttgatattgaaaaggggatacaagatggacagaaagcagttggcgacgaagcaactgttgtaaagaagcggtaaggatccatatggcgtggaattgggcagccgtccgtctaccttgcgtgccttcccccagctgcatgtatctgtgtttccgtcttgccacaagcagcccacaaccacaacttggtgtcttgtatacctgtgccttgctttccttggttggtggtgacagggccatcatgaattaggcatgacttgtttccattctggtattgtaatgtgtatcattactgctagctgctatatcttggcagtccaca

SEQ ID NO: 22778 - DNA, 6447 bp, Zea Mays
gtcgacgcgacgccactctcttacgcacacggcggcgcatcccttccacgcaggcggccacgccccagcccggcagcaagccctcctgcccctgtcgacccacggctcaccatttccttccccgggcgatggtgaatgtgcaggagcaagtttcttcgttaaccacctcgcccttcgccttcattccttcacccggacgcagcggtggccaaacaaataacacgcctcgacgacgcggcgcgctccgtcttcctccctccccgccaccttccctccaaatcaaaaccagccagatcgccgcctcgtcctctccctctgccatcctcccgggatcgccgtcgggctcgccgcgccggaaccctagcggattgtcattcgttcgcgcgcgccccgcctcgccatggaggacttcgcgcgcgcggtggaggacgggctcaagctctcgaagcggctcgtgctcccgggaggggtgccgccgccgcgcccgccggcggggatggagcgcaccatgtcgtccgcctcggcgtcgggtcccgacccgcggctgctccccacggcgccgatggcctacgcggtggtcaccgacccggccgccatcgacacccccgacgtgcccagctaccaaccctacgtctacggccacctcgacccgcccgcgctcatcccgctgcagatgaaggaggtcgacttggccgtcgactgcgcgctcgacgccgcgcacgtcaccctgcgcgcgcgctggtggctgcactgcatcacgcgaagccgcgactgcgacgtgcgcctcgtcgtgcccttgggcgagcaggagcagggttcaattctaggcgctgaggttactgtcggaagaagatcatataatacccaagtaatcgaagtagaagaaactttggagaatcatgcaaaaattgagagtggtggccttctgaagccacatctgtttttcttgacaatatctcaggttgagggaggagcagatatctgtgctacatttcgatggtctcagaagttactatatgatagtgggtgtttctctgttgacatacctttccattttccatactttgtcaacccattaccaaaagtgttcatgaagagggaaaaagttcagttgactgcgaacactggtttcagtaaagaggtttttctgcaaggaacaagccacccgttgaaggaaaagagtaggcaaggagataaattgtttttcctgcatgaagccattgttgagaattggtcgagcaaagtttttaatttttcgtacagtgtttactcaggtgatttgtctggtggtgtgtttgtgcaaccctcaatattatgtgactatgatgatagagatagcttctgcatttttcttttacctggaagtggcaacagaaaggtattcagaaaagcagttgtgtttgttgttgacacaagtggaagcatgcaaggaaagcctcttgagaatgtcaagcatgcagtttctaccgctctttcagagcttgtgcaaggggattacttcaatattataacatttaatgatgagcttcactcattctcttcctgtttggagcaagtaaatgacaaagcaatagcaagtgcaactgattggatgaatgcaaacttagttgctgagggtggcacagatattatgcatcctttgagtgaggcaatggcattactatcaagtgttcatgacacacttccgcaaatatatcttattactgatggttctgttgatgatgagcataacatctgccaaactacaaaaaccgaagtcaccaacagagggtctaaatctccccgaatttctactttcggactaggatcatattgtaaccactatttcctgcgcatgctagcatcagttggcaaaggacattacaatgctgcacttgagacagcatcaatcgagaatcagattgttaagtggttcaggagagcatcaagtacaattgtggaaaatatctccattgatgctatgacacatcttgatgaatttgaagtggattctgagtacattccggacctttcagcaaattctcctttgtgtgtgtctggaaaataccgaggaaaattcccagacacagtgaaagctaaaggttacttagctgacatgaaggaagtcctgattgaactgaaggtccaacaactaaaggaagtaactcttgacaaagtattggtgacacaacatattgatcttatgacagcaaaggcatggctttctgcggccaaacaactggagagaaaggtgattaaattaagcatacaaaatggtgttccatcggagtacacagatatggtattacttcaaacaaatttggacaatactggaacacaaaaggtcaagcaaaaactaaaaggacagaaaggcagagatgagcaacagatcccgctccatgggctgaaactgggattcggtaacaactaacaaggacgctacaagggaaaatctcgtcacaggattttgggacgtgaactcagcagagaaaattgtgatgctccaaaagggacctggctgttgcagccgcgtcgctgactgcctttgctgcatgtgctgcatcagggcgtgcaacaggatgaacgaccagtgtgctattctgatggcacaggatatgtttgtagatattcaagatgaaaagattttgaaacattttcgaggcttaagaactcggaagataaatttacctcgcaacatcaactcatgctataacctctttttctctcaggtggtccttttcatcggcttgcaagtaagattggtccatgaagtgtagtttatgcacagctcatccctgcttctggtggtactgtcaatgtaaggaggggatcagcatcccttgtctatgcgccgggcggccccattgtttctgcaccaagcccgtgtaatcaggagctattgcccagtgacgcacctttcctctcaggcttgttggttgaacagctctgataatgaagagcccagtcagagtttcgcttacggtgattatagaagtcgtcgtctgcttcccttgatcacacaagcattgcgggcttcgaactgggacgctgccagaaatataagcttcagggagtgtgtgaggttatacgggtcatctcaatcagttggtttgtttgctttgatcatgcaggcattcttgccacggagaatcagagaggtacggtgcttgattcggagcattgttgattactgtggaaatgctgggtcagagttgtttgagttggctcctatgttggtcagcaatttgggtcagtcaatgaccctgttacaagtttatgctgcagtcatccgtatttttgtagagtcttcgatgtttgaggacgctcttctcacttatattcaggccaagaacattggtgttgacagacgtttgtgcaatttcttgttgaagtgtttagttgaggggaatcaaatcatgtacgctaggagcttatttgatgacatgaaaagttgtggtccttcacccaatgtctgctcttattcaattttgatgagtatgtacacacatggagagagatcatgcttggaggaagcttttgagcttctttgtgaaatggaatcaaatggtgtgagaccaaacgctacaacatatggaacttatctctatgggctttgccgttccagacaggtaacatctgcatgggactttcttcaaactctttctcagagtggaggcccttgcagcaattattgtttcaatgctgtgattcatggtttctgttgtgaaggtcaggttgacaaagccatagaggtatttcatggaatgaagaaatgtgggtatgtaccagatgtccatagctacagcatattagttgatgggttatgcaaacaaggggatttattgaaaggttatgatatgcttgaagaaatggcaagaaatggaatatgtcctaatcaagtgagttacagttcacttctgcatggcctttgcaaaactggacaggttgcattggcattgaagattttcaagaatctccaagaccatggttttgagcatgaccagataaattacagcatcattcttcatggctgttgccaacacttagatctcaaggccatctctgacctttggtttgacatgattcatcataatatcgctccagatgtttacaactataccagtctgatctacgcattatgtagacatagaaacctccaagatgcattgggagtgtttgagctcatgcttgaaaatgggttgtctcccaacatcgtgacatgcacaatcctagttgacagctttagcaaacaagggctagttggtgaagctttcctattcctggatagaatgcatcagtcattgggaatcgtcccaaacctttgcatgtacagagttatgatcaatggcctttgcaagaccaacaaatatagtggtgtgtggaatgtttttgcggacatgataaagaggggctatgttcctgatgttgtcctgtacagtattattattgagggcttcgtgaaagctctgaagttgcaggaggcgttaaggttgtaccataagatgttggatgaaggtgtaaaacctaacatatttacgtattctagcctcataaatgggctgtgtaatgatgatagacttcctgaagctatgggattgattagggatatgattggggaagacctgttacttgacaatgttttgtacacatctatcattgcttgttattgtagacgtttaaatatgaaggctgctatggaaatggctcaaagagatggaaagaagcggtgtgttgccagatgcttttgtatatacttgtatgattgatggctatagtaaacttcctgcaatggatgctgcacgcttgatgatggaagaaatggaaaaaagaaagcttaaacctactatagtaacctacacagctctcattattggataccttaaaatgggggatgagaaggaagcttgtatgatgtacgagagtatgcgtcatgtaggcattgctccagatggaaagctgtgttgcattttgggcattggcaatgacaggggtgattgtgatgattctcagaaagcgaagggtgtaacataattacataattttcacagagatttattaacttgatgaagggacttctctatgatggctgaatggctctgagctctccagtgcaggacacactgtttgctccatttgtttcctccacttccacactgccatcctatggacaaggaatggaaagcagtaacctgaaatgtggcagttaaatccgtggacaactgctgagggtgtgaccgatacagatgaacacacaataccatgactccggcaaaatactcccatattttgcttgaagatttactgacaattaatatagaaaaagccatggatttggatgtacccatgtaagtttttctcctgacaaagaaacacttaaattccatttatggtgcaactttctaactcactatttgtgttgcagtttgctaaatatattgcattttcagatgatgacaatagtgtcgtaaatcaatagcaaaggaactcaaaaatagatgttgaatcttcacatgaggtatgctttatgaacttaacacagcaagtttatgttccaccacacttaactattcaattaaaccacaccacagagcacaaatgttttaccatctaatactcctgaaaattcccccatcgcattagaaacgccaacgaaaaggttcttacaactcctttttttctctttttaactttaaacatttactttaccaattaccatgacaaatattgttccttaatacattcctcatgaaagaaatattgtcacaggctcaagcaaatctctggaacacaacttcctcatgaaagaaatattgtcacaggctcaaacaaattcgattatgcagatccacttacatgacaagatgaaggttcgatggagattgccgccgttggcgtttcgatcgccatatttaaccaagtctccaaggaacaccataatcaatgcgaacctatgcccgcacatggatatgagatggtccatgaacatcaggacactgcagcagggtccggatggtaaagatcaaagcaaatatcaacatctatagcatgacacaacaggatatgataagattgaaaacgccttcgataatgctgtccgaattaataactaagtggattgttatatatgcccaaatgtgaagtacttaagagaaggtgctttcattaatgttgatattgaaaaggggatacaagatggacagaaagcagttggcgacgaagcaactgttgtaaagaagcgtccacacggtggcaggacctcaggccgttctttgcacggcagagctcgggagcaggtgtccccagtttgtgtgagccacggcagggccggagtggctgcatgggagcaggtcgtcgcaaggcctcgactatttcctttccgagaattattcatcttccggtactgtgtgtcgttcaaggcaaccgtctcaacattcaaccagggttacgcaaccatttgttgaatttacg

SEQ ID NO: 22779 - DNA, 6453 bp, Zea Mays
gtcgacgcgacgccactctcttacgcacacggcggcgcatcccttccacgcaggcggccacgccccagcccggcagcaagccctcctgcccctgtcgacccacggctcaccatttccttccccgggcgatggtgaatgtgcaggagcaagtttcttcgttaaccacctcgcccttcgccttcattccttcacccggacgcagcggtggccaaacaaataacacgcctcgacgacgcggcgcgctccgtcttcctccctccccgccaccttccctccaaatcaaaaccagccagatcgccgcctcgtcctctccctctgccatcctcccgggatcgccgtcgggctcgccgcgccggaaccctagcggattgtcattcgttcgcgcgcgccccgcctcgccatggaggacttcgcgcgcgcggtggaggacgggctcaagctctcgaagcggctcgtgctcccgggaggggtgccgccgccgcgcccgccggcggggatggagcgcaccatgtcgtccgcctcggcgtcgggtcccgacccgcggctgctccccacggcgccgatggcctacgcggtggtcaccgacccggccgccatcgacacccccgacgtgcccagctaccaaccctacgtctacggccacctcgacccgcccgcgctcatcccgctgcagatgaaggaggtcgacttggccgtcgactgcgcgctcgacgccgcgcacgtcaccctgcgcgcgcgctggtggctgcactgcatcacgcgaagccgcgactgcgacgtgcgcctcgtcgtgcccttgggcgagcaggagcagggttcaattctaggcgctgaggttactgtcggaagaagatcatataatacccaagtaatcgaagtagaagaaactttggagaatcatgcaaaaattgagagtggtggccttctgaagccacatctgtttttcttgacaatatctcaggttgagggaggagcagatatctgtgctacatttcgatggtctcagaagttactatatgatagtgggtgtttctctgttgacatacctttccattttccatactttgtcaacccattaccaaaagtgttcatgaagagggaaaaagttcagttgactgcgaacactggtttcagtaaagaggtttttctgcaaggaacaagccacccgttgaaggaaaagagtaggcaaggagataaattgtttttcctgcatgaagccattgttgagaattggtcgagcaaagtttttaatttttcgtacagtgtttactcaggtgatttgtctggtggtgtgtttgtgcaaccctcaatattatgtgactatgatgatagagatagcttctgcatttttcttttacctggaagtggcaacagaaaggtattcagaaaagcagttgtgtttgttgttgacacaagtggaagcatgcaaggaaagcctcttgagaatgtcaagcatgcagtttctaccgctctttcagagcttgtgcaaggggattacttcaatattataacatttaatgatgagcttcactcattctcttcctgtttggagcaagtaaatgacaaagcaatagcaagtgcaactgattggatgaatgcaaacttagttgctgagggtggcacagatattatgcatcctttgagtgaggcaatggcattactatcaagtgttcatgacacacttccgcaaatatatcttattactgatggttctgttgatgatgagcataacatctgccaaactacaaaaaccgaagtcaccaacagagggtctaaatctccccgaatttctactttcggactaggatcatattgtaaccactatttcctgcgcatgctagcatcagttggcaaaggacattacaatgctgcacttgagacagcatcaatcgagaatcagattgttaagtggttcaggagagcatcaagtacaattgtggaaaatatctccattgatgctatgacacatcttgatgaatttgaagtggattctgagtacattccggacctttcagcaaattctcctttgtgtgtgtctggaaaataccgaggaaaattcccagacacagtgaaagctaaaggttacttagctgacatgaaggaagtcctgattgaactgaaggtccaacaactaaaggaagtaactcttgacaaagtattggtgacacaacatattgatcttatgacagcaaaggcatggctttctgcggccaaacaactggagagaaaggtgattaaattaagcatacaaaatggtgttccatcggagtacacagatatggtattacttcaaacaaatttggacaatactggaacacaaaaggtcaagcaaaaactaaaaggacagaaaggcagagatgagcaacagatcccgctccatgggctgaaactgggattcggtaacaactaacaaggacgctacaagggaaaatctcgtcacaggattttgggacgtgaactcagcagagaaaattgtgatgctccaaaagggacctggctgttgcagccgcgtcgctgactgcctttgctgcatgtgctgcatcagggcgtgcaacaggatgaacgaccagtgtgctattctgatggcacaggatatgtttgtagatattcaagatgaaaagattttgaaacattttcgaggcttaagaactcggaagataaatttacctcgcaacatcaactcatgctataacctctttttctctcaggtggtccttttcatcggcttgcaagtaagattggtccatgaagtgtagtttatgcacagctcatccctgcttctggtggtactgtcaatgtaaggaggggatcagcatcccttgtctatgcgccgggcggccccattgtttctgcaccaagcccgtgtaatcaggagctattgcccagtgacgcacctttcctctcaggcttgttggttgaacagctctgataatgaagagcccagtcagagtttcgcttacggtgattatagaagtcgtcgtctgcttcccttgatcacacaagcattgcgggcttcgaactgggacgctgccagaaatataagcttcagggagtgtgtgaggttatacgggtcatctcaatcagttggtttgtttgctttgatcatgcaggcattcttgccacggagaatcagagaggtacggtgcttgattcggagcattgttgattactgtggaaatgctgggtcagagttgtttgagttggctcctatgttggtcagcaatttgggtcagtcaatgaccctgttacaagtttatgctgcagtcatccgtatttttgtagagtcttcgatgtttgaggacgctcttctcacttatattcaggccaagaacattggtgttgacagacgtttgtgcaatttcttgttgaagtgtttagttgaggggaatcaaatcatgtacgctaggagcttatttgatgacatgaaaagttgtggtccttcacccaatgtctgctcttattcaattttgatgagtatgtacacacatggagagagatcatgcttggaggaagcttttgagcttctttgtgaaatggaatcaaatggtgtgagaccaaacgctacaacatatggaacttatctctatgggctttgccgttccagacaggtaacatctgcatgggactttcttcaaactctttctcagagtggaggcccttgcagcaattattgtttcaatgctgtgattcatggtttctgttgtgaaggtcaggttgacaaagccatagaggtatttcatggaatgaagaaatgtgggtatgtaccagatgtccatagctacagcatattagttgatgggttatgcaaacaaggggatttattgaaaggttatgatatgcttgaagaaatggcaagaaatggaatatgtcctaatcaagtgagttacagttcacttctgcatggcctttgcaaaactggacaggttgcattggcattgaagattttcaagaatctccaagaccatggttttgagcatgaccagataaattacagcatcattcttcatggctgttgccaacacttagatctcaaggccatctctgacctttggtttgacatgattcatcataatatcgctccagatgtttacaactataccagtctgatctacgcattatgtagacatagaaacctccaagatgcattgggagtgtttgagctcatgcttgaaaatgggttgtctcccaacatcgtgacatgcacaatcctagttgacagctttagcaaacaagggctagttggtgaagctttcctattcctggatagaatgcatcagtcattgggaatcgtcccaaacctttgcatgtacagagttatgatcaatggcctttgcaagaccaacaaatatagtggtgtgtggaatgtttttgcggacatgataaagaggggctatgttcctgatgttgtcctgtacagtattattattgagggcttcgtgaaagctctgaagttgcaggaggcgttaaggttgtaccataagatgttggatgaaggtgtaaaacctaacatatttacgtattctagcctcataaatgggctgtgtaatgatgatagacttcctgaagctatgggattgattagggatatgattggggaagacctgttacttgacaatgttttgtacacatctatcattgcttgttattgtagacgtttaaatatgaaggctgctatggaaatggctcaaagagatggaaagaagcggtgtgttgccagatgcttttgtatatacttgtatgattgatggctatagtaaacttcctgcaatggatgctgcacgcttgatgatggaagaaatggaaaaaagaaagcttaaacctactatagtaacctacacagctctcattattggataccttaaaatgggggatgagaaggaagcttgtatgatgtacgagagtatgcgtcatgtaggcattgctccagatggaaagctgtgttgcattttgggcattggcaatgacaggggtgattgtgatgattctcagaaagcgaagggtgtaacataattacataattttcacagagatttattaacttgatgaagggacttctctatgatggctgaatggctctgagctctccagtgcaggacacactgtttgctccatttgtttcctccacttccacactgccatcctatggacaaggaatggaaagcagtaacctgaaatgtggcagttaaatccgtggacaactgctgagggtgtgaccgatacagatgaacacacaataccatgactccggcaaaatactcccatattttgcttgaagatttactgacaattaatatagaaaaagccatggatttggatgtacccatgtaagtttttctcctgacaaagaaacacttaaattccatttatggtgcaactttctaactcactatttgtgttgcagtttgctaaatatattgcattttcagatgatgacaatagtgtgtaagcatatttgcattaccattttattcatctcactgttatgtgcttctactatatactcttatttgataccattcatttttctgttacaaaagcgtaaatcaatagcaaaggaactcaaaaatagatgttgaatcttcacatgaggctcaagcaaatctctggaacacaacttcctcatgaaagaaatattgtcacaggctcaaacaaattcgattatgcagatccacttacatgacaagatgaagggccagcaactttagtttgctgctaaatttcatctgcgtccgtttggtcgatgggcaggttcgatggagattgccgccgttggcgtttcgatcgccatatttaaccaagtctccaaggaacaccataatcaatgcgaacctatgcccgcacatggatatgagatggattgttatatatgcccaaatgtgaagtacttaagagaaggtgctttcattaatgttgatattgaaaaggggatacaagatggacagaaagcagttggcgacgaagcaactgttgtaaagaagcggtaaggatccatatggcgtggaattgggcagccgtccgtctaccttgcgtgccttcccccagctgcatgtatctgtgtttccgtcttgccacaagcagcccacaaccacaacttggtgtcttgtatacctgtgccttgctttccttggttggtggtgacagggccatcatgaattaggcatgacttgtttccattctggtattgtaatgtgtatcattactgctagctgctatatcttggcagtccacacggtggcaggacctcaggccgttctttgcacggcagagctcgggagcaggtgtccccagtttgtgtgagccacggcagggccggagtggctgcatgggagcaggtcgtcgcaaggcctcgactatttcctttccgagaattattcatcttccggtactgtgtgtcgttcaaggcaaccgtctcaacattcaaccagggttacgcaaccatttgttgaatttacg

SEQ ID NO: 22780 - DNA, 6362 bp, Zea Mays
gtcgacgcgacgccactctcttacgcacacggcggcgcatcccttccacgcaggcggccacgccccagcccggcagcaagccctcctgcccctgtcgacccacggctcaccatttccttccccgggcgatggtgaatgtgcaggagcaagtttcttcgttaaccacctcgcccttcgccttcattccttcacccggacgcagcggtggccaaacaaataacacgcctcgacgacgcggcgcgctccgtcttcctccctccccgccaccttccctccaaatcaaaaccagccagatcgccgcctcgtcctctccctctgccatcctcccgggatcgccgtcgggctcgccgcgccggaaccctagcggattgtcattcgttcgcgcgcgccccgcctcgccatggaggacttcgcgcgcgcggtggaggacgggctcaagctctcgaagcggctcgtgctcccgggaggggtgccgccgccgcgcccgccggcggggatggagcgcaccatgtcgtccgcctcggcgtcgggtcccgacccgcggctgctccccacggcgccgatggcctacgcggtggtcaccgacccggccgccatcgacacccccgacgtgcccagctaccaaccctacgtctacggccacctcgacccgcccgcgctcatcccgctgcagatgaaggaggtcgacttggccgtcgactgcgcgctcgacgccgcgcacgtcaccctgcgcgcgcgctggtggctgcactgcatcacgcgaagccgcgactgcgacgtgcgcctcgtcgtgcccttgggcgagcaggagcagggttcaattctaggcgctgaggttactgtcggaagaagatcatataatacccaagtaatcgaagtagaagaaactttggagaatcatgcaaaaattgagagtggtggccttctgaagccacatctgtttttcttgacaatatctcaggttgagggaggagcagatatctgtgctacatttcgatggtctcagaagttactatatgatagtgggtgtttctctgttgacatacctttccattttccatactttgtcaacccattaccaaaagtgttcatgaagagggaaaaagttcagttgactgcgaacactggtttcagtaaagaggtttttctgcaaggaacaagccacccgttgaaggaaaagagtaggcaaggagataaattgtttttcctgcatgaagccattgttgagaattggtcgagcaaagtttttaatttttcgtacagtgtttactcaggtgatttgtctggtggtgtgtttgtgcaaccctcaatattatgtgactatgatgatagagatagcttctgcatttttcttttacctggaagtggcaacagaaaggtattcagaaaagcagttgtgtttgttgttgacacaagtggaagcatgcaaggaaagcctcttgagaatgtcaagcatgcagtttctaccgctctttcagagcttgtgcaaggggattacttcaatattataacatttaatgatgagcttcactcattctcttcctgtttggagcaagtaaatgacaaagcaatagcaagtgcaactgattggatgaatgcaaacttagttgctgagggtggcacagatattatgcatcctttgagtgaggcaatggcattactatcaagtgttcatgacacacttccgcaaatatatcttattactgatggttctgttgatgatgagcataacatctgccaaactacaaaaaccgaagtcaccaacagagggtctaaatctccccgaatttctactttcggactaggatcatattgtaaccactatttcctgcgcatgctagcatcagttggcaaaggacattacaatgctgcacttgagacagcatcaatcgagaatcagattgttaagtggttcaggagagcatcaagtacaattgtggaaaatatctccattgatgctatgacacatcttgatgaatttgaagtggattctgagtacattccggacctttcagcaaattctcctttgtgtgtgtctggaaaataccgaggaaaattcccagacacagtgaaagctaaaggttacttagctgacatgaaggaagtcctgattgaactgaaggtccaacaactaaaggaagtaactcttgacaaagtattggtgacacaacatattgatcttatgacagcaaaggcatggctttctgcggccaaacaactggagagaaaggtgattaaattaagcatacaaaatggtgttccatcggagtacacagatatggtattacttcaaacaaatttggacaatactggaacacaaaaggtcaagcaaaaactaaaaggacagaaaggcagagatgagcaacagatcccgctccatgggctgaaactgggattcggtaacaactaacaaggacgctacaagggaaaatctcgtcacaggattttgggacgtgaactcagcagagaaaattgtgatgctccaaaagggacctggctgttgcagccgcgtcgctgactgcctttgctgcatgtgctgcatcagggcgtgcaacaggatgaacgaccagtgtgctattctgatggcacaggatatgtttgtagatattcaagatgaaaagattttgaaacattttcgaggcttaagaactcggaagataaatttacctcgcaacatcaactcatgctataacctctttttctctcaggtggtccttttcatcggcttgcaagtaagattggtccatgaagtgtagtttatgcacagctcatccctgcttctggtggtactgtcaatgtaaggaggggatcagcatcccttgtctatgcgccgggcggccccattgtttctgcaccaagcccgtgtaatcaggagctattgcccagtgacgcacctttcctctcaggcttgttggttgaacagctctgataatgaagagcccagtcagagtttcgcttacggtgattatagaagtcgtcgtctgcttcccttgatcacacaagcattgcgggcttcgaactgggacgctgccagaaatataagcttcagggagtgtgtgaggttatacgggtcatctcaatcagttggtttgtttgctttgatcatgcaggcattcttgccacggagaatcagagaggtacggtgcttgattcggagcattgttgattactgtggaaatgctgggtcagagttgtttgagttggctcctatgttggtcagcaatttgggtcagtcaatgaccctgttacaagtttatgctgcagtcatccgtatttttgtagagtcttcgatgtttgaggacgctcttctcacttatattcaggccaagaacattggtgttgacagacgtttgtgcaatttcttgttgaagtgtttagttgaggggaatcaaatcatgtacgctaggagcttatttgatgacatgaaaagttgtggtccttcacccaatgtctgctcttattcaattttgatgagtatgtacacacatggagagagatcatgcttggaggaagcttttgagcttctttgtgaaatggaatcaaatggtgtgagaccaaacgctacaacatatggaacttatctctatgggctttgccgttccagacaggtaacatctgcatgggactttcttcaaactctttctcagagtggaggcccttgcagcaattattgtttcaatgctgtgattcatggtttctgttgtgaaggtcaggttgacaaagccatagaggtatttcatggaatgaagaaatgtgggtatgtaccagatgtccatagctacagcatattagttgatgggttatgcaaacaaggggatttattgaaaggttatgatatgcttgaagaaatggcaagaaatggaatatgtcctaatcaagtgagttacagttcacttctgcatggcctttgcaaaactggacaggttgcattggcattgaagattttcaagaatctccaagaccatggttttgagcatgaccagataaattacagcatcattcttcatggctgttgccaacacttagatctcaaggccatctctgacctttggtttgacatgattcatcataatatcgctccagatgtttacaactataccagtctgatctacgcattatgtagacatagaaacctccaagatgcattgggagtgtttgagctcatgcttgaaaatgggttgtctcccaacatcgtgacatgcacaatcctagttgacagctttagcaaacaagggctagttggtgaagctttcctattcctggatagaatgcatcagtcattgggaatcgtcccaaacctttgcatgtacagagttatgatcaatggcctttgcaagaccaacaaatatagtggtgtgtggaatgtttttgcggacatgataaagaggggctatgttcctgatgttgtcctgtacagtattattattgagggcttcgtgaaagctctgaagttgcaggaggcgttaaggttgtaccataagatgttggatgaaggtgtaaaacctaacatatttacgtattctagcctcataaatgggctgtgtaatgatgatagacttcctgaagctatgggattgattagggatatgattggggaagacctgttacttgacaatgttttgtacacatctatcattgcttgttattgtagacgtttaaatatgaaggctgctatggaaatggctcaaagagatggaaagaagcggtgtgttgccagatgcttttgtatatacttgtatgattgatggctatagtaaacttcctgcaatggatgctgcacgcttgatgatggaagaaatggaaaaaagaaagcttaaacctactatagtaacctacacagctctcattattggataccttaaaatgggggatgagaaggaagcttgtatgatgtacgagagtatgcgtcatgtaggcattgctccagatggaaagctgtgttgcattttgggcattggcaatgacaggggtgattgtgatgattctcagaaagcgaagggtgtaacataattacataattttcacagagatttattaacttgatgaagggacttctctatgatggctgaatggctctgagctctccagtgcaggacacactgtttgctccatttgtttcctccacttccacactgccatcctatggacaaggaatggaaagcagtaacctgaaatgtggcagttaaatccgtggacaactgctgagggtgtgaccgatacagatgaacacacaataccatgactccggcaaaatactcccatattttgcttgaagatttactgacaattaatatagaaaaagccatggatttggatgtacccattttgctaaatatattgcattttcagatgatgacaatagtgtcgtaaatcaatagcaaaggaactcaaaaatagatgttgaatcttcacatgaggctcaagcaaatctctggaacacaacttcctcatgaaagaaatattgtcacaggctcaaacaaattcgattatgcagatccacttacatgacaagatgaaggttcgatggagattgccgccgttggcgtttcgatcgccatatttaaccaagtctccaaggaacaccataatcaatgcgaacctatgcccgcacatggatatgagatggtccatgaacatcaggacactgcagcagggtccggatggtaaagatcaaagcaaatatcaacatctatagcatgacacaacaggatatgataagattgaaaacgccttcgataatgctgtccgaattaataactaagtggattgttatatatgcccaaatgtgaagtacttaagagaaggtgctttcattaatgttgatattgaaaaggggatacaagatggacagaaagcagttggcgacgaagcaactgttgtaaagaagcggtaaggatccatatggcgtggaattgggcagccgtccgtctaccttgcgtgccttcccccagctgcatgtatctgtgtttccgtcttgccacaagcagcccacaaccacaacttggtgtcttgtatacctgtgccttgctttccttggttggtggtgacagggccatcatgaattaggcatgacttgtttccattctggtattgtaatgtgtatcattactgctagctgctatatcttggcagtccacacggtggcaggacctcaggccgttctttgcacggcagagctcgggagcaggtgtccccagtttgtgtgagccacggcagggccggagtggctgcatgggagcaggtcgtcgcaaggcctcgactatttcctttccgagaattattcatcttccggtactgtgtgtcgttcaaggcaaccgtctcaacattcaaccagggttacgcaaccatttgttgaatttacg

SEQ ID NO: 22781 - DNA, 6399 bp, Zea Mays
gtcgacgcgacgccactctcttacgcacacggcggcgcatcccttccacgcaggcggccacgccccagcccggcagcaagccctcctgcccctgtcgacccacggctcaccatttccttccccgggcgatggtgaatgtgcaggagcaagtttcttcgttaaccacctcgcccttcgccttcattccttcacccggacgcagcggtggccaaacaaataacacgcctcgacgacgcggcgcgctccgtcttcctccctccccgccaccttccctccaaatcaaaaccagccagatcgccgcctcgtcctctccctctgccatcctcccgggatcgccgtcgggctcgccgcgccggaaccctagcggattgtcattcgttcgcgcgcgccccgcctcgccatggaggacttcgcgcgcgcggtggaggacgggctcaagctctcgaagcggctcgtgctcccgggaggggtgccgccgccgcgcccgccggcggggatggagcgcaccatgtcgtccgcctcggcgtcgggtcccgacccgcggctgctccccacggcgccgatggcctacgcggtggtcaccgacccggccgccatcgacacccccgacgtgcccagctaccaaccctacgtctacggccacctcgacccgcccgcgctcatcccgctgcagatgaaggaggtcgacttggccgtcgactgcgcgctcgacgccgcgcacgtcaccctgcgcgcgcgctggtggctgcactgcatcacgcgaagccgcgactgcgacgtgcgcctcgtcgtgcccttgggcgagcaggagcagggttcaattctaggcgctgaggttactgtcggaagaagatcatataatacccaagtaatcgaagtagaagaaactttggagaatcatgcaaaaattgagagtggtggccttctgaagccacatctgtttttcttgacaatatctcaggttgagggaggagcagatatctgtgctacatttcgatggtctcagaagttactatatgatagtgggtgtttctctgttgacatacctttccattttccatactttgtcaacccattaccaaaagtgttcatgaagagggaaaaagttcagttgactgcgaacactggtttcagtaaagaggtttttctgcaaggaacaagccacccgttgaaggaaaagagtaggcaaggagataaattgtttttcctgcatgaagccattgttgagaattggtcgagcaaagtttttaatttttcgtacagtgtttactcaggtgatttgtctggtggtgtgtttgtgcaaccctcaatattatgtgactatgatgatagagatagcttctgcatttttcttttacctggaagtggcaacagaaaggtattcagaaaagcagttgtgtttgttgttgacacaagtggaagcatgcaaggaaagcctcttgagaatgtcaagcatgcagtttctaccgctctttcagagcttgtgcaaggggattacttcaatattataacatttaatgatgagcttcactcattctcttcctgtttggagcaagtaaatgacaaagcaatagcaagtgcaactgattggatgaatgcaaacttagttgctgagggtggcacagatattatgcatcctttgagtgaggcaatggcattactatcaagtgttcatgacacacttccgcaaatatatcttattactgatggttctgttgatgatgagcataacatctgccaaactacaaaaaccgaagtcaccaacagagggtctaaatctccccgaatttctactttcggactaggatcatattgtaaccactatttcctgcgcatgctagcatcagttggcaaaggacattacaatgctgcacttgagacagcatcaatcgagaatcagattgttaagtggttcaggagagcatcaagtacaattgtggaaaatatctccattgatgctatgacacatcttgatgaatttgaagtggattctgagtacattccggacctttcagcaaattctcctttgtgtgtgtctggaaaataccgaggaaaattcccagacacagtgaaagctaaaggttacttagctgacatgaaggaagtcctgattgaactgaaggtccaacaactaaaggaagtaactcttgacaaagtattggtgacacaacatattgatcttatgacagcaaaggcatggctttctgcggccaaacaactggagagaaaggtgattaaattaagcatacaaaatggtgttccatcggagtacacagatatggtattacttcaaacaaatttggacaatactggaacacaaaaggtcaagcaaaaactaaaaggacagaaaggcagagatgagcaacagatcccgctccatgggctgaaactgggattcggtaacaactaacaaggacgctacaagggaaaatctcgtcacaggattttgggacgtgaactcagcagagaaaattgtgatgctccaaaagggacctggctgttgcagccgcgtcgctgactgcctttgctgcatgtgctgcatcagggcgtgcaacaggatgaacgaccagtgtgctattctgatggcacaggatatgtttgtagatattcaagatgaaaagattttgaaacattttcgaggcttaagaactcggaagataaatttacctcgcaacatcaactcatgctataacctctttttctctcaggtggtccttttcatcggcttgcaagtaagattggtccatgaagtgtagtttatgcacagctcatccctgcttctggtggtactgtcaatgtaaggaggggatcagcatcccttgtctatgcgccgggcggccccattgtttctgcaccaagcccgtgtaatcaggagctattgcccagtgacgcacctttcctctcaggcttgttggttgaacagctctgataatgaagagcccagtcagagtttcgcttacggtgattatagaagtcgtcgtctgcttcccttgatcacacaagcattgcgggcttcgaactgggacgctgccagaaatataagcttcagggagtgtgtgaggttatacgggtcatctcaatcagttggtttgtttgctttgatcatgcaggcattcttgccacggagaatcagagaggtacggtgcttgattcggagcattgttgattactgtggaaatgctgggtcagagttgtttgagttggctcctatgttggtcagcaatttgggtcagtcaatgaccctgttacaagtttatgctgcagtcatccgtatttttgtagagtcttcgatgtttgaggacgctcttctcacttatattcaggccaagaacattggtgttgacagacgtttgtgcaatttcttgttgaagtgtttagttgaggggaatcaaatcatgtacgctaggagcttatttgatgacatgaaaagttgtggtccttcacccaatgtctgctcttattcaattttgatgagtatgtacacacatggagagagatcatgcttggaggaagcttttgagcttctttgtgaaatggaatcaaatggtgtgagaccaaacgctacaacatatggaacttatctctatgggctttgccgttccagacaggtaacatctgcatgggactttcttcaaactctttctcagagtggaggcccttgcagcaattattgtttcaatgctgtgattcatggtttctgttgtgaaggtcaggttgacaaagccatagaggtatttcatggaatgaagaaatgtgggtatgtaccagatgtccatagctacagcatattagttgatgggttatgcaaacaaggggatttattgaaaggttatgatatgcttgaagaaatggcaagaaatggaatatgtcctaatcaagtgagttacagttcacttctgcatggcctttgcaaaactggacaggttgcattggcattgaagattttcaagaatctccaagaccatggttttgagcatgaccagataaattacagcatcattcttcatggctgttgccaacacttagatctcaaggccatctctgacctttggtttgacatgattcatcataatatcgctccagatgtttacaactataccagtctgatctacgcattatgtagacatagaaacctccaagatgcattgggagtgtttgagctcatgcttgaaaatgggttgtctcccaacatcgtgacatgcacaatcctagttgacagctttagcaaacaagggctagttggtgaagctttcctattcctggatagaatgcatcagtcattgggaatcgtcccaaacctttgcatgtacagagttatgatcaatggcctttgcaagaccaacaaatatagtggtgtgtggaatgtttttgcggacatgataaagaggggctatgttcctgatgttgtcctgtacagtattattattgagggcttcgtgaaagctctgaagttgcaggaggcgttaaggttgtaccataagatgttggatgaaggtgtaaaacctaacatatttacgtattctagcctcataaatgggctgtgtaatgatgatagacttcctgaagctatgggattgattagggatatgattggggaagacctgttacttgacaatgttttgtacacatctatcattgcttgttattgtagacgtttaaatatgaaggctgctatggaaatggctcaaagagatggaaagaagcggtgtgttgccagatgcttttgtatatacttgtatgattgatggctatagtaaacttcctgcaatggatgctgcacgcttgatgatggaagaaatggaaaaaagaaagcttaaacctactatagtaacctacacagctctcattattggataccttaaaatgggggatgagaaggaagcttgtatgatgtacgagagtatgcgtcatgtaggcattgctccagatggaaagctgtgttgcattttgggcattggcaatgacaggggtgattgtgatgattctcagaaagcgaagggtgtaacataattacataattttcacagagatttattaacttgatgaagggacttctctatgatggctgaatggctctgagctctccagtgcaggacacactgtttgctccatttgtttcctccacttccacactgccatcctatggacaaggaatggaaagcagtaacctgaaatgtggcagttaaatccgtggacaactgctgagggtgtgaccgatacagatgaacacacaataccatgactccggcaaaatactcccatattttgcttgaagatttactgacaattaatatagaaaaagccatggatttggatgtacccatgtaagtttttctcctgacaaagaaacacttaaattccatttatggtgcaactttctaactcactatttgtgttgcagtttgctaaatatattgcattttcagatgatgacaatagtgtcgtaaatcaatagcaaaggaactcaaaaatagatgttgaatcttcacatgaggtatgctttatgaacttaacacagcaagtttatgttccaccacacttaactattcaattaaaccacaccacagagcacaaatgttttaccatctaatactcctgaaaattcccccatcgcattagaaacgccaacgaaaaggttcttacaactcctttttttctctttttaactttaaacatttactttaccaattaccatgacaaatattgttccttaatacattcctcatgaaagaaatattgtcacaggctcaagcaaatctctggaacacaacttcctcatgaaagaaatattgtcacaggctcaaacaaattcgattatgcagatccacttacatgacaagatgaaggttcgatggagattgccgccgttggcgtttcgatcgccatatttaaccaagtctccaaggtccatgaacatcaggacactgcagcagggtccggatggtaaagatcaaagcaaatatcaacatctatagcatgacacaacaggatatgataagattgaaaacgccttcgataatgctgtccgaattaataactaagtggattgttatatatgcccaaatgtgaagtacttaagagaaggtgctttcattaatgttgatattgaaaaggggatacaagatggacagaaagcagttggcgacgaagcaactgttgtaaagaagcgtccacacggtggcaggacctcaggccgttctttgcacggcagagctcgggagcaggtgtccccagtttgtgtgagccacggcagggccggagtggctgcatgggagcaggtcgtcgcaaggcctcgactatttcctttccgagaattattcatcttccggtactgtgtgtcgttcaaggcaaccgtctcaacattcaaccagggttacgcaaccatttgttgaatttacg

SEQ ID NO: 22782 - DNA, 6552 bp, Zea Mays
gtcgacgcgacgccactctcttacgcacacggcggcgcatcccttccacgcaggcggccacgccccagcccggcagcaagccctcctgcccctgtcgacccacggctcaccatttccttccccgggcgatggtgaatgtgcaggagcaagtttcttcgttaaccacctcgcccttcgccttcattccttcacccggacgcagcggtggccaaacaaataacacgcctcgacgacgcggcgcgctccgtcttcctccctccccgccaccttccctccaaatcaaaaccagccagatcgccgcctcgtcctctccctctgccatcctcccgggatcgccgtcgggctcgccgcgccggaaccctagcggattgtcattcgttcgcgcgcgccccgcctcgccatggaggacttcgcgcgcgcggtggaggacgggctcaagctctcgaagcggctcgtgctcccgggaggggtgccgccgccgcgcccgccggcggggatggagcgcaccatgtcgtccgcctcggcgtcgggtcccgacccgcggctgctccccacggcgccgatggcctacgcggtggtcaccgacccggccgccatcgacacccccgacgtgcccagctaccaaccctacgtctacggccacctcgacccgcccgcgctcatcccgctgcagatgaaggaggtcgacttggccgtcgactgcgcgctcgacgccgcgcacgtcaccctgcgcgcgcgctggtggctgcactgcatcacgcgaagccgcgactgcgacgtgcgcctcgtcgtgcccttgggcgagcaggagcagggttcaattctaggcgctgaggttactgtcggaagaagatcatataatacccaagtaatcgaagtagaagaaactttggagaatcatgcaaaaattgagagtggtggccttctgaagccacatctgtttttcttgacaatatctcaggttgagggaggagcagatatctgtgctacatttcgatggtctcagaagttactatatgatagtgggtgtttctctgttgacatacctttccattttccatactttgtcaacccattaccaaaagtgttcatgaagagggaaaaagttcagttgactgcgaacactggtttcagtaaagaggtttttctgcaaggaacaagccacccgttgaaggaaaagagtaggcaaggagataaattgtttttcctgcatgaagccattgttgagaattggtcgagcaaagtttttaatttttcgtacagtgtttactcaggtgatttgtctggtggtgtgtttgtgcaaccctcaatattatgtgactatgatgatagagatagcttctgcatttttcttttacctggaagtggcaacagaaaggtattcagaaaagcagttgtgtttgttgttgacacaagtggaagcatgcaaggaaagcctcttgagaatgtcaagcatgcagtttctaccgctctttcagagcttgtgcaaggggattacttcaatattataacatttaatgatgagcttcactcattctcttcctgtttggagcaagtaaatgacaaagcaatagcaagtgcaactgattggatgaatgcaaacttagttgctgagggtggcacagatattatgcatcctttgagtgaggcaatggcattactatcaagtgttcatgacacacttccgcaaatatatcttattactgatggttctgttgatgatgagcataacatctgccaaactacaaaaaccgaagtcaccaacagagggtctaaatctccccgaatttctactttcggactaggatcatattgtaaccactatttcctgcgcatgctagcatcagttggcaaaggacattacaatgctgcacttgagacagcatcaatcgagaatcagattgttaagtggttcaggagagcatcaagtacaattgtggaaaatatctccattgatgctatgacacatcttgatgaatttgaagtggattctgagtacattccggacctttcagcaaattctcctttgtgtgtgtctggaaaataccgaggaaaattcccagacacagtgaaagctaaaggttacttagctgacatgaaggaagtcctgattgaactgaaggtccaacaactaaaggaagtaactcttgacaaagtattggtgacacaacatattgatcttatgacagcaaaggcatggctttctgcggccaaacaactggagagaaaggtgattaaattaagcatacaaaatggtgttccatcggagtacacagatatggtattacttcaaacaaatttggacaatactggaacacaaaaggtcaagcaaaaactaaaaggacagaaaggcagagatgagcaacagatcccgctccatgggctgaaactgggattcggtaacaactaacaaggacgctacaagggaaaatctcgtcacaggattttgggacgtgaactcagcagagaaaattgtgatgctccaaaagggacctggctgttgcagccgcgtcgctgactgcctttgctgcatgtgctgcatcagggcgtgcaacaggatgaacgaccagtgtgctattctgatggcacaggatatgtttgtagatattcaagatgaaaagattttgaaacattttcgaggcttaagaactcggaagataaatttacctcgcaacatcaactcatgctataacctctttttctctcaggtggtccttttcatcggcttgcaagtaagattggtccatgaagtgtagtttatgcacagctcatccctgcttctggtggtactgtcaatgtaaggaggggatcagcatcccttgtctatgcgccgggcggccccattgtttctgcaccaagcccgtgtaatcaggagctattgcccagtgacgcacctttcctctcaggcttgttggttgaacagctctgataatgaagagcccagtcagagtttcgcttacggtgattatagaagtcgtcgtctgcttcccttgatcacacaagcattgcgggcttcgaactgggacgctgccagaaatataagcttcagggagtgtgtgaggttatacgggtcatctcaatcagttggtttgtttgctttgatcatgcaggcattcttgccacggagaatcagagaggtacggtgcttgattcggagcattgttgattactgtggaaatgctgggtcagagttgtttgagttggctcctatgttggtcagcaatttgggtcagtcaatgaccctgttacaagtttatgctgcagtcatccgtatttttgtagagtcttcgatgtttgaggacgctcttctcacttatattcaggccaagaacattggtgttgacagacgtttgtgcaatttcttgttgaagtgtttagttgaggggaatcaaatcatgtacgctaggagcttatttgatgacatgaaaagttgtggtccttcacccaatgtctgctcttattcaattttgatgagtatgtacacacatggagagagatcatgcttggaggaagcttttgagcttctttgtgaaatggaatcaaatggtgtgagaccaaacgctacaacatatggaacttatctctatgggctttgccgttccagacaggtaacatctgcatgggactttcttcaaactctttctcagagtggaggcccttgcagcaattattgtttcaatgctgtgattcatggtttctgttgtgaaggtcaggttgacaaagccatagaggtatttcatggaatgaagaaatgtgggtatgtaccagatgtccatagctacagcatattagttgatgggttatgcaaacaaggggatttattgaaaggttatgatatgcttgaagaaatggcaagaaatggaatatgtcctaatcaagtgagttacagttcacttctgcatggcctttgcaaaactggacaggttgcattggcattgaagattttcaagaatctccaagaccatggttttgagcatgaccagataaattacagcatcattcttcatggctgttgccaacacttagatctcaaggccatctctgacctttggtttgacatgattcatcataatatcgctccagatgtttacaactataccagtctgatctacgcattatgtagacatagaaacctccaagatgcattgggagtgtttgagctcatgcttgaaaatgggttgtctcccaacatcgtgacatgcacaatcctagttgacagctttagcaaacaagggctagttggtgaagctttcctattcctggatagaatgcatcagtcattgggaatcgtcccaaacctttgcatgtacagagttatgatcaatggcctttgcaagaccaacaaatatagtggtgtgtggaatgtttttgcggacatgataaagaggggctatgttcctgatgttgtcctgtacagtattattattgagggcttcgtgaaagctctgaagttgcaggaggcgttaaggttgtaccataagatgttggatgaaggtgtaaaacctaacatatttacgtattctagcctcataaatgggctgtgtaatgatgatagacttcctgaagctatgggattgattagggatatgattggggaagacctgttacttgacaatgttttgtacacatctatcattgcttgttattgtagacgtttaaatatgaaggctgctatggaaatggctcaaagagatggaaagaagcggtgtgttgccagatgcttttgtatatacttgtatgattgatggctatagtaaacttcctgcaatggatgctgcacgcttgatgatggaagaaatggaaaaaagaaagcttaaacctactatagtaacctacacagctctcattattggataccttaaaatgggggatgagaaggaagcttgtatgatgtacgagagtatgcgtcatgtaggcattgctccagatggaaagctgtgttgcattttgggcattggcaatgacaggggtgattgtgatgattctcagaaagcgaagggtgtaacataattacataattttcacagagatttattaacttgatgaagggacttctctatgatggctgaatggctctgagctctccagtgcaggacacactgtttgctccatttgtttcctccacttccacactgccatcctatggacaaggaatggaaagcagtaacctgaaatgtggcagttaaatccgtggacaactgctgagggtgtgaccgatacagatgaacacacaataccatgactccggcaaaatactcccatattttgcttgaagatttactgacaattaatatagaaaaagccatggatttggatgtacccatgtaagtttttctcctgacaaagaaacacttaaattccatttatggtgcaactttctaactcactatttgtgttgcagtttgctaaatatattgcattttcagatgatgacaatagtgtgtaagcatatttgcattaccattttattcatctcactgttatgtgcttctactatatactcttatttgataccattcatttttctgttacaaaagcgtaaatcaatagcaaaggaactcaaaaatagatgttgaatcttcacatgaggtatgctttatgaacttaacacagcaagtttatgttccaccacacttaactattcaattaaaccacaccacagagcacaaatgttttaccatctaatactcctgaaaattcccccatcgcattagaaacgccaacgaaaaggttcttacaactcctttttttctctttttaactttaaacatttactttaccaattaccatgacaaatattgttccttaatacattcctcatgaaagaaatattgtcacaggctcaagcaaatctctggaacacaacttcctcatgaaagaaatattgtcacaggctcaaacaaattcgattatgcagatccacttacatgacaagatgaagggccagcaactttagtttgctgctaaatttcatctgcgtccgtttggtcgatgggcaggttcgatggagattgccgccgttggcgtttcgatcgccatatttaaccaagtctccaaggtccatgaacatcaggacactgcagcagggtccggatggtaaagatcaaagcaaatatcaacatctatagcatgacacaacaggatatgataagattgaaaacgccttcgataatgctgtccgaattaataactaagtggattgttatatatgcccaaatgtgaagtacttaagagaaggtgctttcattaatgttgatattgaaaaggggatacaagatggacagaaagcagttggcgacgaagcaactgttgtaaagaagcgtccacacggtggcaggacctcaggccgttctttgcacggcagagctcgggagcaggtgtccccagtttgtgtgagccacggcagggccggagtggctgcatgggagcaggtcgtcgcaaggcctcgactatttcctttccgagaattattcatcttccggtactgtgtgtcgttcaaggcaaccgtctcaacattcaaccagggttacgcaaccatttgttgaatttacg

SEQ ID NO: 22783 - DNA, 3455 bp, Zea Mays
ccgccgcagccacgcccggagccccgccgcagcccgcaccccgcagcgccgctcgccccgcccggagcacccccgcgagcctgcgaccacgccgttgtccagccgccgctccgccgtttgtgaagcacatttgtgaagcagacaagctgtgatttgtgatttgtgaccctaactgtgatttgtgaagcagacaagcagtgaaggatatgtttgtagatattcaagatgaaaagattttgaaacattttcgaggcttaagaactcggaagataaatttacctcgcaacatcaactcatgctataacctctttttctctcaggtggtccttttcatcggcttgcaagtaagattggtccatgaagtgtagtttatgcacagctcatccctgcttctggtggtactgtcaatgtaaggaggggatcagcatcccttgtctatgcgccgggcggccccattgtttctgcaccaagcccgtgtaatcaggagctattgcccagtgacgcacctttcctctcaggcttgttggttgaacagctctgataatgaagagcccagtcagagtttcgcttacggtgattatagaagtcgtcgtctgcttcccttgatcacacaagcattgcgggcttcgaactgggacgctgccagaaatataagcttcagggagtgtgtgaggttatacgggtcatctcaatcagttggtttgtttgctttgatcatgcaggcattcttgccacggagaatcagagaggtacggtgcttgattcggagcattgttgattactgtggaaatgctgggtcagagttgtttgagttggctcctatgttggtcagcaatttgggtcagtcaatgaccctgttacaagtttatgctgcagtcatccgtatttttgtagagtcttcgatgtttgaggacgctcttctcacttatattcaggccaagaacattggtgttgacagacgtttgtgcaatttcttgttgaagtgtttagttgaggggaatcaaatcatgtacgctaggagcttatttgatgacatgaaaagttgtggtccttcacccaatgtctgctcttattcaattttgatgagtatgtacacacatggagagagatcatgcttggaggaagcttttgagcttctttgtgaaatggaatcaaatggtgtgagaccaaacgctacaacatatggaacttatctctatgggctttgccgttccagacaggtaacatctgcatgggactttcttcaaactctttctcagagtggaggcccttgcagcaattattgtttcaatgctgtgattcatggtttctgttgtgaaggtcaggttgacaaagccatagaggtatttcatggaatgaagaaatgtgggtatgtaccagatgtccatagctacagcatattagttgatgggttatgcaaacaaggggatttattgaaaggttatgatatgcttgaagaaatggcaagaaatggaatatgtcctaatcaagtgagttacagttcacttctgcatggcctttgcaaaactggacaggttgcattggcattgaagattttcaagaatctccaagaccatggttttgagcatgaccagataaattacagcatcattcttcatggctgttgccaacacttagatctcaaggccatctctgacctttggtttgacatgattcatcataatatcgctccagatgtttacaactataccagtctgatctacgcattatgtagacatagaaacctccaagatgcattgggagtgtttgagctcatgcttgaaaatgggttgtctcccaacatcgtgacatgcacaatcctagttgacagctttagcaaacaagggctagttggtgaagctttcctattcctggatagaatgcatcagtcattgggaatcgtcccaaacctttgcatgtacagagttatgatcaatggcctttgcaagaccaacaaatatagtggtgtgtggaatgtttttgcggacatgataaagaggggctatgttcctgatgttgtcctgtacagtattattattgagggcttcgtgaaagctctgaagttgcaggaggcgttaaggttgtaccataagatgttggatgaaggtgtaaaacctaacatatttacgtattctagcctcataaatgggctgtgtaatgatgatagacttcctgaagctatgggattgattagggatatgattggggaagacctgttacttgacaatgttttgtacacatctatcattgcttgttattgtagacgtttaaatatgaaggctgctatggaaatggctcaaagagatggaaagaagcggtgtgttgccagatgcttttgtatatacttgtatgattgatggctatagtaaacttcctgcaatggatgctgcacgcttgatgatggaagaaatggaaaaaagaaagcttaaacctactatagtaacctacacagctctcattattggataccttaaaatgggggatgagaaggaagcttgtatgatgtacgagagtatgcgtcatgtaggcattgctccagatggaaagctgtgttgcattttgggcattggcaatgacaggggtgattgtgatgattctcagaaagcgaagggtgtaacataattacataattttcacagagatttattaacttgatgaagggacttctctatgatggctgaatggctctgagctctccagtgcaggacacactgtttgctccatttgtttcctccacttccacactgccatcctatggacaaggaatggaaagcagtaacctgaaatgtggcagttaaatccgtggacaactgctgagggtgtgaccgatacaggctcaagcaaatctctggaacacaacttcctcatgaaagaaatattgtcacaggctcaaacaaattcgattatgcagatccacttacatgacaagatgaagggccagcaactttagtttgctgctaaatttcatctgcgtccgtttggtcgatgggcaggttcgatggagattgccgccgttggcgtttcgatcgccatatttaaccaagtctccaaggaacaccataatcaatgcgaacctatgcccgcacatggatatgagatggattgttatatatgcccaaatgtgaagtacttaagagaaggtgctttcattaatgttgatattgaaaaggggatacaagatggacagaaagcagttggcgacgaagcaactgttgtaaagaagcgtccacacggtggcaggacctcaggccgttctttgcacggcagagctcgggagcaggtgtccccagtttgtgtgagccacggcagggccggagtggctgcatgggagcaggtcgtcgcaaggcctcgactatttcctttccgagaattattcatcttccggtactgtgtgtcgttcaaggcaaccgtctcaacattcaaccagggttacgcaaccatttgttgaatttacg

SEQ ID NO: 22784 - DNA, 3580 bp, Zea Mays
cgccccgcccggagcacccccgcgagcctgcgaccacgccgttgtccagccgccgctccgccgtttgtgaagcacatttgtgaagcagacaagctgtgatttgtgatttgtgaccctaactgtgatttgtgaagcagacaagcagtgaagatattcaagatgaaaagattttgaaacattttcgaggcttaagaactcggaagataaatttacctcgcaacatcaactcatgctataacctctttttctctcaggtggtccttttcatcggcttgcaagtaagattggtccatgaagtgtagtttatgcacagctcatccctgcttctggtggtactgtcaatgtaaggaggggatcagcatcccttgtctatgcgccgggcggccccattgtttctgcaccaagcccgtgtaatcaggagctattgcccagtgacgcacctttcctctcaggcttgttggttgaacagctctgataatgaagagcccagtcagagtttcgcttacggtgattatagaagtcgtcgtctgcttcccttgatcacacaagcattgcgggcttcgaactgggacgctgccagaaatataagcttcagggagtgtgtgaggttatacgggtcatctcaatcagttggtttgtttgctttgatcatgcaggcattcttgccacggagaatcagagaggtacggtgcttgattcggagcattgttgattactgtggaaatgctgggtcagagttgtttgagttggctcctatgttggtcagcaatttgggtcagtcaatgaccctgttacaagtttatgctgcagtcatccgtatttttgtagagtcttcgatgtttgaggacgctcttctcacttatattcaggccaagaacattggtgttgacagacgtttgtgcaatttcttgttgaagtgtttagttgaggggaatcaaatcatgtacgctaggagcttatttgatgacatgaaaagttgtggtccttcacccaatgtctgctcttattcaattttgatgagtatgtacacacatggagagagatcatgcttggaggaagcttttgagcttctttgtgaaatggaatcaaatggtgtgagaccaaacgctacaacatatggaacttatctctatgggctttgccgttccagacaggtaacatctgcatgggactttcttcaaactctttctcagagtggaggcccttgcagcaattattgtttcaatgctgtgattcatggtttctgttgtgaaggtcaggttgacaaagccatagaggtatttcatggaatgaagaaatgtgggtatgtaccagatgtccatagctacagcatattagttgatgggttatgcaaacaaggggatttattgaaaggttatgatatgcttgaagaaatggcaagaaatggaatatgtcctaatcaagtgagttacagttcacttctgcatggcctttgcaaaactggacaggttgcattggcattgaagattttcaagaatctccaagaccatggttttgagcatgaccagataaattacagcatcattcttcatggctgttgccaacacttagatctcaaggccatctctgacctttggtttgacatgattcatcataatatcgctccagatgtttacaactataccagtctgatctacgcattatgtagacatagaaacctccaagatgcattgggagtgtttgagctcatgcttgaaaatgggttgtctcccaacatcgtgacatgcacaatcctagttgacagctttagcaaacaagggctagttggtgaagctttcctattcctggatagaatgcatcagtcattgggaatcgtcccaaacctttgcatgtacagagttatgatcaatggcctttgcaagaccaacaaatatagtggtgtgtggaatgtttttgcggacatgataaagaggggctatgttcctgatgttgtcctgtacagtattattattgagggcttcgtgaaagctctgaagttgcaggaggcgttaaggttgtaccataagatgttggatgaaggtgtaaaacctaacatatttacgtattctagcctcataaatgggctgtgtaatgatgatagacttcctgaagctatgggattgattagggatatgattggggaagacctgttacttgacaatgttttgtacacatctatcattgcttgttattgtagacgtttaaatatgaaggctgctatggaaatggctcaaagagatggaaagaagcggtgtgttgccagatgcttttgtatatacttgtatgattgatggctatagtaaacttcctgcaatggatgctgcacgcttgatgatggaagaaatggaaaaaagaaagcttaaacctactatagtaacctacacagctctcattattggataccttaaaatgggggatgagaaggaagcttgtatgatgtacgagagtatgcgtcatgtaggcattgctccagatggaaagctgtgttgcattttgggcattggcaatgacaggggtgattgtgatgattctcagaaagcgaagggtgtaacataattacataattttcacagagatttattaacttgatgaagggacttctctatgatggctgaatggctctgagctctccagtgcaggacacactgtttgctccatttgtttcctccacttccacactgccatcctatggacaaggaatggaaagcagtaacctgaaatgtggcagttaaatccgtggacaactgctgagggtgtgaccgatacagcgtaaatcaatagcaaaggaactcaaaaatagatgttgaatcttcacatgaggctcaagcaaatctctggaacacaacttcctcatgaaagaaatattgtcacaggctcaaacaaattcgattatgcagatccacttacatgacaagatgaagggccagcaactttagtttgctgctaaatttcatctgcgtccgtttggtcgatgggcaggttcgatggagattgccgccgttggcgtttcgatcgccatatttaaccaagtctccaaggaacaccataatcaatgcgaacctatgcccgcacatggatatgagatggtccatgaacatcaggacactgcagcagggtccggatggtaaagatcaaagcaaatatcaacatctatagcatgacacaacaggatatgataagattgaaaacgccttcgataatgctgtccgaattaataactaagtggattgttatatatgcccaaatgtgaagtacttaagagaaggtgctttcattaatgttgatattgaaaaggggatacaagatggacagaaagcagttggcgacgaagcaactgttgtaaagaagcgtccacacggtggcaggacctcaggccgttctttgcacggcagagctcgggagcaggtgtccccagtttgtgtgagccacggcagggccggagtggctgcatgggagcaggtcgtcgcaaggcctcgactatttcctttccgagaattattcatcttccggtactgtgtgtcgttcaaggcaaccgtctcaacattcaaccagggttacgcaaccatttgttgaatttacg

SEQ ID NO: 22785 - DNA, 1424 bp, Zea Mays
ctcccatcatcctccgcctccgccagcgaaaacgaggataaataaacaatttcgagcgatcggtttttttagtcgcgggatttgggtggaagtggaaaccgcgccgcgggggtcttttaagcgcgtgggggcgcggcgtgctcacacgaggcccgcgctcacgagccagagaagaagggagaggagaggctaaccaccgcggcagctgcgacctgcgaccgcgaggagtggcgcacgacgaccagcgcggaggaggtggagccggcggcggggagatttgctcgcccggctggggttgcggtgggaggagggtaggaggcagagacaaccagcgatggcggcgtccgcgaggcccggggagagggcgaccagcttcgccgtcgcgtgcagcctcctcagccgcttcgtccgccagaacggcgccgcgcccgcccagctaggcctcgggatcaaaggcgaggtcgagcagcaaaggacgccggcgacaattaacttgctccccggagcggacggcgaggagaccgagaggaggaaggagaccatggagcttttcccgcagagcgccgggttcggtgtcaaggatgccgctgctgcccctaggtgctggtgtttgacgatttccctgccgacaaggcaaaggacctgatgcagctggccagcaagggcggccctgtggtacagaacgttgttttgcctcaaccctctgcacctgctgctgctgtcaccgacaaggccgtgccggtccccgtcatcagcttgcctgctgctcaggctgatgctaagaagcctactcgcacaaatgcctctgatatgccaattatgaggaaggcttctcttcaccgcttccttgagaagagaaaggaccgtctcaatgcaaatgcaccataccaaacttctccttcagacgctgcaccagtcaagaaggagcccgagagccaggcatggctcggattaggaccgaatgccgtcaagtccaacctgaacctgagctagcacacaacgacacagccaaataagacggcacagcaaacctcaccaaagcctttgcaggacgatctgaaaatatgctttgccactagagtaccgaaaccataaatatcctctcgttatcgtgttttagtgttctgtttaggccgtggtcctacgccctcttgtcacatagttctggatgtaaagataagtagccagccatgaccgagagaaggttttttttggggggtgttaacacacggccactctgaattggccatgctaaggaaaatgatagtagtgcaaagagaagtatatgtctttttctttttctgaaagcccagatcgtttggctctagccttgatgtatgcagaacaagtgattgtaatggattctgagtatcctcatcgtcttattgttgcttcaccaacccaagtttgtttgggttcttgcc

SEQ ID NO: 22786 - DNA, 1306 bp, Zea Mays
tttagtcgcgggatttgggtggaagtggaaaccgcgccgcgggggtcttttaagcgcgtgggggcgcggcgtgctcacacgaggcccgcgctcacgagccagagaagaagggagaggagaggctaaccaccgcggcagctgcgacctgcgaccgcgaggagtggcgcacgacgaccagcgcggaggaggtggagccggcggcggggagatttgctcgcccggctggggttgcggtgggaggagggtaggaggcagagacaaccagcgatggcggcgtccgcgaggcccggggagagggcgaccagcttcgccgtcgcgtgcagcctcctcagccgcttcgtccgccagaacggcgccgcgcccgcccagctaggcctcgggatcaaaggcgaggtcgagcagcaaaggacgccggcgacaattaacttgctccccggagcggacggcgaggagaccgagaggaggaaggagaccatggagcttttcccgcagagcgccgggttcggtgtcaaggatgccgctgctgcccctagctggccagcaagggcggccctgtggtacagaacgttgttttgcctcaaccctctgcacctgctgctgctgtcaccgacaaggccgtgccggtccccgtcatcagcttgcctgctgctcaggctgatgctaagaagcctactcgcacaaatgcctctgatatgccaattatgaggaaggcttctcttcaccgcttccttgagaagagaaaggaccgtctcaatgcaaatgcaccataccaaacttctccttcagacgctgcaccagtcaagaaggagcccgagagccaggcatggctcggattaggaccgaatgccgtcaagtccaacctgaacctgagctagcacacaacgacacagccaaataagacggcacagcaaacctcaccaaagcctttgcaggacgatctgaaaatatgctttgccactagagtaccgaaaccataaatatcctctcgttatcgtgttttagtgttctgtttaggccgtggtcctacgccctcttgtcacatagttctggatgtaaagataagtagccagccatgaccgagagaaggttttttttggggggtgttaacacacggccactctgaattggccatgctaaggaaaatgatagtagtgcaaagagaagtatatgtctttttctttttctgaaagcccagatcgtttggctctagccttgatgtatgcagaacaagtgattgtaatggattctgagtatcctcatcgtcttattgttgcttcaccaacccaagtttgtttgggttcttgcc

SEQ ID NO: 22787 - DNA, 1051 bp, Zea Mays
aattcctgtgggggacgtgttcgcctggcgaggtcgagcagcaaaggacgccggcgacaattaacttgctccccggagcggacggcgaggagaccgagaggaggaaggagaccatggagcttttcccgcagagcgccgggttcggtgtcaaggatgccgctgctgcccctagagagcaagaaaataaagagaagcctaaacagctcacaatcttctatggcgggaaggtgctggtgtttgacgatttccctgccgacaaggcaaaggacctgatgcagctggccagcaagggcggccctgtggtacagaacgttgttttgcctcaaccctctgcacctgctgctgctgtcaccgacaaggccgtgccggtccccgtcatcagcttgcctgctgctcaggctgatgctaagaagcctactcgcacaaatgcctctgatatgccaattatgaggaaggcttctcttcaccgcttccttgagaagagaaaggaccgtctcaatgcaaatgcaccataccaaacttctccttcagacgctgcaccagtcaagaaggagcccgagagccaggcatggctcggattaggaccgaatgccgtcaagtccaacctgaacctgagctagcacacaacgacacagccaaataagacggcacagcaaacctcaccaaagcctttgcaggacgatctgaaaatatgctttgccactagagtaccgaaaccataaatatcctctcgttatcgtgttttagtgttctgtttaggccgtggtcctacgccctcttgtcacatagttctggatgtaaagataagtagccagccatgaccgagagaaggttttttttggggggtgttaacacacggccactctgaattggccatgctaaggaaaatgatagtagtgcaaagagaagtatatgtctttttctttttctgaaagcccagatcgtttggctctagccttgatgtatgcagaacaagtgattgtaatggattctgagtatcctcatcgtcttattgttgcttcaccaacccaagtttgtttgggttcttgcc

SEQ ID NO: 22788 - DNA, 902 bp, Zea Mays
tgcgtactgctgattcacatcatagagcaagaaaataaagagaagcctaaacagctcacaatcttctatggcgggaaggtgctggtgtttgacgatttccctgccgacaaggcaaaggacctgatgcagctggccagcaagggcggccctgtggtacagaacgttgttttgcctcaaccctctgcacctgctgctgctgtcaccgacaaggccgtgccggtccccgtcatcagcttgcctgctgctcaggctgatgctaagaagcctactcgcacaaatgcctctgatatgccaattatgaggaaggcttctcttcaccgcttccttgagaagagaaaggaccgtctcaatgcaaatgcaccataccaaacttctccttcagacgctgcaccagtcaagaaggagcccgagagccaggcatggctcggattaggaccgaatgccgtcaagtccaacctgaacctgagctagcacacaacgacacagccaaataagacggcacagcaaacctcaccaaagcctttgcaggacgatctgaaaatatgctttgccactagagtaccgaaaccataaatatcctctcgttatcgtgttttagtgttctgtttaggccgtggtcctacgccctcttgtcacatagttctggatgtaaagataagtagccagccatgaccgagagaaggttttttttggggggtgttaacacacggccactctgaattggccatgctaaggaaaatgatagtagtgcaaagagaagtatatgtctttttctttttctgaaagcccagatcgtttggctctagccttgatgtatgcagaacaagtgattgtaatggattctgagtatcctcatcgtcttattgttgcttcaccaacccaagtttgtttgggttcttgcc

SEQ ID NO: 22789 - DNA, 4977 bp, Zea Mays
cttcagcaacagccactttcttttgtccgtattccaagtgtcgagcttatctgataatcacacacgtactttaaccaaacctgcaaagtgaagccagtaatccctctcatataccaccaaaaatttcccattgttttagctttctccatttctctgcagcagcctaccagagtagtgaggactgaggagcgagcagagtccaccaccactaccaaacacgcagcgcagtggtgctctctagtcctctcttcttccactccgctcttcccccgtcgcacgcacgcgtggtcatcggattcggccgcgtgccggcgagatccgggccgtcgcagcacggtccggcagacgccgcaatccgcgatcctgtcgccgcgggagctgcattggcgccccacgcggccgttccggcgtttcttgggaggttgcggcggggggaggagctcgtgtccgggatccgccagatccgagaacgtcggcggtagtagcagtggcgggggtcgccatggaggcccacgcgccgctcgacttcgcgctcttccagctctcccctcggcgtcagcggtgcgagctggtggtgtgcggcaatgggcggacggagaagatcgcgtcagggtcggtgaagccgttcgtggcgcacctgcgggctgtggaggaacaggcgtcggctcagccaccgccgccggccatccggctgcagctggaccggcccgccccgtggtttagtaagggcacccttgagaggttcgtgcgcttcgtgagcacgccagaggtgctggagttgacgagcacctatgatttagagatgtcgcagctggaaggggctaggaagatatatgcgcagggaggtactggagacgctacctcaggtggaactgctgaaaatgttacaggctcagcagcggcggtggcagcagatattacaaagaaagaacttcttagggcaatcgatgtgcgtctaagcacccttaaacaagatctggctgcagcttgttctcgagcatcctctgctgggttcaatccgaacagtgtatctgagcttcttcttttcgctaaccattttggtgccagtcggctgagcgaagcatgcacgaaattcatgtcactttgccagcggcgtcatgacatcagtcctcaaaccgcacagccagcagtttcatcacactggaaggtctttgatgatgggaatgttcgtggttcttccagttcagacatgtctatagatgagccacaagttgatctcggtgaatccaacaacaaatctacagtcggtggaagtggctctcaggtccacagactaagcaacagccaaggcttagaagtcgctgcagaacagcaacccaagccaaccatcccacaggccatagataaacaagaagcagaaacagacgcgtctcccgcacctgctgcaggagggctttcaaggcgtctgagtgtgaaggacaggataaacatgtttgagagccagaaaaaggagcagactccaagttctggtaacagcaactcagcaggtactggtagggtggttccagggagaggtgagcaccgcagggttccttctggggcctccatggagaagttagttagaaggtggagcagtgttagcgacatgagtattgatctcagcaacaatgagagcgttaacataaatgacaaaaaggacaatggaactcctgttgtgactccaacatctactgatttggaggccaactctaaagcaaaagctgatgtggactctaatggacagaaggatttagtcacatcacactcctggccttatcaaaaggataatgtaccaatggatccgactaccacagatttgtgcccaccctcaactttaagtaatacacttgctcctcatagtgatggtgcaggaaacgacatggttataaactctagcattgagagtgagtcatcctttgggaaagaagcgggggttattcaaggactcacaaggatgtcaaatcatgctacttcaaatgtttccactcgaaaccatctaaaatcttctgcaaagccagttgaggaaggcttgctgaaaaataaggatattttaaccagcacatcgttagaggagcatgttcgcatgatagataaggaaataacagctgttcctcatgaagtattagttgcaagtgaacagattccccagaatgatattagaggtctccatacaaaagatattcacactgaatctgaagtgactggaaggaaggatcagccttcacgatcatttggaaaggtatctggtggtgttaatcctaaaccaaaaacatcatccaattcccgagctaatgttaaaggctcatctggtagggctaatgtcaaaggctcatctggtagggatgagattacctttacagaaactgagttccgtgatgttagtttgcagcggaatcgtctaccacggaaggcagaggatgtagggagaaaggttacaggtggttctgattcagattcttctggtcgccagggaacaaatttgagcaggcaatcatccattaccatccaggaactaaacttccaggctagagtgatgggaccaggaaaagggaaccaagatcggcatggcgaattgcaaatgaaggctaatgagttggagaaattatttgctgaacacaagttaatatcatcccgacgaggcaaacctacagatgtgcaggttgatagcacacgtacggtgagtgagtgagcttctgaagatggtgagtaatcaaggatttaacattagcacaccacaaaaacttggcattctaagcttagaagagtcgagagggaagttttatgagcattatatgcagaagagggatgcaaaactgaaggaagactggaaactgcagaggggggagaaggaagcaatgttaaaggctatgcatgagagcctagaacggagcaaggctgagatgcgagctaaattctctcagtctggagatgtttctgactcaacttatgtttatcattgttctcagaagattcctccttcgcgatcagcaagaagaaataatgatcagggggttgactcattcttggttgaagaggaattgaatagtgactacctatctggtgacggttcttccaggagtgctgattctaggaagcattttccaaataaagttgcttccacccaaaaggcatctgttggtcctatccataagcgttcttcaaggactgcaagctccggttatggcaatcgcaggaatctaccagaaaatcctatcgcacagcctgtccccagtttctctgacttaagaaaagaaaatacaaagccttcacctggactcagtagagcggctgcaagagttcagcaaaagtcttttgcccgtagcaagagcattattgaagagtcaaagagtatattgaaagaagatcaatcgaggaggtcacaatctatgaggaagagccaaattccggatgagttgaaggacatttcatcagggaatgaggatatttacaattgggctccatcaagaatttccaagaatcaatcagagggagcttttgcttacagtgcccgtagaacgggtccaccaaagccatttcttaggaaaggcaatgggactcaccccgttataggtatagctggatttcaggctgcagcggctatgatggcgaatgccctccagaatggtgacagtggtgattttgaagatcaccaagatgattctcctgatgatgccaaagaagaagaagaatatgaaagtattgaagaaaattttagagaaagtgactttcctgctgattctgacagtgagaacccaagagttagtcatgaatttggaaattcagatgacccagggtcagaaaatggcgatgctaacttttcaagtgaagcacccgcaattggtggtactaagttcactgcttttacaggaaacgttcatgatccagctagtgatgttccagcaccctggagttctcgtcttccacagctgtccccttacatgaatgataatacagatggtgacacattcgctgattcaccgtgtggaagtccaccatggaattctcattcacttgatgaaataacagatgctgatgtatctcggatgcggaaaaagtggggcagtgcacagatgccttttgctggtgtcagtgcatctcaacagccacgcaaagatgtttccaaaggattgaagaaactgtggaaatttggtaggaagactagagggggtgatggtttagtaaatgattgggtatctgcttccactgcctcagaatacgatgaagacatggaagatgggcgggatctggtagtaggatcttctgatgatttcaaaaagtctcgaatgggttatcttgcttcatatgatgattttgttgaggatgaggtttttgctgaacaagaacaatcactacgcagctcaattccaaacccacctgcaaatttcagaccgagagaagatcaactgactggaagagcgccacgttctttcttctccctgtcaacattccgaagcaagggaggtgatgccaggctcaggtgatcctcagaaagtcagaagacaccagaggtggagtgtataaaatatcttccgaggttaggtatgagtatcaaattttcagggcggtacgcggctagcttgtgattataaatatatatctatatgttgtgtatctatggcaattcatataagctaccagttgagccccccattgttactgtttgattattctttttccgtaatattctttgacctcctgtgtagagttggacttagagatctttttgcagtctgttcttccaactggcccaaaactactgtatttttcgttgtttttgtgatatatatgtatctccctcttgtttcttcattcacatatatcacaaattcaagatatatggtaattttggcaattgtagcatggaaactgggcttattcaaggcacccgcaaagtcacttgttttagtgtgatgagtgtatctgtctttgatctatgtatatatattttttagaaaacttcatcgagttttttttgaa

SEQ ID NO: 22790 - DNA, 3208 bp, Zea Mays
ctctcttcttccactccgctcttcccccgtcgcacgcacgcgtggtcatcggattcggccgcgtgccggcgagatccgggccgtcgcagcacggtccggcagacgccgcaatccgcgatcctgtcgccgcgggagctgcattggcgccccacgcggccgttccggcgtttcttgggaggttgcggcggggggaggagctcgtgtccgggatccgccagatccgagaacgtcggcggtagtagcagtggcgggggtcgccatggaggcccacgcgccgctcgacttcgcgctcttccagctctcccctcggcgtcagcggtgcgagctggtggtgtgcggcaatgggcggacggagaagatcgcgtcagggtcggtgaagccgttcgtggcgcacctgcgggctgtggaggaacaggcgtcggctcagccaccgccgccggccatccggctgcagctggaccggcccgccccgtggtttagtaagggcacccttgagaggttcgtgcgcttcgtgagcacgccagaggtgctggagttgacgagcacctatgatttagagatgtcgcagctggaaggggctaggaagatatatgcgcagggaggtactggagacgctacctcaggtggaactgctgaaaatgttacaggctcagcagcggcggtggcagcagatattacaaagaaagaacttcttagggcaatcgatgtgcgtctaagcacccttaaacaagatctggctgcagcttgttctcgagcatcctctgctgggttcaatccgaacagtgtatctgagcttcttcttttcgctaaccattttggtgccagtcggctgagcgaagcatgcacgaaattcatgtcactttgccagcggcgtcatgacatcagtcctcaaaccgcacagccagcagtttcatcacactggaaggtctttgatgatgggaatgttcgtggttcttccagttcagacatgtctatagatgagccacaagttgatctcggtgaatccaacaacaaatctacagtcggtggaagtggctctcaggtccacagactaagcaacagccaaggcttagaagtcgctgcagaacagcaacccaagccaaccatcccacaggccatagataaacaagaagcagaaacagacgcgtctcccgcacctgctgcaggagggctttcaaggcgtctgagtgtgaaggacaggataaacatgtttgagagccagaaaaaggagcagactccaagttctggtaacagcaactcagcaggtactggtagggtggttccagggagaggtgagcaccgcagggttccttctggggcctccatggagaagttagttagaaggtggagcagtgttagcgacatgagtattgatctcagcaacaatgagagcgttaacataaatgacaaaaaggacaatggaactcctgttgtgactccaacatctactgatttggaggccaactctaaagcaaaagctgatgtggactctaatggacagaaggatttagtcacatcacactcctggccttatcaaaaggataatgtaccaatggatccgactaccacagatttgtgcccaccctcaactttaagtaatacacttgctcctcatagtgatggtgcaggaaacgacatggttataaactctagcattgagagtgagtcatcctttgggaaagaagcgggggttattcaaggactcacaaggatgtcaaatcatgctacttcaaatgtttccactcgaaaccatctaaaatcttctgcaaagccagttgaggaaggcttgctgaaaaataaggatattttaaccagcacatcgttagaggagcatgttcgcatgatagataaggaaataacagctgttcctcatgaagtattagttgcaagtgaacagattccccagaatgatattagaggtctccatacaaaagatattcacactgaatctgaagtgactggaaggaaggatcagccttcacgatcatttggaaaggtatctggtggtgttaatcctaaaccaaaaacatcatccaattcccgagctaatgttaaaggctcatctggtagggctaatgtcaaaggctcatctggtagggatgagattacctttacagaaactgagttccgtgatgttagtttgcagcggaatcgtctaccacggaaggcagaggatgtagggagaaaggttacaggtggttctgattcagattcttctggtcgccagggaacaaatttgagcaggcaatcatccattaccatccaggaactaaacttccaggctagagtgatgggaccaggaaaagggaaccaagatcggcatggcgaattgcaaatgaaggctaatgagttggagaaattatttgctgaacacaagttaatatcatcccgacgaggcaaacctacagatgtgcaggttgatagcacacgtacggtgagtgagaatacgatgaagacatggaagatgggcgggatctggtagtaggatcttctgatgatttcaaaaagtctcgaatgggttatcttgcttcatatgatgattttgttgaggatgaggtttttgctgaacaagaacaatcactacgcagctcaattccaaacccacctgcaaatttcagaccgagagaagatcaactgactggaagagcgccacgttctttcttctccctgtcaacattccgaagcaagggaggtgatgccaggctcaggtgatcctcagaaagtcagaagacaccagaggtggagtgtataaaatatcttccgaggttaggtatgagtatcaaattttcagggcggtacgcggctagcttgtgattataaatatatatctatatgttgtgtatctatggcaattcatataagctaccagttgagccccccattgttactgtttgattattctttttccgtaatattctttgacctcctgtgtagagttggacttagagatctttttgcagtctgttcttccaactggcccaaaactactgtatttttcgttgtttttgtgatatatatgtatctccctcttgtttcttcattcacatatatcacaaattcaagatatatggtaattttggcaattgtagcatggaaactgggcttattcaaggcacccgcaaagtcacttgttttagtgtgatgagtgtatctgtctttgatctatgtatatatattttttagaaaacttcatcgagttttttttgaa

SEQ ID NO: 22791 - DNA, 4768 bp, Zea Mays
acgcgtggtcatcggattcggccgcgtgccggcgagatccgggccgtcgcagcacggtccggcagacgccgcaatccgcgatcctgtcgccgcgggagctgcattggcgccccacgcggccgttccggcgtttcttgggaggttgcggcggggggaggagctcgtgtccgggatccgccagatccgagaacgtcggcggtagtagcagtggcgggggtcgccatggaggcccacgcgccgctcgacttcgcgctcttccagctctcccctcggcgtcagcggtgcgagctggtggtgtgcggcaatgggcggacggagaagatcgcgtcagggtcggtgaagccgttcgtggcgcacctgcgggctgtggaggaacaggcgtcggctcagccaccgccgccggccatccggctgcagctggaccggcccgccccgtggtttagtaagggcacccttgagaggttcgtgcgcttcgtgagcacgccagaggtgctggagttgacgagcacctatgatttagagatgtcgcagctggaaggggctaggaagatatatgcgcagggaggtactggagacgctacctcaggtggaactggctcagcagcggcggtggcagcagatattacaaagaaagaacttcttagggcaatcgatgtgcgtctaagcacccttaaacaagatctggctgcagcttgttctcgagcatcctctgctgggttcaatccgaacagtgtatctgagcttcttcttttcgctaaccattttggtgccagtcggctgagcgaagcatgcacgaaattcatgtcactttgccagcggcgtcatgacatcagtcctcaaaccgcacagccagcagtttcatcacactggaaggtctttgatgatgggaatgttcgtggttcttccagttcagacatgtctatagatgagccacaagttgatctcggtgaatccaacaacaaatctacagtcggtggaagtggctctcaggtccacagactaagcaacagccaaggcttagaagtcgctgcagaacagcaacccaagccaaccatcccacaggccatagataaacaagaagcagaaacagacgcgtctcccgcacctgctgcaggagggctttcaaggcgtctgagtgtgaaggacaggataaacatgtttgagagccagaaaaaggagcagactccaagttctggtaacagcaactcagcaggtactggtagggtggttccagggagaggtgagcaccgcagggttccttctggggcctccatggagaagttagttagaaggtggagcagtgttagcgacatgagtattgatctcagcaacaatgagagcgttaacataaatgacaaaaaggacaatggaactcctgttgtgactccaacatctactgatttggaggccaactctaaagcaaaagctgatgtggactctaatggacagaaggatttagtcacatcacactcctggccttatcaaaaggataatgtaccaatggatccgactaccacagatttgtgcccaccctcaactttaagtaatacacttgctcctcatagtgatggtgcaggaaacgacatggttataaactctagcattgagagtgagtcatcctttgggaaagaagcgggggttattcaaggactcacaaggatgtcaaatcatgctacttcaaatgtttccactcgaaaccatctaaaatcttctgcaaagccagttgaggaaggcttgctgaaaaataaggatattttaaccagcacatcgttagaggagcatgttcgcatgatagataaggaaataacagctgttcctcatgaagtattagttgcaagtgaacagattccccagaatgatattagaggtctccatacaaaagatattcacactgaatctgaagtgactggaaggaaggatcagccttcacgatcatttggaaaggtatctggtggtgttaatcctaaaccaaaaacatcatccaattcccgagctaatgttaaaggctcatctggtagggctaatgtcaaaggctcatctggtagggatgagattacctttacagaaactgagttccgtgatgttagtttgcagcggaatcgtctaccacggaaggcagaggatgtagggagaaaggttacaggtggttctgattcagattcttctggtcgccagggaacaaatttgagcaggcaatcatccattaccatccaggaactaaacttccaggctagagtgatgggaccaggaaaagggaaccaagatcggcatggcgaattgcaaatgaaggctaatgagttggagaaattatttgctgaacacaagttaatatcatcccgacgaggcaaacctacagatgtgcaggttgatagcacacgtacggtgagtgaggtaaagccgataacagttcttcatgagacaattcatacaaaacaagttgtaaaggagagtataacaaccaatgattttgatgccagtgagcttctgaagatggtgagtaatcaaggatttaacattagcacaccacaaaaacttggcattctaagcttagaagagtcgagagggaagttttatgagcattatatgcagaagagggatgcaaaactgaaggaagactggaaactgcagaggggggagaaggaagcaatgttaaaggctatgcatgagagcctagaacggagcaaggctgagatgcgagctaaattctctcagtctggagatgtttctgactcaacttatgtttatcattgttctcagaagattcctccttcgcgatcagcaagaagaaataatgatcagggggttgactcattcttggttgaagaggaattgaatagtgactacctatctggtgacggttcttccaggagtgctgattctaggaagcattttccaaataaagttgcttccacccaaaaggcatctgttggtcctatccataagcgttcttcaaggactgcaagctccggttatggcaatcgcaggaatctaccagaaaatcctatcgcacagcctgtccccagtttctctgacttaagaaaagaaaatacaaagccttcacctggactcagtagagcggctgcaagagttcagcaaaagtcttttgcccgtagcaagagcattattgaagagtcaaagagtatattgaaagaagatcaatcgaggaggtcacaatctatgaggaagagccaaattccggatgagttgaaggacatttcatcagggaatgaggatatttacaattgggctccatcaagaatttccaagaatcaatcagagggagcttttgcttacagtgcccgtagaacgggtccaccaaagccatttcttaggaaaggcaatgggactcaccccgttataggtatagctggatttcaggctgcagcggctatgatggcgaatgccctccagaatggtgacagtggtgattttgaagatcaccaagatgattctcctgatgatgccaaagaagaagaagaatatgaaagtattgaagaaaattttagagaaagtgactttcctgctgattctgacagtgagaacccaagagttagtcatgaatttggaaattcagatgacccagggtcagaaaatggcgatgctaacttttcaagtgaagcacccgcaattggtggtactaagttcactgcttttacaggaaacgttcatgatccagctagtgatgttccagcaccctggagttctcgtcttccacagctgtccccttacatgaatgataatacagatggtgacacattcgctgattcaccgtgtggaagtccaccatggaattctcattcacttgatgaaataacagatgctgatgtatctcggatgcggaaaaagtggggcagtgcacagatgccttttgctggtgtcagtgcatctcaacagccacgcaaagatgtttccaaaggattgaagaaactgtggaaatttggtaggaagactagagggggtgatggtttagtaaatgattgggtatctgcttccactgcctcagaatacgatgaagacatggaagatgggcgggatctggtagtaggatcttctgatgatttcaaaaagtctcgaatgggttatcttgcttcatatgatgattttgttgaggatgaggtttttgctgaacaagaacaatcactacgcagctcaattccaaacccacctgcaaatttcagaccgagagaagatcaactgactggaagagcgccacgttctttcttctccctgtcaacattccgaagcaagggaggtgatgccaggctcaggtgatcctcagaaagtcagaagacaccagaggtggagtgtataaaatatcttccgaggttaggtatgagtatcaaattttcagggcggtacgcggctagcttgtgattataaatatatatctatatgttgtgtatctatggcaattcatataagctaccagttgagccccccattgttactgtttgattattctttttccgtaatattctttgacctcctgtgtagagttggacttagagatctttttgcagtctgttcttccaactggcccaaaactactgtatttttcgttgtttttgtgatatatatgtatctccctcttgtttcttcattcacatatatcacaaattcaagatatatggtaattttggcaattgtagcatggaaactgggcttattcaaggcacccgcaaagtcacttgttttagtgtgatgagtgtatctgtctttgatctatgtatatatattttttagaaaacttcatcgagttttttttgaa

SEQ ID NO: 22792 - DNA, 4778 bp, Zea Mays
acgcgtggtcatcggattcggccgcgtgccggcgagatccgggccgtcgcagcacggtccggcagacgccgcaatccgcgatcctgtcgccgcgggagctgcattggcgccccacgcggccgttccggcgtttcttgggaggttgcggcggggggaggagctcgtgtccgggatccgccagatccgagaacgtcggcggtagtagcagtggcgggggtcgccatggaggcccacgcgccgctcgacttcgcgctcttccagctctcccctcggcgtcagcggtgcgagctggtggtgtgcggcaatgggcggacggagaagatcgcgtcagggtcggtgaagccgttcgtggcgcacctgcgggctgtggaggaacaggcgtcggctcagccaccgccgccggccatccggctgcagctggaccggcccgccccgtggtttagtaagggcacccttgagaggttcgtgcgcttcgtgagcacgccagaggtgctggagttgacgagcacctatgatttagagatgtcgcagctggaaggggctaggaagatatatgcgcagggaggtactggagacgctacctcaggtggaactgctgaaaatgttacaggctcagcagcggcggtggcagcagatattacaaagaaagaacttcttagggcaatcgatgtgcgtctaagcacccttaaacaagatctggctgcagcttgttctcgagcatcctctgctgggttcaatccgaacagtgtatctgagcttcttcttttcgctaaccattttggtgccagtcggctgagcatgcacgaaattcatgtcactttgccagcggcgtcatgacatcagtcctcaaaccgcacagccagcagtttcatcacactggaaggtctttgatgatgggaatgttcgtggttcttccagttcagacatgtctatagatgagccacaagttgatctcggtgaatccaacaacaaatctacagtcggtggaagtggctctcaggtccacagactaagcaacagccaaggcttagaagtcgctgcagaacagcaacccaagccaaccatcccacaggccatagataaacaagaagcagaaacagacgcgtctcccgcacctgctgcaggagggctttcaaggcgtctgagtgtgaaggacaggataaacatgtttgagagccagaaaaaggagcagactccaagttctggtaacagcaactcagcaggtactggtagggtggttccagggagaggtgagcaccgcagggttccttctggggcctccatggagaagttagttagaaggtggagcagtgttagcgacatgagtattgatctcagcaacaatgagagcgttaacataaatgacaaaaaggacaatggaactcctgttgtgactccaacatctactgatttggaggccaactctaaagcaaaagctgatgtggactctaatggacagaaggatttagtcacatcacactcctggccttatcaaaaggataatgtaccaatggatccgactaccacagatttgtgcccaccctcaactttaagtaatacacttgctcctcatagtgatggtgcaggaaacgacatggttataaactctagcattgagagtgagtcatcctttgggaaagaagcgggggttattcaaggactcacaaggatgtcaaatcatgctacttcaaatgtttccactcgaaaccatctaaaatcttctgcaaagccagttgaggaaggcttgctgaaaaataaggatattttaaccagcacatcgttagaggagcatgttcgcatgatagataaggaaataacagctgttcctcatgaagtattagttgcaagtgaacagattccccagaatgatattagaggtctccatacaaaagatattcacactgaatctgaagtgactggaaggaaggatcagccttcacgatcatttggaaaggtatctggtggtgttaatcctaaaccaaaaacatcatccaattcccgagctaatgttaaaggctcatctggtagggctaatgtcaaaggctcatctggtagggatgagattacctttacagaaactgagttccgtgatgttagtttgcagcggaatcgtctaccacggaaggcagaggatgtagggagaaaggttacaggtggttctgattcagattcttctggtcgccagggaacaaatttgagcaggcaatcatccattaccatccaggaactaaacttccaggctagagtgatgggaccaggaaaagggaaccaagatcggcatggcgaattgcaaatgaaggctaatgagttggagaaattatttgctgaacacaagttaatatcatcccgacgaggcaaacctacagatgtgcaggttgatagcacacgtacggtgagtgaggtaaagccgataacagttcttcatgagacaattcatacaaaacaagttgtaaaggagagtataacaaccaatgattttgatgccagtgagcttctgaagatggtgagtaatcaaggatttaacattagcacaccacaaaaacttggcattctaagcttagaagagtcgagagggaagttttatgagcattatatgcagaagagggatgcaaaactgaaggaagactggaaactgcagaggggggagaaggaagcaatgttaaaggctatgcatgagagcctagaacggagcaaggctgagatgcgagctaaattctctcagtctggagatgtttctgactcaacttatgtttatcattgttctcagaagattcctccttcgcgatcagcaagaagaaataatgatcagggggttgactcattcttggttgaagaggaattgaatagtgactacctatctggtgacggttcttccaggagtgctgattctaggaagcattttccaaataaagttgcttccacccaaaaggcatctgttggtcctatccataagcgttcttcaaggactgcaagctccggttatggcaatcgcaggaatctaccagaaaatcctatcgcacagcctgtccccagtttctctgacttaagaaaagaaaatacaaagccttcacctggactcagtagagcggctgcaagagttcagcaaaagtcttttgcccgtagcaagagcattattgaagagtcaaagagtatattgaaagaagatcaatcgaggaggtcacaatctatgaggaagagccaaattccggatgagttgaaggacatttcatcagggaatgaggatatttacaattgggctccatcaagaatttccaagaatcaatcagagggagcttttgcttacagtgcccgtagaacgggtccaccaaagccatttcttaggaaaggcaatgggactcaccccgttataggtatagctggatttcaggctgcagcggctatgatggcgaatgccctccagaatggtgacagtggtgattttgaagatcaccaagatgattctcctgatgatgccaaagaagaagaagaatatgaaagtattgaagaaaattttagagaaagtgactttcctgctgattctgacagtgagaacccaagagttagtcatgaatttggaaattcagatgacccagggtcagaaaatggcgatgctaacttttcaagtgaagcacccgcaattggtggtactaagttcactgcttttacaggaaacgttcatgatccagctagtgatgttccagcaccctggagttctcgtcttccacagctgtccccttacatgaatgataatacagatggtgacacattcgctgattcaccgtgtggaagtccaccatggaattctcattcacttgatgaaataacagatgctgatgtatctcggatgcggaaaaagtggggcagtgcacagatgccttttgctggtgtcagtgcatctcaacagccacgcaaagatgtttccaaaggattgaagaaactgtggaaatttggtaggaagactagagggggtgatggtttagtaaatgattgggtatctgcttccactgcctcagaatacgatgaagacatggaagatgggcgggatctggtagtaggatcttctgatgatttcaaaaagtctcgaatgggttatcttgcttcatatgatgattttgttgaggatgaggtttttgctgaacaagaacaatcactacgcagctcaattccaaacccacctgcaaatttcagaccgagagaagatcaactgactggaagagcgccacgttctttcttctccctgtcaacattccgaagcaagggaggtgatgccaggctcaggtgatcctcagaaagtcagaagacaccagaggtggagtgtataaaatatcttccgaggttaggtatgagtatcaaattttcagggcggtacgcggctagcttgtgattataaatatatatctatatgttgtgtatctatggcaattcatataagctaccagttgagccccccattgttactgtttgattattctttttccgtaatattctttgacctcctgtgtagagttggacttagagatctttttgcagtctgttcttccaactggcccaaaactactgtatttttcgttgtttttgtgatatatatgtatctccctcttgtttcttcattcacatatatcacaaattcaagatatatggtaattttggcaattgtagcatggaaactgggcttattcaaggcacccgcaaagtcacttgttttagtgtgatgagtgtatctgtctttgatctatgtatatatattttttagaaaacttcatcgagttttttttgaa

SEQ ID NO: 22793 - DNA, 4719 bp, Zea Mays
acgcgtggtcatcggattcggccgcgtgccggcgagatccgggccgtcgcagcacggtccggcagacgccgcaatccgcgatcctgtcgccgcgggagctgcattggcgccccacgcggccgttccggcgtttcttgggaggttgcggcggggggaggagctcgtgtccgggatccgccagatccgagaacgtcggcggtagtagcagtggcgggggtcgccatggaggcccacgcgccgctcgacttcgcgctcttccagctctcccctcggcgtcagcggtgcgagctggtggtgtgcggcaatgggcggacggagaagatcgcgtcagggtcggtgaagccgttcgtggcgcacctgcgggctgtggaggaacaggcgtcggctcagccaccgccgccggccatccggctgcagctggaccggcccgccccgtggtttagtaagggcacccttgagaggttcgtgcgcttcgtgagcacgccagaggtgctggagttgacgagcacctatgatttagagatgtcgcagctggaaggggctaggaagatatatgcgcagggaggtactggagacgctacctcaggtggaactgtgtggtctttcatatctgctgtgtctgaatctaatttatgtaatatctggccatgcttattggcagctgaaaatgttacaggctcagcagcggcggtggcagcagatattacaaagaaagaacttcttagggcaatcgatgtgcgtctaagcacccttaaacaagatctggctgcagcttgttctcgagcatcctctgctgggttcaatccgaacagtgtatctgagcttcttcttttcgctaaccattttggtgccagtcggctgagcgaagcatgcacgaaattcatgtcactttgccagcggcgtcatgacatcagtcctcaaaccgcacagccagcagtttcatcacactggaaggtctttgatgatgggaatgttcgtggttcttccagttcagacatgtctatagatgagccacaagttgatctcggtgaatccaacaacaaatctacagtcggtggaagtggctctcaggtccacagactaagcaacagccaaggcttagaagtcgctgcagaacagcaacccaagccaaccatcccacaggccatagataaacaagaagcagaaacagacgcgtctcccgcacctgctgcaggagggctttcaaggcgtctgagtgtgaaggacaggataaacatgtttgagagccagaaaaaggagcagactccaagttctggtaacagcaactcagcaggtactggtagggtggttccagggagaggtgagcaccgcagggttccttctggggcctccatggagaagttagttagaaggtggagcagtgttagcgacatgagtattgatctcagcaacaatgagagcgttaacataaatgacaaaaaggacaatggaactcctgttgtgactccaacatctactgatttggaggccaactctaaagcaaaagctgatgtggactctaatggacagaaggatttagtcacatcacactcctggccttatcaaaaggataatgtaccaatggatccgactaccacagatttgtgcccaccctcaactttaagtaatacacttgctcctcatagtgatggtgcaggaaacgacatggttataaactctagcattgagagtgagtcatcctttgggaaagaagcgggggttattcaaggactcacaaggatgtcaaatcatgctacttcaaatgtttccactcgaaaccatctaaaatcttctgcaaagccagttgaggaaggcttgctgaaaaataaggatattttaaccagcacatcgttagaggagcatgttcgcatgatagataaggaaataacagctgttcctcatgaagtattagttgcaagtgaacagattccccagaatgatattagaggtctccatacaaaagatattcacactgaatctgaagtgactggaaggaaggatcagccttcacgatcatttggaaaggtatctggtggtgttaatcctaaaccaaaaacatcatccaattcccgagctaatgttaaaggctcatctggtagggctaatgtcaaaggctcatctggtagggatgagattacctttacagaaactgagttccgtgatgttagtttgcagcggaatcgtctaccacggaaggcagaggatgtagggagaaaggttacaggtggttctgattcagattcttctggtcgccagggaacaaatttgagcaggcaatcatccattaccatccaggaactaaacttccaggctagagtgatgggaccaggaaaagggaaccaagatcggcatggcgaattgcaaatgaaggctaatgagttggagaaattatttgctgaacacaagttaatatcatcccgacgaggcaaacctacagatgtgcaggttgatagcacacgtacggtgagtgaggtaaagccgataacagttcttcatgagacaattcatacaaaacaagttgtaaaggagagtataacaaccaatgattttgatgccagtgagcttctgaagatggtgagtaatcaaggatttaacattagcacaccacaaaaacttggcattctaagcttagaagagtcgagagggaagttttatgagcattatatgcagaagagggatgcaaaactgaaggaagactggaaactgcagaggggggagaaggaagcaatgttaaaggctatgcatgagagcctagaacggagcaaggctgagatgcgagctaaattctctcagtctggagatgtttctgactcaacttatgtttatcattgttctcagaagattcctccttcgcgatcagcaagaagaaataatgatcagggggttgactcattcttggttgaagaggaattgaatagtgactacctatctggtgacggttcttccaggagtgctgattctaggaagcattttccaaataaagttgcttccacccaaaaggcatctgttggtcctatccataagcgttcttcaaggactgcaagctccggttatggcaatcgcaggaatctaccagaaaatcctatcgcacagcctgtccccagtttctctgacttaagaaaagaaaatacaaagccttcacctggactcagtagagcggctgcaagagttcagcaaaagtcttttgcccgtagcaagagcattattgaagagtcaaagagtatattgaaagaagatcaatcgaggaggtcacaatctatgaggaagagccaaattccggatgagttgaaggacatttcatcagggaatgaggatatttacaattgggctccatcaagaatttccaagaatcaatcagagggagcttttgcttacagtgcccgtagaacgggtccaccaaagccatttcttaggaaaggcaatgggactcaccccgttataggtatagctggatttcaggctgcagcggctatgatggcgaatgccctccagaatggtgacagtggtgattttgaagatcaccaagatgattctcctgatgatgccaaagaagaagaagaatatgaaagtattgaagaaaattttagagaaagtgactttcctgctgattctgacagtgagaacccaagagttagtcatgaatttggaaattcagatgacccagggtcagaaaatggcgatgctaacttttcaagtgaagcacccgcaattggtggtactaagttcactgcttttacaggaaacgttcatgatccagctagtgatgttccagcaccctggagttctcgtcttccacagctgtccccttacatgaatgataatacagatggtgacacattcgctgattcaccgtgtggaagtccaccatggaattctcattcacttgatgaaataacagatgctgatgtatctcggatgcggaaaaagtggggcagtgcacagatgccttttgctggtgtcagtgcatctcaacagccacgcaaagatgtttccaaaggattgaagaaactgtggaaatttggtaggaagactagagggggtgatggtttagtaaatgattgggtatctgcttccactgcctcagaatacgatgaagacatggaagatgggcgggatctggtagtaggatcttctgatgatttcaaaaagtctcgaatgggttatcttgcttcatatgatgattttgttgaggatgaggtttttgctgaacaagaacaatcactacgcagctcaattccaaacccacctgcaaatttcagaccgagagaagatcaactgactggaagagcgccacgttctttcttctccctgtcaacattccgaagcaagggaggtgatgccaggctcaggtgatcctcagaaagtcagaagacaccagaggtggagtgtataaaatatcttccgaggttaggtatgagtatcaaattttcagggcggtacgcggctagcttgtgattataaatatatatctatatgttgtgtatctatggcaattcatataagctaccagttgagccccccattgttactgtttgattattctttttccgtaatattctttgacctcctgtgtagagttggacttagagatctttttgcagtctgttcttccaactggcccaaaactactgtatttttcgttgtttttgtgatatatatgtatctccctcttgtttcttcattcacatatatcacaaattcaagatatatggtaaaaag

SEQ ID NO: 22794 - DNA, 4177 bp, Zea Mays
gtggaactggctcagcagcggcggtggcagcagatattacaaagaaagaacttcttagggcaatcgatgtgcgtctaagcacccttaaacaagatctggctgcagcttgttctcgagcatcctctgctgggttcaatccgaacagtgtatctgagcttcttcttttcgctaaccattttggtgccagtcggctgagcatgcacgaaattcatgtcactttgccagcggcgtcatgacatcagtcctcaaaccgcacagccagcagtttcatcacactggaaggtctttgatgatgggaatgttcgtggttcttccagttcagacatgtctatagatgagccacaagttgatctcggtgaatccaacaacaaatctacagtcggtggaagtggctctcaggtccacagactaagcaacagccaaggcttagaagtcgctgcagaacagcaacccaagccaaccatcccacaggccatagataaacaagaagcagaaacagacgcgtctcccgcacctgctgcaggagggctttcaaggcgtctgagtgtgaaggacaggataaacatgtttgagagccagaaaaaggagcagactccaagttctggtaacagcaactcagcaggtactggtagggtggttccagggagaggtgagcaccgcagggttccttctggggcctccatggagaagttagttagaaggtggagcagtgttagcgacatgagtattgatctcagcaacaatgagagcgttaacataaatgacaaaaaggacaatggaactcctgttgtgactccaacatctactgatttggaggccaactctaaagcaaaagctgatgtggactctaatggacagaaggatttagtcacatcacactcctggccttatcaaaaggataatgtaccaatggatccgactaccacagatttgtgcccaccctcaactttaagtaatacacttgctcctcatagtgatggtgcaggaaacgacatggttataaactctagcattgagagtgagtcatcctttgggaaagaagcgggggttattcaaggactcacaaggatgtcaaatcatgctacttcaaatgtttccactcgaaaccatctaaaatcttctgcaaagccagttgaggaaggcttgctgaaaaataaggatattttaaccagcacatcgttagaggagcatgttcgcatgatagataaggaaataacagctgttcctcatgaagtattagttgcaagtgaacagattccccagaatgatattagaggtctccatacaaaagatattcacactgaatctgaagtgactggaaggaaggatcagccttcacgatcatttggaaaggtatctggtggtgttaatcctaaaccaaaaacatcatccaattcccgagctaatgttaaaggctcatctggtagggctaatgtcaaaggctcatctggtagggatgagattacctttacagaaactgagttccgtgatgttagtttgcagcggaatcgtctaccacggaaggcagaggatgtagggagaaaggttacaggtggttctgattcagattcttctggtcgccagggaacaaatttgagcaggcaatcatccattaccatccaggaactaaacttccaggctagagtgatgggaccaggaaaagggaaccaagatcggcatggcgaattgcaaatgaaggctaatgagttggagaaattatttgctgaacacaagttaatatcatcccgacgaggcaaacctacagatgtgcaggttgatagcacacgtacggtgagtgaggtaaagccgataacagttcttcatgagacaattcatacaaaacaagttgtaaaggagagtataacaaccaatgattttgatgccagtgagcttctgaagatggtgagtaatcaaggatttaacattagcacaccacaaaaacttggcattctaagcttagaagagtcgagagggaagttttatgagcattatatgcagaagagggatgcaaaactgaaggaagactggaaactgcagaggggggagaaggaagcaatgttaaaggctatgcatgagagcctagaacggagcaaggctgagatgcgagctaaattctctcagtctggagatgtttctgactcaacttatgtttatcattgttctcagaagattcctccttcgcgatcagcaagaagaaataatgatcagggggttgactcattcttggttgaagaggaattgaatagtgactacctatctggtgacggttcttccaggagtgctgattctaggaagcattttccaaataaagttgcttccacccaaaaggcatctgttggtcctatccataagcgttcttcaaggactgcaagctccggttatggcaatcgcaggaatctaccagaaaatcctatcgcacagcctgtccccagtttctctgacttaagaaaagaaaatacaaagccttcacctggactcagtagagcggctgcaagagttcagcaaaagtcttttgcccgtagcaagagcattattgaagagtcaaagagtatattgaaagaagatcaatcgaggaggtcacaatctatgaggaagagccaaattccggatgagttgaaggacatttcatcagggaatgaggatatttacaattgggctccatcaagaatttccaagaatcaatcagagggagcttttgcttacagtgcccgtagaacgggtccaccaaagccatttcttaggaaaggcaatgggactcaccccgttataggtatagctggatttcaggctgcagcggctatgatggcgaatgccctccagaatggtgacagtggtgattttgaagatcaccaagatgattctcctgatgatgccaaagaagaagaagaatatgaaagtattgaagaaaattttagagaaagtgactttcctgctgattctgacagtgagaacccaagagttagtcatgaatttggaaattcagatgacccagggtcagaaaatggcgatgctaacttttcaagtgaagcacccgcaattggtggtactaagttcactgcttttacaggaaacgttcatgatccagctagtgatgttccagcaccctggagttctcgtcttccacagctgtccccttacatgaatgataatacagatggtgacacattcgctgattcaccgtgtggaagtccaccatggaattctcattcacttgatgaaataacagatgctgatgtatctcggatgcggaaaaagtggggcagtgcacagatgccttttgctggtgtcagtgcatctcaacagccacgcaaagatgtttccaaaggattgaagaaactgtggaaatttggtaggaagactagagggggtgatggtttagtaaatgattgggtatctgcttccactgcctcagaatacgatgaagacatggaagatgggcgggatctggtagtaggatcttctgatgatttcaaaaagtctcgaatgggttatcttgcttcatatgatgattttgttgaggatgaggtttttgctgaacaagaacaatcactacgcagctcaattccaaacccacctgcaaatttcagaccgagagaagatcaactgactggaagagcgccacgttctttcttctccctgtcaacattccgaagcaagggaggtgatgccaggctcaggtgatcctcagaaagtcagaagacaccagaggtggagtgtataaaatatcttccgaggttaggtatgagtatcaaattttcagggcggtacgcggctagcttgtgattataaatatatatctatatgttgtgtatctatggcaattcatataagctaccagttgagccccccattgttactgtttgattattctttttccgtaatattctttgacctcctgtgtagagttggacttagagatctttttgcagtctgttcttccaactggcccaaaactactgtatttttcgttgtttttgtgatatatatgtatctccctcttgtttcttcattcacatatatcacaaattcaagatatatggtaattttggcaattgtagcatggaaactgggcttattcaaggcacccgcaaagtcacttgttttagtgtgatgagtgtatctgtctttgatctatgtatatatattttttagaaaacttcatcgagttttttttgaa

SEQ ID NO: 22795 - DNA, 1978 bp, Zea Mays
ctcgaaaccagcccaattcccaacactatcgatgacaatatagcatatgttgagatcatacaatagtcaaagtccaatccaattatgcttactctcgcgacttcggtgttcgaggaaattcatctgcccaaccccagcaacatgatttagagttaaaaaaatcagagtacctggacacaacaaaaccaggctcggtacctaaaaaatgaggactttggatgaacaagcgggagatttattattttaatggcatgttaaggaaaaggtaagagtggtaggtgaagcattgctgtcaatttgactctaggtgcaaatatcaggctgcggccggcactggctttgtcctctaccttagtttctgacatcatcacatcgcaccgagggcgaggaggcaaaggaataacctgtgaagctgctgccatccactcatctttctgccttgattgcagtcattcctcccccaagtccatagagtgatagagaatggaggataatctaccagttaatgtccgggaatatcaagaacttgctaagaaagcactaccaaagatgcactatgattatatcaacggaggagcagaagatgaatatacactgagggagaatattgcagcatatggaagaattctgttacggccacgagtccttatagatgtgagcaaagatagacatgtcaacaagcttattaggatataatatgccatcgccaataattgtcgcacctacaggggcacacaaattagccaatcccgaaggggaggtggccacagcaagagctgccgcagcatgtaacaccataatgatgctttccttctcatcaagctgcaggatcgaggaggttgcctccagttgcgacgctattcgcttttatcagttatatgtgtacaagagaagggatgtttcggcaacattggatgattgctccacctctgtcaaaccttgaaggtttaatgtcattagacgactttgacgatgctgaaggcggctccaagctggaacgattctcacgggagacgctggatccatcattgtcatggaaggacgtggagtggctcaagtccatcaccagcctgccgattctgctcaagggcatcgtcaccgcggaagacgcgaggaaggccgtggaggcgggggcggccggcttgatcgtgtccaaccacggcgcccggcagctggactatgcgccggccaccatctcggcgctcgaagaggtggttaaggcggtggcgggggctgtgccggtgctggtggacggcggcgtccggcgcggcaccgacgtgttgaaggcgctggcgctcggcgccaaggcagtcatggtgggcaggccggtgttctttgggctggcggcgcgcggggaagccggcgcgaggcacgtgatcgagatgttgaacaaggagctggagttggccatggcgctctgcggctgccgtagcgtcgcggaggtcaccagggcgcacgtccagaccgagggcgaccggatcagggccctgctgtgacttataaataagcgaccatatccgaggccgaccaccgtgctgtctgggttgcgatatgatttatatgatacgtgagggcatgtgatcgattgttgcctccacacagataagcttactattgccagagcctgggctggactatgctttcagtgattatctaaatcaaatagactgaatgctaaagggaacatccaatggtgtccatctatatagcatttgttggagtcacatgtagccatttgactgcccatcattaaggcctgaagtcaagagctcaatcaccctgaatccccttcaacgaagaagcccgtaacgtacaagatcgtccggcactccgagagaagctggacgccgtccgcatgtcgtttggtgccgcccccgtcgcccgcacctacaccaccgtaaaggccgcttcagctggacttgtgctcgccggcccgcgcgccgcttcagctgaatggtgcttgcgctgcttcggttaa

SEQ ID NO: 22796 - DNA, 2295 bp, Zea Mays
tgacaatatagcatatgttgagatcatacaatagtcaaagtccaatccaattatgcttactctcgcgacttcggtgttcgaggaaattcatctgcccaaccccagcaacatgatttagagttaaaaaaatcagagtacctggacacaacaaaaccaggctcggtacctaaaaaatgaggactttggatgaacaagcgggagatttattattttaatggcatgttaaggaaaaggtaagagtggtaggtgaagcattgctgtcaatttgactctaggtgcaaatatcaggctgcggccggcactggctttgtcctctaccttagtttctgacatcatcacatcgcaccgagggcgaggaggcaaaggaataacctgtgaagctgctgccatccactcatctttctgccttgattgcagtcattcctcccccaagtccatagagtgatagagaatggaggataatctaccagttaatgtccgggaatatcaagaacttgctaagaaagcactaccaaagatgcactatgattatatcaacggaggagcagaagatgaatatacactgagggagaatattgcagcatatggaagaattctgttacggccacgagtccttatagatgtgagcaaagatagacatgtcaacaagcttattaggatataatatgccatcgccaataattgtcgcacctacaggggcacacaaattagccaatcccgaaggggaggtggccacagcaagagctgccgcagcatgtaacaccataatgatgctttccttctcatcaagctgcaggatcgaggaggttgcctccagttgcgacgctattcgcttttatcagttatatgtgtacaagagaagggatgtttcggcaacattggtacggcgggctgaaagtttaggattcagggcaattgttttgacagttgacacgcctgtgcttggcaggcgtgaagctgatatcagaaataagtacagcgcttgtatcgttaatgaaatctcctaaaattgagggaaattatgttcatttacaaaattcataattccagtttcctaacccgttgctactgaaggttaaaattttaagctactatcttataccatattgtagatcgttgatacatttatgcggagcattgcagtagcttcaacatcagaatgttgcaaaaaaacaatcccattttcttttatcttgagatgttctgtaactgagctgattgttcatgcaggatgattgctccacctctgtcaaaccttgaaggtttaatgtcattagacgactttgacgatgctgaaggcggctccaagctggaacgattctcacgggagacgctggatccatcattgtcatggaaggacgtggagtggctcaagtccatcaccagcctgccgattctgctcaagggcatcgtcaccgcggaagacgcgaggaaggccgtggaggcgggggcggccggcttgatcgtgtccaaccacggcgcccggcagctggactatgcgccggccaccatctcggcgctcgaagaggtggttaaggcggtggcgggggctgtgccggtgctggtggacggcggcgtccggcgcggcaccgacgtgttgaaggcgctggcgctcggcgccaaggcagtcatggtgggcaggccggtgttctttgggctggcggcgcgcggggaagccggcgcgaggcacgtgatcgagatgttgaacaaggagctggagttggccatggcgctctgcggctgccgtagcgtcgcggaggtcaccagggcgcacgtccagaccgagggcgaccggatcagggccctgctgtgacttataaataagcgaccatatccgaggccgaccaccgtgctgtctgggttgcgatatgatttatatgatacgtgagggcatgtgatcgattgttgcctccacacagataagcttactattgccagagcctgggctggactatgctttcagtgattatctaaatcaaatagactgaatgctaaagggaacatccaatggtgtccatctatatagcatttgttggagtcacatgtagccatttgactgcccatcattaaggcctgaagtcaagagctcaatcaccctgaatccccttcaacgaagaagcccgtaacgtacaagatcgtccggcactccgagagaagctggacgccgtccgcatgtcgtttggtgccgcccccgtcgcccgcacctacaccaccgtaaaggccgcttcagctggacttgtgctcgccggcccgcgcgccgcttcagctgaatggtgcttgcgctgcttcggttaa

SEQ ID NO: 22797 - DNA, 1270 bp, Zea Mays
caacaaaaccaggctcggtacctaaaaaatgaggactttggatgaacaagcgggagatttattattttaatggcatgttaaggaaaaggtaagagtggtaggtgaagcattgctgtcaatttgactctaggtgcaaatatcaggctgcggccggcactggctttgtcctctaccttagtttctgacatcatcacatcgcaccgagggcgaggaggcaaaggaataacctgtgaagctgctgccatccactcatctttctgccttgattgcagtcattcctcccccaagtccatagagtgatagagaatggaggataatctaccagttaatgtccgggaatatcaagaacttgctaagaaagcactaccaaagatgcactatgattatatcaacggaggagcagaagatgaatatacactgagggagaatattgcagcatatggaagaattctgttacggccacgagtccttatagatgtgagcaaagatagacatgtcaacaagcttattaggatataatatgccatcgccaataattgtcgcacctacaggggcacacaaattagccaatcccgaaggggaggtggccacagcaagagctgccgcagcatgtaacaccataatgatgctttccttctcatcaagctgcaggatcgaggaggttgcctccagttgcgacgctattcgcttttatcagttatatgtgtacaagagaagggatgtttcggcaacattggatgattgctccacctctgtcaaaccttgaaggtttaatgtcattagacgactttgacgatgctgaaggcggctccaagctggaacgattctcacgggagacgctggatccatcattgtcatggaaggacgtggagtggctcaagtccatcaccagcctgccgattctgctcaagggcatcgtcaccgcggaagacggtgtgcaagagaagagctgtttcagcaacattggtatggcgggttgaggccatcttcagctgatccttcgtcccatccactatctcatcctctgttttaaaatttcaatctgtaaacaatgttatctacaatttcatgtttcctattttactgtgtccactgaagatagtatgagagtttagggttcaattcagctgctttgacagttgacaggcctgtgcttggcaggcgcgaagctgatatcagaaacaagtacagtgcttgctatctttgttgaaacctcctaaagttcagtgaaattatgtcctttacaaaaccacctgaaggttaaattttt

SEQ ID NO: 22798 - DNA, 1665 bp, Zea Mays
gaagcattgctgtcaatttgactctaggtgcaaatatcaggctgcggccggcactggctttgtcctctaccttagtttctgacatcatcacatcgcaccgagggcgaggaggcaaaggaataacctgtgaagctgctgccatccactcatctttctgccttgattgcagtcattcctcccccaagtccatagagtgatagagaatggaggataatctaccagttaatgtccgggaatatcaagaacttgctaagaaagcactaccaaagatgcactatgattatatcaacggaggagcagaagatgaatatacactgagggagaatattgcagcatatggaagaattctgttacggccacgagtccttatagatgtgagcaaagatagacatgtcaacaagcttattaggatataatatgccatcgccaataattgtcgcacctacaggggcacacaaattagccaatcccgaaggggaggtggccacagcaagagctgccgcagcatgtaacaccataatgatgctttccttctcatcaagctgcaggatcgaggaggttgcctccagttgcgacgctattcgcttttatcagttatatgatgattgctccacctctgtcaaaccttgaaggtttaatgtcattagacgactttgacgatgctgaaggcggctccaagctggaacgattctcacgggagacgctggatccatcattgtcatggaaggacgtggagtggctcaagtccatcaccagcctgccgattctgctcaagggcatcgtcaccgcggaagacgcgaggaaggccgtggaggcgggggcggccggcttgatcgtgtccaaccacggcgcccggcagctggactatgcgccggccaccatctcggcgctcgaagaggtggttaaggcggtggcgggggctgtgccggtgctggtggacggcggcgtccggcgcggcaccgacgtgttgaaggcgctggcgctcggcgccaaggcagtcatggtgggcaggccggtgttctttgggctggcggcgcgcggggaagccggcgcgaggcacgtgatcgagatgttgaacaaggagctggagttggccatggcgctctgcggctgccgtagcgtcgcggaggtcaccagggcgcacgtccagaccgagggcgaccggatcagggccctgctgtgacttataaataagcgaccatatccgaggccgaccaccgtgctgtctgggttgcgatatgatttatatgatacgtgagggcatgtgatcgattgttgcctccacacagataagcttactattgccagagcctgggctggactatgctttcagtgattatctaaatcaaatagactgaatgctaaagggaacatccaatggtgtccatctatatagcatttgttggagtcacatgtagccatttgactgcccatcattaaggcctgaagtcaagagctcaatcaccctgaatccccttcaacgaagaagcccgtaacgtacaagatcgtccggcactccgagagaagctggacgccgtccgcatgtcgtttggtgccgcccccgtcgcccgcacctacaccaccgtaaaggccgcttcagctggacttgtgctcgccggcccgcgcgccgcttcagctgaatggtgcttgcgctgcttcggttaa

SEQ ID NO: 22799 - DNA, 1081 bp, Zea Mays
gaagcattgctgtcaatttgactctaggtgcaaatatcaggctgcggccggcactggctttgtcctctaccttagtttctgacatcatcacatcgcaccgagggcgaggaggcaaaggaataacctgtgaagctgctgccatccactcatctttctgccttgattgcagtcattcctcccccaagtccatagagtgatagagaatggaggataatctaccagttaatgtccgggaatatcaagaacttgctaagaaagcactaccaaagatgcactatgattatatcaacggaggagcagaagatgaatatacactgagggagaatattgcagcatatggaagaattctgttacggccacgagtccttatagatgtgagcaaagatagacatgtcaacaagcttattaggatataatatgccatcgccaataattgtcgcacctacaggggcacacaaattagccaatcccgaaggggaggtggccacagcaagagctgccgcagcatgtaacaccataatgatgctttccttctcatcaagctgcaggatcgaggaggttgcctccagttgcgacgctattcgcttttatcagttatatgtgtacaagagaagggatgtttcggcaacattggtacggcgggctgaaagtttaggattcagggcaattgttttgacagttgacacgcctgtgcttggcaggcgtgaagctgatatcagaaataagatgattgctccacctctgtcaaaccttgaaggtttaatgtcattagacgactttgacgatgctgaaggcggctccaagctggaacgattctcacgggagacgctggatccatcattgtcatggaaggacgtggagtggctcaagtccatcaccagcctgccgattctgctcaagggcatcgtcaccgcggaagacggatcaggatgtggccagcactgagtttccgacatcacacctgggactgggaggcaggcactgacctctgaacctgctgccttccacagctcctccactcatctttctaccgtccttgattgcagtccttccttcttcaattcactcatgtagccatgta

SEQ ID NO: 22800 - DNA, 1514 bp, Zea Mays
gaagcattgctgtcaatttgactctaggtgcaaatatcaggctgcggccggcactggctttgtcctctaccttagtttctgacatcatcacatcgcaccgagggcgaggaggcaaaggaataacctgtgaagctgctgccatccactcatctttctgccttgattgcagtcattcctcccccaagtccatagagtgatagagaatggaggataatctaccagttaatgtccgggaatatcaagaacttgctaagaaagcactaccaaagatgcactatgattatatcaacggaggagcagaagatgaatatacactgagggagaatattgcagcatatggaagaattctgttacggccacgagtccttatagatgtgagcaaagatagacatgtcaacaagcttattaggatataatatgccatcgccaataattgtcgcacctacaggggcacacaaattagccaatcccgaaggggaggtggccacagcaagagctgccgcagcatgtaacaccataatgatgctttccttctcatcaagctgcaggatcgaggaggttgcctccagttgcgacgctattcgcttttatcagttatatgtgtacaagagaagggatgtttcggcaacattggatgattgctccacctctgtcaaaccttgaaggtttaatgtcattagacgactttgacgatgctgaaggcggctccaagctggaacgattctcacgggagacgctggatccatcattgtcatggaaggacgtggagtggctcaagtccatcaccagcctgccgattctgctcaagggcatcgtcaccgcggaagacggtaatgaataactagcacaaaatgtactctaccagcggttggatcactggcatgcttggtgctgaaccggagaactggttacctgtatggtcactgtcttgtctcactgaactgtgacgactctgtggcggcgtcgagcagcgaggaaggccgtggaggcgggggcggccggcttgatcgtgtccaaccacggcgcccggcagctggactatgcgccggccaccatctcggcgctcgaagaggtggttaaggcggtggcgggggctgtgccggtgctggtggacggcggcgtccggcgcggcaccgacgtgttgaaggcgctggcgctcggcgccaaggcagtcatggtgtgcaagagaagagctgtttcagcaacattggtatggcgggttgaggccatcttcagctgatccttcgtcccatccactatctcatcctctgttttaaaatttcaatctgtaaacaatgttatctacaatttcatgtttcctattttactgtgtccactgaagatagtatgagagtttagggttcaattcagctgctttgacagttgacaggcctgtgcttggcaggcgcgaagctgatatcagaaacaagtacagtgcttgctatctttgttgaaacctcctaaagttcagtgaaattatgtcctttacaaaaccacctgaaggttaaattttt

SEQ ID NO: 22801 - DNA, 1259 bp, Zea Mays
gaagcattgctgtcaatttgactctaggtgcaaatatcaggctgcggccggcactggctttgtcctctaccttagtttctgacatcatcacatcgcaccgagggcgaggaggcaaaggaataacctgtgaagctgctgccatccactcatctttctgccttgattgcagtcattcctcccccaagtccatagagtgatagagaatggaggataatctaccagttaatgtccgggaatatcaagaacttgctaagaaagcactaccaaagatgcactatgattatatcaacggaggagcagaagatgaatatacactgagggagaatattgcagcatatggaagaattctgttacggccacgagtccttatagatgtgagcaaagatagacatgtcaacaagcttattaggatataatatgccatcgccaataattgtcgcacctacaggggcacacaaattagccaatcccgaaggggaggtggccacagcaagagctgccgcagcatgtaacaccataatgatgctttccttctcatcaagctgcaggatcgaggaggttgcctccagttgcgacgctattcgcttttatcagttatatgtgtacaagagaagggatgtttcggcaacattggtacggcgggctgaaagtttaggattcagggcaattgttttgacagttgacacgcctgtgcttggcaggcgtgaagctgatatcagaaataagatgattgctccacctctgtcaaaccttgaaggtttaatgtcattagacgactttgacgatgctgaaggcggctccaagctggaacgattctcacgggagacgctggatccatcattgtcatggaaggacgtggagtggctcaagtccatcaccagcctgccgattctgctcaagggcatcgtcaccgcggaagacggtgtgcaagagaagagctgtttcagcaacattggtatggcgggttgaggccatcttcagctgatccttcgtcccatccactatctcatcctctgttttaaaatttcaatctgtaaacaatgttatctacaatttcatgtttcctattttactgtgtccactgaagatagtatgagagtttagggttcaattcagctgctttgacagttgacaggcctgtgcttggcaggcgcgaagctgatatcagaaacaagtacagtgcttgctatctttgttgaaacctcctaaagttcagtgaaattatgtcctttacaaaaccacctgaaggttaaattttt

SEQ ID NO: 22802 - DNA, 1474 bp, Zea Mays
gaagcattgctgtcaatttgactctaggtgcaaatatcaggctgcggccggcactggctttgtcctctaccttagtttctgacatcatcacatcgcaccgagggcgaggaggcaaaggaataacctgtgaagctgctgccatccactcatctttctgccttgattgcagtcattcctcccccaagtccatagagtgatagagaatggaggataatctaccagttaatgtccgggaatatcaagaacttgctaagaaagcactaccaaagatgcactatgattatatcaacggaggagcagaagatgaatatacactgagggagaatattgcagcatatggaagaattctgttacggccacgagtccttatagatgtgagcaaagatagacatgtcaacaagcttattaggatataatatgccatcgccaataattgtcgcacctacaggggcacacaaattagccaatcccgaaggggaggtggccacagcaagagctgccgcagcatgtaacaccataatgatgctttccttctcatcaagctgcaggatcgaggaggtgtacaagagaagggatgtttcggcaacattggtacggcgggctgaaagtttaggattcagggcaattgttttgacagttgacacgcctgtgcttggcaggcgtgaagctgatatcagaaataagtacagcgcttgtatcgttaatgaaatctcctaaaattgagggaaattatgttcatttacaaaattcataattccagtttcctaacccgttgctactgaaggttaaaattttaagctactatcttataccatattgtagatcgttgatacatttatgcggagcattgcagtagcttcaacatcagaatgttgcaaaaaaacaatcccattttcttttatcttgagatgttctgtaactgagctgattgttcatgcaggatgattgctccacctctgtcaaaccttgaaggtttaatgtcattagacgactttgacgatgctgaaggcggctccaagctggaacgattctcacgggagacgctggatccatcattgtcatggaaggacgtggagtggctcaagtccatcaccagcctgccgattctgctcaagggcatcgtcaccgcggaagacggtgtgcaagagaagagctgtttcagcaacattggtatggcgggttgaggccatcttcagctgatccttcgtcccatccactatctcatcctctgttttaaaatttcaatctgtaaacaatgttatctacaatttcatgtttcctattttactgtgtccactgaagatagtatgagagtttagggttcaattcagctgctttgacagttgacaggcctgtgcttggcaggcgcgaagctgatatcagaaacaagtacagtgcttgctatctttgttgaaacctcctaaagttcagtgaaattatgtcctttacaaaaccacctgaaggttaaattttt

SEQ ID NO: 22803 - DNA, 1508 bp, Zea Mays
tgctgctacaaatcttgaatgctgcccaactgcaagcaataaaagaatggaggataatctaccagttaatgtccgggaatatcaagaacttgctaagaaagcactaccaaagatgcactatgattatatcaacggaggagcagaagatgaatatacactgagggagaatattgcagcatatggaagaattctgttacggccacgagtccttatagatgtgagcaaagatagacatgtcaacaagcttattaggatataatatgccatcgccaataattgtcgcacctacaggggcacacaaattagccaatcccgaaggggaggtggccacagcaagagctgccgcagcatgtaacaccataatgatgctttccttctcatcaagctgcaggatcgaggaggttgcctccagttgcgacgctattcgcttttatcagttatatgatgattgctccacctctgtcaaaccttgaaggtttaatgtcattagacgactttgacgatgctgaaggcggctccaagctggaacgattctcacgggagacgctggatccatcattgtcatggaaggacgtggagtggctcaagtccatcaccagcctgccgattctgctcaagggcatcgtcaccgcggaagacgcgaggaaggccgtggaggcgggggcggccggcttgatcgtgtccaaccacggcgcccggcagctggactatgcgccggccaccatctcggcgctcgaagaggtggttaaggcggtggcgggggctgtgccggtgctggtggacggcggcgtccggcgcggcaccgacgtgttgaaggcgctggcgctcggcgccaaggcagtcatggtgggcaggccggtgttctttgggctggcggcgcgcggggaagccggcgcgaggcacgtgatcgagatgttgaacaaggagctggagttggccatggcgctctgcggctgccgtagcgtcgcggaggtcaccagggcgcacgtccagaccgagggcgaccggatcagggccctgctgtgacttataaataagcgaccatatccgaggccgaccaccgtgctgtctgggttgcgatatgatttatatgatacgtgagggcatgtgatcgattgttgcctccacacagataagcttactattgccagagcctgggctggactatgctttcagtgattatctaaatcaaatagactgaatgctaaagggaacatccaatggtgtccatctatatagcatttgttggagtcacatgtagccatttgactgcccatcattaaggcctgaagtcaagagctcaatcaccctgaatccccttcaacgaagaagcccgtaacgtacaagatcgtccggcactccgagagaagctggacgccgtccgcatgtcgtttggtgccgcccccgtcgcccgcacctacaccaccgtaaaggccgcttcagctggacttgtgctcgccggcccgcgcgccgcttcagctgaatggtgcttgcgctgcttcggttaa

SEQ ID NO: 22804 - DNA, 1738 bp, Zea Mays
aacttagatatgtatatatatatctgaaagcttaagtattttttgaagagaaggtgtctagaagcctcagtaacaacatgggtttcagctatagcagtcttctcgcctttaagacagagaagagattaattcagagttcagaaagaataaaatggaggataatctaccagttaatgtccgggaatatcaagaacttgctaagaaagcactaccaaagatgcactatgattatatcaacggaggagcagaagatgaatatacactgagggagaatattgcagcatatggaagaattctgttacggccacgagtccttatagatgtgagcaaagatagacatgtcaacaagcttattaggatataatatgccatcgccaataattgtcgcacctacaggggcacacaaattagccaatcccgaaggggaggtggccacagcaagagctgccgcagcatgtaacaccataatgatgctttccttctcatcaagctgcaggatcgaggaggttgcctccagttgcgacgctattcgcttttatcagttatatgtgtacaagagaagggatgtttcggcaacattggtacggcgggctgaaagtttaggattcagggcaattgttttgacagttgacacgcctgtgcttggcaggcgtgaagctgatatcagaaataagatgattgctccacctctgtcaaaccttgaaggtttaatgtcattagacgactttgacgatgctgaaggcggctccaagctggaacgattctcacgggagacgctggatccatcattgtcatggaaggacgtggagtggctcaagtccatcaccagcctgccgattctgctcaagggcatcgtcaccgcggaagacgcgaggaaggccgtggaggcgggggcggccggcttgatcgtgtccaaccacggcgcccggcagctggactatgcgccggccaccatctcggcgctcgaagaggtggttaaggcggtggcgggggctgtgccggtgctggtggacggcggcgtccggcgcggcaccgacgtgttgaaggcgctggcgctcggcgccaaggcagtcatggtgggcaggccggtgttctttgggctggcggcgcgcggggaagccggcgcgaggcacgtgatcgagatgttgaacaaggagctggagttggccatggcgctctgcggctgccgtagcgtcgcggaggtcaccagggcgcacgtccagaccgagggcgaccggatcagggccctgctgtgacttataaataagcgaccatatccgaggccgaccaccgtgctgtctgggttgcgatatgatttatatgatacgtgagggcatgtgatcgattgttgcctccacacagataagcttactattgccagagcctgggctggactatgctttcagtgattatctaaatcaaatagactgaatgctaaagggaacatccaatggtgtccatctatatagcatttgttggagtcacatgtagccatttgactgcccatcattaaggcctgaagtcaagagctcaatcaccctgaatccccttcaacgaagaagcccgtaacgtacaagatcgtccggcactccgagagaagctggacgccgtccgcatgtcgtttggtgccgcccccgtcgcccgcacctacaccaccgtaaaggccgcttcagctggacttgtgctcgccggcccgcgcgccgcttcagctgaatggtgcttgcgctgcttcggttaa

SEQ ID NO: 22805 - DNA, 1590 bp, Zea Mays
ggtgtctagaagcctcagtaacaacatgggtttcagctatagcagtcttctcgcctttaagacagagaagagattaattcagagttcagaaagaataaaatggaggataatctaccagttaatgtccgggaatatcaagaacttgctaagaaagcactaccaaagatgcactatgattatatcaacggaggagcagaagatgaatatacactgagggagaatattgcagcatatggaagaattctgttacggccacgagtccttatagatgtgagcaaagatagacatgtcaacaagcttattaggatataatatgccatcgccaataattgtcgcacctacaggggcacacaaattagccaatcccgaaggggaggtggccacagcaagagctgccgcagcatgtaacaccataatgatgctttccttctcatcaagctgcaggatcgaggaggttgcctccagttgcgacgctattcgcttttatcagttatatgtgtacaagagaagggatgtttcggcaacattggatgattgctccacctctgtcaaaccttgaaggtttaatgtcattagacgactttgacgatgctgcggctccaagctggaacgattctcacgggagacgctggatccatcattgtcatggaaggacgtggagtggctcaagtccatcaccagcctgccgattctgctcaagggcatcgtcaccgcggaagacgcgaggaaggccgtggaggcgggggcggccggcttgatcgtgtccaaccacggcgcccggcagctggactatgcgccggccaccatctcggcgctcgaagaggtggttaaggcggtggcgggggctgtgccggtgctggtggacggcggcgtccggcgcggcaccgacgtgttgaaggcgctggcgctcggcgccaaggcagtcatggtgggcaggccggtgttctttgggctggcggcgcgcggggaagccggcgcgaggcacgtgatcgagatgttgaacaaggagctggagttggccatggcgctctgcggctgccgtagcgtcgcggaggtcaccagggcgcacgtccagaccgagggcgaccggatcagggccctgctgtgacttataaataagcgaccatatccgaggccgaccaccgtgctgtctgggttgcgatatgatttatatgatacgtgagggcatgtgatcgattgttgcctccacacagataagcttactattgccagagcctgggctggactatgctttcagtgattatctaaatcaaatagactgaatgctaaagggaacatccaatggtgtccatctatatagcatttgttggagtcacatgtagccatttgactgcccatcattaaggcctgaagtcaagagctcaatcaccctgaatccccttcaacgaagaagcccgtaacgtacaagatcgtccggcactccgagagaagctggacgccgtccgcatgtcgtttggtgccgcccccgtcgcccgcacctacaccaccgtaaaggccgcttcagctggacttgtgctcgccggcccgcgcgccgcttcagctgaatggtgcttgcgctgcttcggttaa

SEQ ID NO: 22806 - DNA, 1735 bp, Zea Mays
ggtgtctagaagcctcagtaacaacatgggtttcagctatagcagtcttctcgcctttaagacagagaagagattaattcagagttcagaaagaataaaatggaggataatctaccagttaatgtccgggaatatcaagaacttgctaagaaagcactaccaaagatgcactatgattatatcaacggaggagcagaagatgaatatacactgagggagaatattgcagcatatggaagaattctgttacggccacgagtccttatagatgtgagcaaagatagacatgtcaacaagcttattaggatataatatgccatcgccaataattgtcgcacctacaggggcacacaaattagccaatcccgaaggggaggtggccacagcaagagctgccgcagcatgtaacaccataatgatgctttccttctcatcaagctgcaggatcgaggaggttgcctccagttgcgacgctattcgcttttatcagttatatgtgtacaagagaagggatgtttcggcaacattggatgattgctccacctctgtcaaaccttgaaggtttaatgtcattagacgactttgacgatgctgaaggcggctccaagctggaacgattctcacgggagacgctggatccatcattgtcatggaaggacgtggagtggctcaagtccatcaccagcctgccgattctgctcaagggcatcgtcaccgcggaagacggtaatgaataactagcacaaaatgtactctaccagcggttggatcactggcatgcttggtgctgaaccggagaactggttacctgtatggtcactgtcttgtctcactgaactgtgacgactctgtggcggcgtcgagcagcgaggaaggccgtggaggcgggggcggccggcttgatcgtgtccaaccacggcgcccggcagctggactatgcgccggccaccatctcggcgctcgaagaggtggttaaggcggtggcgggggctgtgccggtgctggtggacggcggcgtccggcgcggcaccgacgtgttgaaggcgctggcgctcggcgccaaggcagtcatggtgggcaggccggtgttctttgggctggcggcgcgcggggaagccggcgcgaggcacgtgatcgagatgttgaacaaggagctggagttggccatggcgctctgcggctgccgtagcgtcgcggaggtcaccagggcgcacgtccagaccgagggcgaccggatcagggccctgctgtgacttataaataagcgaccatatccgaggccgaccaccgtgctgtctgggttgcgatatgatttatatgatacgtgagggcatgtgatcgattgttgcctccacacagataagcttactattgccagagcctgggctggactatgctttcagtgattatctaaatcaaatagactgaatgctaaagggaacatccaatggtgtccatctatatagcatttgttggagtcacatgtagccatttgactgcccatcattaaggcctgaagtcaagagctcaatcaccctgaatccccttcaacgaagaagcccgtaacgtacaagatcgtccggcactccgagagaagctggacgccgtccgcatgtcgtttggtgccgcccccgtcgcccgcacctacaccaccgtaaaggccgcttcagctggacttgtgctcgccggcccgcgcgccgcttcagctgaatggtgcttgcgctgcttcggttaa

SEQ ID NO: 22807 - DNA, 2281 bp, Zea Mays
ggtgtctagaagcctcagtaacaacatgggtttcagctatagcagtcttctcgcctttaagacagagaagagattaattcagagttcagaaagaataaaatggaggataatctaccagttaatgtccgggaatatcaagaacttgctaagaaagcactaccaaagatgcactatgattatatcaacggaggagcagaagatgaatatacactgagggagaatattgcagcatatggaagaattctgttacggccacgagtccttatagatgtgagcaaagatagacatgtcaacaagcttattaggatataatatgccatcgccaataattgtcgcacctacaggggcacacaaattagccaatcccgaaggggaggtggccacagcaagagctgccgcagcatgtaacaccataatgatgctttccttctcatcaagctgcaggatcgaggaggttgcctccagttgcgacgctattcgcttttatcagttatatgtgtacaagagaagggatgtttcggcaacattggtacggcgggctgaaagtttaggattcagggcaattgttttgacagttgacacgcctgtgcttggcaggcgtgaagctgatatcagaaataagtacagcgcttgtatcgttaatgaaatctcctaaaattgagggaaattatgttcatttacaaaattcataattccagtttcctaacccgttgctactgaaggttaaaattttaagctactatcttataccatattgtagatcgttgatacatttatgcggagcattgcagtagcttcaacatcagaatgttgcaaaaaaacaatcccattttcttttatcttgagatgttctgtaactgagctgattgttcatgcaggatgattgctccacctctgtcaaaccttgaaggtttaatgtcattagacgactttgacgatgctgaaggcggctccaagctggaacgattctcacgggagacgctggatccatcattgtcatggaaggacgtggagtggctcaagtccatcaccagcctgccgattctgctcaagggcatcgtcaccgcggaagacgcgaggaaggccgtggaggcgggggcggccggcttgatcgtgtccaaccacggcgcccggcagctggactatgcgccggccaccatctcggcgctcgaagaggtggttaaggcggtggcgggggctgtgccggtgctggtggacggcggcgtccggcgcggcaccgacgtgttgaaggcgctggcgctcggcgccaaggcagtcatggtgggcaggccggtgttctttgggctggcggcgcgcggggaagccggcgcgaggcacgtgatcgagatgttgaacaaggagctggagttggccatggcgctctgcggctgccgtagcgtcgcggaggtcaccagggcgcacgtccagaccgagggcgaccggatcagggccctgctgtgacttataaataagcgaccatatccgaggccgaccaccgtgctgtctgggttgcgatatgatttatatgatacgtgagggcatgtgatcgattgttgcctccacacagataagcttactattgccagagcctgggctggactatgctttcagtgattatctaaatcaaatagactgaatgctaaagggaacatccaatggtgtccatctatatagcatttgttggagtcacatgtagccatttgactgcccatcattaaggcctgaagtcaagagctcaatcaccctgaatccccttcaacgaagaagcccgtaacgtacaagatcgtccggcactccgagagaagctggacgccgtccgcatgtcgtttggtgccgcccccgtcgcccgcacctacaccaccgtaaaggccgcttcagctggacttgtgctcgccggcccgcgcgccgcttcagctgaatggtgcttgcgctgcttcggttaaggtgtgcaagagaagagctgtttcagcaacattggtatggcgggttgaggccatcttcagctgatccttcgtcccatccactatctcatcctctgttttaaaatttcaatctgtaaacaatgttatctacaatttcatgtttcctattttactgtgtccactgaagatagtatgagagtttagggttcaattcagctgctttgacagttgacaggcctgtgcttggcaggcgcgaagctgatatcagaaacaagtacagtgcttgctatctttgttgaaacctcctaaagttcagtgaaattatgtcctttacaaaaccacctgaaggttaaattttt

SEQ ID NO: 22808 - DNA, 2113 bp, Zea Mays
attccccaattctcaattccccgacgctcagccgtcgcaacaaatcgcggagcactcgccgtcgtccgtcaccgggctgtccaacctacgtcgactccggacgcatcgctcgccatacgatcagccctccgttcgctgtacgggctcgcgggttgcgaccctaatagctgactgattctaggcgccatgtcactgcccgtcgacgccgccatcatccagttcacccagcttccaaatggctagtgaggactcgaaagatatgctgaagaacgtggactggaagaccgtgggcggtgctgtgactactgaatctagccagccagttgtcaagaaacgccttccgaagaagatcagacaagtccctgagtgctattttctgcctcggcgatctttgccttctgcactggcaatctatggtgccgtgtgtgctgctggagttggtgcaggaatgctgatcgaggtgtggataaacaaaaagatcaaagaggatagtgctattatctgggagatggataaatgatgtgcagttctgcaccacactttgatatggtggaagcagtttcggcactgcgatatttgctagctctcaagttaagaattttgtttataggattccttcgtccgtttgttttattttgattgaggtattgccaagatggattcaagaacgttcatccgcagttcatttaccagaacacgagtaaaaactctggctgctgaaaatatagctccaccacaactctaaaataacttataatttgaaatcgaggaagtatttctgttatcatgctaaataaaatgttgtatattctagttttttttcacatgactccctcggttccttggaagtgcaacacagcacttgcttgtttcaggtttttctctctcttttgcctctattctccacaaatgagaaccgatgctaagggcatgtacaatccacactgtatcttaagggatatatgagggtgtaaatgaaaaaaagaatgatatatgaggttttaaatgaaaaaaaaagaaacatatcttggttaaggaatgtctatgtcacagttttctaagtctaaggtacggttctacacttctacttatacaattcaaataaatgagttatcttttaagtgattctagtgaataagataaaaaaatttagatacattaggttgtatgaagagtttcttagatgtatctagtgcttggagaactataacatagtaattaagttgtacatgctctaggaacatgtttggctgagctataggataggttgtgctcggtagatcgtttatatggtcattgcactgtatattactctgtttaaaaaaatgaagtttgaaataggtggtgtggtggtaggtgggataggaagtctgctagagatagcctttatgaaaatgttggtgtgcattatggacttttaaaaattgttttgaagtctaagctatgagagaaagttaaaaatgtgtttaattaaacatttgatttttgataaacctgttgtaagtctctcttacgagcggaatccacatctcatccatagtcctcccaacttggggcaggattgagtgctgcagcagggcccattggcaggaccagtgaaaagggatctgggatatgctacacttacagctgcagcaaaggtgccttcgttggtgtttcactggaagggaatgtggtgacaactagaatggaaaccaatctccgcttctacggtgatgcataccagacggcaaccctctactagtcttcctggccgacctaggacaaccaggcgccgttctcgttctcacatgctacttgcggtcgattggttttgtggatgattgtttatcttctagagattagcatcagccagcatgacatttctctgctctgttctgtaatctgttccgctgacccgctccgctagcaggcaagccactgccgccgcaaactactagtacgatacaatagacgccaagcccagtgaagaagcagcgtcgatctgggcggatcgatcaagattgctcggaacaattcttggctgcttttatttattatttgcacttggttacaagtatcagtgtagactaaggccccgtttcaatctcacgggataaactttagcttcctg

SEQ ID NO: 22809 - DNA, 2516 bp, Zea Mays
aacaaatcgcggagcactcgccgtcgtccgtcaccgggctgtccaacctacgtcgactccggacgcatcgctcgccatacgatcagccctccgttcgctgtacgggctcgcgggttgcgaccctaatagctgactgattctaggcgccatgtcactgcccgtcgacgccgccatcatccagttcacccagatcctattctcccatgcgccagccggccccgtgggccgtgagtccgtgatccagcgtcccaggacccaggctcccagtaccagcctcttctatccggcatccagcgagcagcaaatccagagacctcgactcctcctaaccctagccgccaggctccagtgctccaccgctccagcagatcccggacccggaagcagcgaggaaacacagggcgaccaaggcccgtctggactctggatccgccggtccgccactccgcccctcatctccgacctgagcgcgccgccctgccccgccccgcctctccctcgagcgctgtccgcgcctccgcgcctccgcggtccgcgtccggccgtccgcccagggcccaggcagttgctgcctgctggcttgctgccgtccgccaggccgcctaggcacacagcacactacttctacagttctacggccagcgcccagcggtccagtccagcttccaaatggctagtgaggactcgaaagatatgctgaagaacgtggactggaagaccgtgggcggtgctgtgactactgaatctagccagccagttgtcaagaaacgccttccgaagaagatcagacaagtccctgagtgctattttctgcctcggcgatctttgccttctgcactggcaatctatggtgccgtgtgtgctgctggagttggtgcaggaatgctgatcgaggtgtggataaacaaaaagatcaaagaggatagtgctattatctgggagatggataaatgatgtgcagttctgcaccacactttgatatggtggaagcagtttcggcactgcgatatttgctagctctcaagttaagaattttgtttataggattccttcgtccgtttgttttattttgattgaggtattgccaagatggattcaagaacgttcatccgcagttcatttaccagaacacgagtaaaaactctggctgctgaaaatatagctccaccacaactctaaaataacttataatttgaaatcgaggaagtatttctgttatcatgctaaataaaatgttgtatattctagttttttttcacatgactccctcggttccttggaagtgcaacacagcacttgcttgtttcaggtttttctctctcttttgcctctattctccacaaatgagaaccgatgctaagggcatgtacaatccacactgtatcttaagggatatatgagggtgtaaatgaaaaaaagaatgatatatgaggttttaaatgaaaaaaaaagaaacatatcttggttaaggaatgtctatgtcacagttttctaagtctaaggtacggttctacacttctacttatacaattcaaataaatgagttatcttttaagtgattctagtgaataagataaaaaaatttagatacattaggttgtatgaagagtttcttagatgtatctagtgcttggagaactataacatagtaattaagttgtacatgctctaggaacatgtttggctgagctataggataggttgtgctcggtagatcgtttatatggtcattgcactgtatattactctgtttaaaaaaatgaagtttgaaataggtggtgtggtggtaggtgggataggaagtctgctagagatagcctttatgaaaatgttggtgtgcattatggacttttaaaaattgttttgaagtctaagctatgagagaaagttaaaaatgtgtttaattaaacatttgatttttgataaacctgttgtaagtctctcttacgagcggaatccacatctcatccatagtcctcccaacttggggcaggattgagtgctgcagcagggcccattggcaggaccagtgaaaagggatctgggatatgctacacttacagctgcagcaaaggtgccttcgttggtgtttcactggaagggaatgtggtgacaactagaatggaaaccaatctccgcttctacggtgatgcataccagacggcaacccatatcctgtttgggagggtggagcggccccgagctgctcagcccttgtttgctagccgatttagggcttcttaagggtggattgaagatgattagagaggattaaatcgattgatagtcaaattaaatagaaagagagttaatccccctcaatccttttctatccgcatgcaaccgatccatgctttagatcattggatggtttcactactgacaccagtccacacattaaatattagcagagtatttagtgttagattattgtagaaattacgatttagacttgtttctaaatgaataattttatatataattagaagatcatgatcggttgagagatccaacgc

SEQ ID NO: 22810 - DNA, 2328 bp, Zea Mays
gataaaccccactctattcttctctcttctctcacttattcctctcctcctcaggttcaaaaaagacagcatctcctcacctctcctctctgctccaaagaaatcacttcctcgttctagatcccgcggagttcagtttgaggggcaagggttgttggatttggatctctctcatcacgtgcccctccctcccctttctcaagtttcaaatcttcatttgcacgggaacttctcttctcaagatggtccgcagaagaaatccgtccattattgagggaagcgaaggtgaaatggacaatcaaatcgaaagtgaagaagaaattcatgagaaacgtcctcgcctctttcaaaccggtccagtcaacaggcaggctcaaggtgacagtgagagcagcgctcggccccaaactgttcacgcaacaagaggtgagagatttccctctcttcggcgaaaattcgcagggcaatgccctcgccgtgtggcagatccaaatgcggatgaaccagctagtgatgatgatggtaaaaaagatgatgttgtagcacttcctccggatgatgctcctctcattagggatcttgtgctacacagggccaaagcccgtcgtaatccaaatgaacctcaaatggattacagtgcgggcagcaacagtttgcttcaatacataaggtatgaaaatccaatgaagtgggcaagagataatcgaattgacggtcacagattttggaatctctttcatgtggacttctacaactcagtaatcatgactaagaagcaccaacctatcatcaaacaaagatctataaattgggctgaatgtgagcagatgagagataaggaaatgactagagctctgcgagcatgtgaggctaaaggaatgaagaacatcatgcttttctcttatgattggaacgacgaagtgatagcccaattttactcaactctatgggtgaagctgagcagtgatgatttgggtgcctatgcctatccatacatgaatttcaacattgaaggacagtggtataaggtgagctaccggcgctttgctcatattcttgggttcactgattctgagatccatcctgatcgtagatgcatccacaactattctcttccacctcgtgccgaagtaattgacatgcatgtggtgcctactgacgacatgtggaaaactacaaatctgcaaggttattacaggtatctcaactccatgttccgtgccactctcattcctaagggaggaaatcaagtgaatgtgcatggtgaaagtcacgttctcctttacttcatgaagccaaataagaattttagaattaatgtgtttgacatgatctggaaagaaattatccatgcctcttggaacacatctaaagggtgtgtgcatgctcctttcataatgaaaatgattgaagtggtgtctcaaacttattttcaaaaggacagcaagcatgtcaagtacacaccttattggattgatccaaacaacccagccggcagatcaaaaagggcacccacctcagctgagcctggagcttcttcttcatcctccgaagaacctgctccagctccacctcttcatccctcttcttctcgggctgccgctgcctctcgccccatgagccgtggtgaccgaggtaagcaaggaggtcttaaagctttactcaagaaggggttcaatgccatgtttgccatatatcgagagaactcaattcacacagctgagcttgtacgaagaacaatggagttggatcagaattttagacgtcatgtcgctggtcaaccgttgcttccagttcgtccgtataatcctccacctcctatggccgacactcttgatcagtggcatcaacaaacttatggagttcccttcagtgcgtccgaccaagaaatctctgaggatgaaccagttactcctcctgctgcttctgcttcagttcctcctactcctgctgcttctgcttcagttcctcctcctcctgcttccgctccagacttgggcacctacttctttggtgatcctagtggtggtcatggtccctatggtgggtggtgatcttatttttttcttcattttggttgcttgatgccaaaaatggggagaagtttgtgatatctttgctcttttatctatctacccactcttgttgtgagttgtgagagagaacttcaactcttgggatgtaaaataactttgtgattgtgtgctgatctcaaaaacatctagcttgtaatagtaaattaggtgaacttatttcattatgatgaatttctgttatcctaagttttgtgtcatttacttctcttttgtttgtggtgtattgttgtta

SEQ ID NO: 22811 - DNA, 2228 bp, Zea Mays
gataaaccccactctattcttctctcttctctcacttattcctctcctcctcaggttcaaaaaagacagcatctcctcacctctcctctctgctccaaagaaatcacttcctcgttctagatcccgcggagttcagtttgaggggcaagggttgttggatttggatctctctcatcacgtgcccctccctcccctttctcaagtttcaaatcttcatttgcacgggaacttctcttctcaagaagatggtccgcagaagaaatccgtccattattgagggaagcgaaggtgaaatggacaatcaaatcgaaagtgaagaagaaattcatgagaaacgtcctcgcctctttcaaaccggtccagtcaacaggcaggctcaaggtgacagtgagagcagcgctcggccccaaactgttcacgcaacaagaggtgagagatttccctctcttcggcgaaaattcgcagggcaatgccctcgccgtgtggcagatccaaatgcggatgaaccagctagtgatgatgatggtaaaaaagatgatgttgtagcacttcctccggatgatgctcctctcattagggatcttgtgctacacagggccaaagcccgtcgtaatccaaatgaacctcaaatggattacagtgcgggcagcaacagtttgcttcaatacataaggtatgaaaatccaatgaagtgggcaagagataatcgaattgacggtcacagattttggaatctctttcatgtggacttctacaactcagtaatcatgactaagaagcaccaacctatcatcaaacaaagatctataaattgggctgaatgtgagcagatgagagataaggaaatgactagagctctgcgagcatgtgaggctaaaggaatgaagaacatcatgcttttctcttatgattggaacgacgaagtgatagcccaattttactcaactctatgggtgaagctgagcagtgatgatttgggtgcctatgcctatccatacatgaatttcaacattgaaggacagtggtataagtaattgacatgcatgtggtgcctactgacgacatgtggaaaactacaaatctgcaaggttattacaggtatctcaactccatgttccgtgccactctcattcctaagggaggaaatcaagtgaatgtgcatggtgaaagtcacgttctcctttacttcatgaagccaaataagaattttagaattaatgtgtttgacatgatctggaaagaaattatccatgcctcttggaacacatctaaagggtgtgtgcatgctcctttcataatgaaaatgattgaagtggtgtctcaaacttattttcaaaaggacagcaagcatgtcaagtacacaccttattggattgatccaaacaacccagccggcagatcaaaaagggcacccacctcagctgagcctggagcttcttcttcatcctccgaagaacctgctccagctccacctcttcatccctcttcttctcgggctgccgctgcctctcgccccatgagccgtggtgaccgaggtaagcaaggaggtcttaaagctttactcaagaaggggttcaatgccatgtttgccatatatcgagagaactcaattcacacagctgagcttgtacgaagaacaatggagttggatcagaattttagacgtcatgtcgctggtcaaccgttgcttccagttcgtccgtataatcctccacctcctatggccgacactcttgatcagtggcatcaacaaacttatggagttcccttcagtgcgtccgaccaagaaatctctgaggatgaaccagttactcctcctgctgcttctgcttcagttcctcctactcctgctgcttctgcttcagttcctcctcctcctgcttccgctccagacttgggcacctacttctttggtgatcctagtggtggtcatggtccctatggtgggtggtgatcttatttttttcttcattttggttgcttgatgccaaaaatggggagaagtttgtgatatctttgctcttttatctatctacccactcttgttgtgagttgtgagagagaacttcaactcttgggatgtaaaataactttgtgattgtgtgctgatctcaaaaacatctagcttgtaatagtaaattaggtgaacttatttcattatgatgaatttctgttatcctaagttttgtgtcatttacttctcttttgtttgtggtgtattgttgtta

SEQ ID NO: 22812 - DNA, 1418 bp, Zea Mays
gtgcattatgtgacctctacactttctctctaaatgtgatgcatgaatggcatatgaggccaattcttgtgaaattcatcacatgcacacatttagggagagtcataagtattaaaaaatcttgtgtttatcttatctacgtcacttttaattattttatcattaatcaccaaaaagagagagattataagagcaattaatcttttgagggttttagtgattgaatgtcaaagagattaaaagtactaacaactttatttgagcatgtgtatagttcttaatatcctgtgaagtgctcatgctcatgccaaagagtcaaaagagcatgaaacgtctatgtgaagttatgcaggacccaaagaagatatatcatgaagagcgaatcacatccaaaaatcttttgagacatattcaagattaaactcaatactcaagaatcgagatcttggttgacttttatttatgtcattgaatataggaatcgtcatactatcaagagggatcaacatatggtattggcgttgttgctaaagctcacactctttatttttgagtgaactattttatttcagctccactgtgattgaagtgggctgttcaaccagtccttggcccacctcaaccttgtttctctttggtctccagtaagtacctttactgcaactgttgtggtgattggtatttaagcatatgggatgggtacaacaatcttgtcgtcattttacaggacaagtggaaacttgtttaacaatgaccccgctccaccacctccaccatcaccactagcaccaaatacccctccctattggcaacctgatgttccagcttacccatccccatacttatatttaaactctactcgcgaacggtgcagtctacgatgcagaacaatgtaaaatagtacatatgggtaaactttgggtaatctgctggagtcggcctaaagtctaagatacccagccgaaaatggtggcagacactccaaacttggtgatggtgcagttgcaggaatcgtaatatgtttgctggatgttggtgcaatagttgcattccttgtaatcaaaaggaaatcttggaggttatcatggggacaagacccggaacaaaatgaacctctcagtcctcttgcttctggacttaaacagatgaaatctatcaaaatcatatcgacaattggcaaagaagaactgcagaagactgtttagatgagtttgaagccgccaacaaaaattgacctccacaagtcctttgatgaaagtgataccactaacaagtccatctcaaggtaaagtaagtttgtcttccataacaatacctgcatagacggtggcaggccttcaggtgcaacaggcagcttcggtcctgacagtcttatctgtgaggggtcgttaggccccgcgtttacaaagcgaaattcg

SEQ ID NO: 22813 - DNA, 1594 bp, Zea Mays
agcactagcagcacacgcagtcattgcttgctctccgaactttttgcaggtcccgaccgcgggccgagcagtcacttgtccgatgggctactccgcagccgcacgacatcgacgcgctggagcagatggtcgaccccgcgctgcgagggctgtacccgtccaaatccctctccggcccacccgcttcgccgatgccatcgctctatgcgttcaggtgaagaagtatctccagtccatccagctcgatctcattgcccctattctatacggcagtggcatttctggcgctgcggctgaattgctggcgccggctggttcctgcaacctgcagcccgagccggagtttcggccgccgatgtgggaggtcttgcagtcgctggtgcgccagcgcctggtgcaaagggcgaacatggcgaggacgcagtcgcactcgcggcgccacggcgaacccgttactgcttcaagagatgttctcgtggtatgctcatctactggatggacagatgaaaagcacatgctttatcttcgattattggaagaaacatttgtgcaccaattacatggaagtggttgcatttttaagggactgtttaattgctctccaagatattgtaggcaaatgaaatcatctaagcaaattgttaaatacactacgcctggtcaggtataggcaaaggctatgttctttctttagttgacagaaaatggaggaagcacctgtaacatatatttttgtatgatgcagcaggggtgtgccatagttgagggtggcaaagtcaagtcctgcataaaggctgagcatgttgagtcaccttcctgttgtggaaatcagcaagatgaaaaagttcgttccctggaagataatgcatcaaccactaagcccatggaaaaagccacttcccatgcaagggcagcaagcccaggacaagcttccacgtgctatgttggcaaacacagacattctccttccagaagtgcagaggggtcggatcagaactttgatgaggaaacccaagggactggagaatcaaaacatgaatacaacccgaagcgactgaaatctgctgatggcacaagggatcatcaggttgtgaatgcagaagctcatcaggtgggctgccttgatgtgagtgacaaaaatagcgagaacttcagtgcatcgtcaaaagtgcttgctgcatcacttgatgttgaagctgggtctccctccggcgactgcaaggatcatggaccaaaaggataatgcaatgtccaccgagtgttttctggagttgactaacacacccacctggcgcgccgcaactgaatcagagataggaagtcaatcagtgcaagtttgtaagataagctagcttgcccgttattctggtttggaagtcaaaatagttcgttcaacttagcctaggcagttgacggttttgttgtgtttctgagggactctgatacgaaaatcaaattccctttgttctgtgtttggcgctgcaacctgtaaatggagtgctttttttttgcgtaccgtgatatctgcgttttggaatactataatatcagaatttggagcgtgtttcgccatgctcgcctcacttgattgggc

SEQ ID NO: 22814 - DNA, 1579 bp, Zea Mays
agcactagcagcacacgcagtcattgcttgctctccgaactttttgcaggtcccgaccgcgggccgagcagtcacttgtccgatgggctactccgcagccgcacgacatcgacgcgctggagcagatggtcgaccccgcgctgcgagggctgtacccgtccaaatccctctccggcccacccgcttcgccgatgccatcgctctatgcgttcaggtgaagaagtatctccagtccatccagctcgatctcattgcccctattctatacggcagtggcatttctggcgctgcggctgaattgctggcgccggctggttcctgcaacctgcagcccgagccggagtttcggccgccgatgtgggaggtcttgcagtcgctggtgcgccagcgcctggtgcaaagggcgaacatggcgaggacgcagtcgcactcgcggcgccacggcgaacccgttactgcttcaagagatgttctcgtggtatgctcatctactggatggacagatgaaaagcacatgctttatcttcgattattggaagaaacatttgtgcaccaattacatggaagtggttgcatttttaagggactgtttaattgctctccaagatattgtaggcaaatgaaatcatctaagcaaattgttaaatacactacgcctggtcaggggtgtgccatagttgagggtggcaaagtcaagtcctgcataaaggctgagcatgttgagtcaccttcctgttgtggaaatcagcaagatgaaaaagttcgttccctggaagataatgcatcaaccactaagcccatggaaaaagccacttcccatgcaagggcagcaagcccaggacaagcttccacgtgctatgttggcaaacacagacattctccttccagaagtgcaggtattaagttcatttacttgagtgacgtggccagatttttaaaagagaactactcgtgcatttactcagaggggtcggatcagaactttgatgaggaaacccaagggactggagaatcaaaacatgaatacaacccgaagcgactgaaatctgctgatggcacaagggatcatcaggttgtgaatgcagaagctcatcaggtgggctgccttgatgtgagtgacaaaaatagcgagaacttcagtgcatcgtcaaaagtgcttgctgcatcacttgatgttgaagctgggtctccctccggcgactgcaaggatcatggaccaaaaggataatgcaatgtccaccgagtgttttctggagttgactaacacacccacctggcgcgccgcaactgaatcagagataggaagtcaatcagtgcaagtttgtaagataagctagcttgcccgttattctggtttggaagtcaaaatagttcgttcaacttagcctaggcagttgacggttttgttgtgtttctgagggactctgatacgaaaatcaaattccctttgttctgtgtttggcgctgcaacctgtaaatggagtgctttttttttgcgtaccgtgatatctgcgttttggaatactataatatcagaatttggagcgtgtttcgccatgctcgcctcacttgattgggc

SEQ ID NO: 22815 - DNA, 481 bp, Zea Mays
acgccccaccccgctcggcctccagtccagctccaccgctttcacccgctccgctccgtttccgtcgctcccgtcccaaggagccgcgccacgcgagagggggccacggacggtggcagttttctgtttcggtgggcggggacgtcgtcgaccgaccgaccggagcggaaggccggagatgatggaggagggggcgcccgatctgcgagagctcgtgcgcctgccgcaggggtgtgccatagttgagggtggcaaagtcaagtcctgcataaaggctgagcatgttgagtcaccttcctgttgtggaaatcagcaagatgaaaaagttcgttccctggaagataatgcatcaaccactaagcccatggaaaaagccacttcccatgcaagggcagcaagcccaggacaagcttccacgtgctatgttggcaaacacagacattctccttccagaagtgcagattatgaacaccagatattt

SEQ ID NO: 22816 - DNA, 1703 bp, Zea Mays
acgccccaccccgctcggcctccagtccagctccaccgctttcacccgctccgctccgtttccgtcgctcccgtcccaaggagccgcgccacgcgagagggggccacggacggtggcagttttctgtttcggtgggcggggacgtcgtcgaccgaccgaccggagcggaaggccggagatgatggaggagggggcgcccgatctgcgagagctcgtgcgcctgccggatgttctcgtggtatgctcatctactggatggacagatgaaaagcacatgctttatcttcgattattggaagaaacatttgtgcaccaattacatggaagtggttgcatttttaagggactgtttaattgctctccaagatattgtaggcaaatgaaatcatctaagcaaattgttaaatacactacgcctggtcaggggtgtgccatagttgagggtggcaaagtcaagtcctgcataaaggctgagcatgttgagtcaccttcctgttgtggaaatcagcaagatgaaaaagttcgttccctggaagataatgcatcaaccactaagcccatggaaaaagccacttcccatgcaagggcagcaagcccaggacaagcttccacgtgctatgttggcaaacacagacattctccttccagaagtgcaggtagggggtatccattggatgtccttttgcaaatgctgttgcatatcgatctgtagttactccaaaaaggaagaaaaactatttccaaattttgattgtcttctattagattattgcaaaacaaagcaacaaatgatttccccaaatctgctttttattaaggaaaaaaaacattttccctggctgtctgccttgttttgtttaaagtataagctgttaatattgtttgtgggctggaaaaaaggcatcatctttccagtgtcttgttttcttatctttctgagatctgaccagtagaagtacaccttgggaattatgccatgtgtttcttcatatccagattatgaacaccagatatttataggtattaagttcatttacttgagtgacgtggccagatttttaaaagagaactactcgtgcatttactcagaggggtcggatcagaactttgatgaggaaacccaagggactggagaatcaaaacatgaatacaacccgaagcgactgaaatctgctgatggcacaagggatcatcaggttgtgaatgcagaagctcatcaggtgggctgccttgatgtgagtgacaaaaatagcgagaacttcagtgcatcgtcaaaagtgcttgctgcatcacttgatgttgaagctgggtctccctccggcgactgcaaggatcatggaccaaaaggataatgcaatgtccaccgagtgttttctggagttgactaacacacccacctggcgcgccgcaactgaatcagagataggaagtcaatcagtgcaagtttgtaagataagctagcttgcccgttattctggtttggaagtcaaaatagttcgttcaacttagcctaggcagttgacggttttgttgtgtttctgagggactctgatacgaaaatcaaattccctttgttctgtgtttggcgctgcaacctgtaaatggagtgctttttttttgcgtaccgtgatatctgcgttttggaatactataatatcagaatttggagcgtgtttcgccatgctcgcctcacttgattgggc

SEQ ID NO: 22817 - DNA, 1075 bp, Zea Mays
acgccccaccccgctcggcctccagtccagctccaccgctttcacccgctccgctccgtttccgtcgctcccgtcccaaggagccgcgccacgcgagagggggccacggacggtggcagttttctgtttcggtgggcggggacgtcgtcgaccgaccgaccggagcggaaggccggagatgatggaggagggggcgcccgatctgcgagagctcgtgcgcctgccgcaggggtgtgccatagttgagggtggcaaagtcaagtcctgcataaaggctgagcatgttgagtcaccttcctgttgtggaaatcagcaagatgaaaaagttcgttccctggaagataatgcatcaaccactaagcccatggaaaaagccacttcccatgcaagggcagcaagcccaggacaagcttccacgtgctatgttggcaaacacagacattctccttccagaagtgcagaggggtcggatcagaactttgatgaggaaacccaagggactggagaatcaaaacatgaatacaacccgaagcgactgaaatctgctgatggcacaagggatcatcaggttgtgaatgcagaagctcatcaggtgggctgccttgatgtgagtgacaaaaatagcgagaacttcagtgcatcgtcaaaagtgcttgctgcatcacttgatgttgaagctgggtctccctccggcgactgcaaggatcatggaccaaaaggataatgcaatgtccaccgagtgttttctggagttgactaacacacccacctggcgcgccgcaactgaatcagagataggaagtcaatcagtgcaagtttgtaagataagctagcttgcccgttattctggtttggaagtcaaaatagttcgttcaacttagcctaggcagttgacggttttgttgtgtttctgagggactctgatacgaaaatcaaattccctttgttctgtgtttggcgctgcaacctgtaaatggagtgctttttttttgcgtaccgtgatatctgcgttttggaatactataatatcagaatttggagcgtgtttcgccatgctcgcctcacttgattgggc

SEQ ID NO: 22818 - DNA, 1308 bp, Zea Mays
acgccccaccccgctcggcctccagtccagctccaccgctttcacccgctccgctccgtttccgtcgctcccgtcccaaggagccgcgccacgcgagagggggccacggacggtggcagttttctgtttcggtgggcggggacgtcgtcgaccgaccgaccggagcggaaggccggagatgatggaggagggggcgcccgatctgcgagagctcgtgcgcctgccggatgttctcgtggtatgctcatctactggatggacagatgaaaagcacatgctttatcttcgattattggaagaaacatttgtgcaccaattacatggaagtggttgcatttttaagggactgtttaattgctctccaagatattgtaggcaaatgaaatcatctaagcaaattgttaaatacactacgcctggtcagcaggggtgtgccatagttgagggtggcaaagtcaagtcctgcataaaggctgagcatgttgagtcaccttcctgttgtggaaatcagcaagatgaaaaagttcgttccctggaagataatgcatcaaccactaagcccatggaaaaagccacttcccatgcaagggcagcaagcccaggacaagcttccacgtgctatgttggcaaacacagacattctccttccagaagtgcagatttttaaaagagaactactcgtgcatttactcagaggggtcggatcagaactttgatgaggaaacccaagggactggagaatcaaaacatgaatacaacccgaagcgactgaaatctgctgatggcacaagggatcatcaggttgtgaatgcagaagctcatcaggtgggctgccttgatgtgagtgacaaaaatagcgagaacttcagtgcatcgtcaaaagtgcttgctgcatcacttgatgttgaagctgggtctccctccggcgactgcaaggatcatggaccaaaaggataatgcaatgtccaccgagtgttttctggagttgactaacacacccacctggcgcgccgcaactgaatcagagataggaagtcaatcagtgcaagtttgtaagataagctagcttgcccgttattctggtttggaagtcaaaatagttcgttcaacttagcctaggcagttgacggttttgttgtgtttctgagggactctgatacgaaaatcaaattccctttgttctgtgtttggcgctgcaacctgtaaatggagtgctttttttttgcgtaccgtgatatctgcgttttggaatactataatatcagaatttggagcgtgtttcgccatgctcgcctcacttgattgggc

SEQ ID NO: 22819 - DNA, 1706 bp, Zea Mays
acgccccaccccgctcggcctccagtccagctccaccgctttcacccgctccgctccgtttccgtcgctcccgtcccaaggagccgcgccacgcgagagggggccacggacggtggcagttttctgtttcggtgggcggggacgtcgtcgaccgaccgaccggagcggaaggccggagatgatggaggagggggcgcccgatctgcgagagctcgtgcgcctgccggatgttctcgtggtatgctcatctactggatggacagatgaaaagcacatgctttatcttcgattattggaagaaacatttgtgcaccaattacatggaagtggttgcatttttaagggactgtttaattgctctccaagatattgtaggcaaatgaaatcatctaagcaaattgttaaatacactacgcctggtcagcaggggtgtgccatagttgagggtggcaaagtcaagtcctgcataaaggctgagcatgttgagtcaccttcctgttgtggaaatcagcaagatgaaaaagttcgttccctggaagataatgcatcaaccactaagcccatggaaaaagccacttcccatgcaagggcagcaagcccaggacaagcttccacgtgctatgttggcaaacacagacattctccttccagaagtgcaggtagggggtatccattggatgtccttttgcaaatgctgttgcatatcgatctgtagttactccaaaaaggaagaaaaactatttccaaattttgattgtcttctattagattattgcaaaacaaagcaacaaatgatttccccaaatctgctttttattaaggaaaaaaaacattttccctggctgtctgccttgttttgtttaaagtataagctgttaatattgtttgtgggctggaaaaaaggcatcatctttccagtgtcttgttttcttatctttctgagatctgaccagtagaagtacaccttgggaattatgccatgtgtttcttcatatccagattatgaacaccagatatttataggtattaagttcatttacttgagtgacgtggccagatttttaaaagagaactactcgtgcatttactcagaggggtcggatcagaactttgatgaggaaacccaagggactggagaatcaaaacatgaatacaacccgaagcgactgaaatctgctgatggcacaagggatcatcaggttgtgaatgcagaagctcatcaggtgggctgccttgatgtgagtgacaaaaatagcgagaacttcagtgcatcgtcaaaagtgcttgctgcatcacttgatgttgaagctgggtctccctccggcgactgcaaggatcatggaccaaaaggataatgcaatgtccaccgagtgttttctggagttgactaacacacccacctggcgcgccgcaactgaatcagagataggaagtcaatcagtgcaagtttgtaagataagctagcttgcccgttattctggtttggaagtcaaaatagttcgttcaacttagcctaggcagttgacggttttgttgtgtttctgagggactctgatacgaaaatcaaattccctttgttctgtgtttggcgctgcaacctgtaaatggagtgctttttttttgcgtaccgtgatatctgcgttttggaatactataatatcagaatttggagcgtgtttcgccatgctcgcctcacttgattgggc

SEQ ID NO: 22820 - DNA, 1342 bp, Zea Mays
acgccccaccccgctcggcctccagtccagctccaccgctttcacccgctccgctccgtttccgtcgctcccgtcccaaggagccgcgccacgcgagagggggccacggacggtggcagttttctgtttcggtgggcggggacgtcgtcgaccgaccgaccggagcggaaggccggagatgatggaggagggggcgcccgatctgcgagagctcgtgcgcctgccggatgttctcgtggtatgctcatctactggatggacagatgaaaagcacatgctttatcttcgattattggaagaaacatttgtgcaccaattacatggaagtggttgcatttttaagggactgtttaattgctctccaagatattgtaggcaaatgaaatcatctaagcaaattgttaaatacactacgcctggtcagcaggggtgtgccatagttgagggtggcaaagtcaagtcctgcataaaggctgagcatgttgagtcaccttcctgttgtggaaatcagcaagatgaaaaagttcgttccctggaagataatgcatcaaccactaagcccatggaaaaagccacttcccatgcaagggcagcaagcccaggacaagcttccacgtgctatgttggcaaacacagacattctccttccagaagtgcaggtattaagttcatttacttgagtgacgtggccagatttttaaaagagaactactcgtgcatttactcagaggggtcggatcagaactttgatgaggaaacccaagggactggagaatcaaaacatgaatacaacccgaagcgactgaaatctgctgatggcacaagggatcatcaggttgtgaatgcagaagctcatcaggtgggctgccttgatgtgagtgacaaaaatagcgagaacttcagtgcatcgtcaaaagtgcttgctgcatcacttgatgttgaagctgggtctccctccggcgactgcaaggatcatggaccaaaaggataatgcaatgtccaccgagtgttttctggagttgactaacacacccacctggcgcgccgcaactgaatcagagataggaagtcaatcagtgcaagtttgtaagataagctagcttgcccgttattctggtttggaagtcaaaatagttcgttcaacttagcctaggcagttgacggttttgttgtgtttctgagggactctgatacgaaaatcaaattccctttgttctgtgtttggcgctgcaacctgtaaatggagtgctttttttttgcgtaccgtgatatctgcgttttggaatactataatatcagaatttggagcgtgtttcgccatgctcgcctcacttgattgggc

SEQ ID NO: 22821 - DNA, 7099 bp, Zea Mays
ccgatggctaaccagtaactaaaattaacgtgcctgtgcactcctcccgctatctttacttatcaatcgtcttgattacatatagcttattcgcctgatcgaactgcctgacgtggtcctcctatgcgtcagtaactaggattaggttgggctcgagagaaggaacgggaagaacgaggccgacgagaactgggaaggcatggcgatggggttagaggacggcgagtacggtgccttcatggagaaattcaagatgctgccttcgcaatctcagcatcagcagcagctcccgcttcacggcctcaccttcgctatcaaagacatcttcgacatcggcggccgtgtcactgggttcggcaacccggactgggcgaggacgcatgcccccgccggcgccacctcccccgtcgtcctggcggcgctggccgccggcgccatcagcatcggcaagaccgtcatggatgagatggcctacagctgacgaggccactgagatccagttcaactttcacagcataaatggggagaacgcgcactatggcacgccgactaatccgtgcgctcctgatagagtccctggaggatcctccagtggatcagctgttgcagttgctgcaaaactcgtcgacttcgctctgggcactgacactggaggtagtgtgagggtacctgctgcctattgtggcatatttggactcaggccttcccatggattggtttcgacagaaaatgtcattccaatgtcacagatgtttgacactgttggatggtttgctagagatttatctatgttatcttgtgtaagcaacgtgttgttgccactagctgctgacaacactatcaagcaaccaactcatgttacaattcctaaagactgttttgaaatcttaggctctctgagtgaccaaacatatcagattctcaatgcttcggtagctaagagatttggtaacgatgcagtagacaataggaaccttggtgagttcgtctccgccaatgttccaactgttgggaaattcattagcgacttctccagaagcgaagcaccatctgtacctgctctatctgttatttcatatgtcatgcgatgcctccaaaggtctgaattcaaagctaaccatggagagtgggtcaaaactgtaaaacctaacctaggccctggcatccgagagcgggtgcatgaagccattgcatcagaagatggacccatggaggattttcatgttctgaagactgaattcaagtcggcgctttctgctcttatcaaggatgatgggatccttgcgataccgacagttcctggttctccgccaaagctgcgcatggaggctgttgcattagaaaacttccgcgcaagagcattttcattgctgtccatcgccggactatctgggttttgccagctgagcattccacttggagtgcgccatggtgttccagtgtcagtctccctagtggcatgccatggtgcggaccgtttcctcctgagtgtggctcaggagctgtatgggacgctcaaacaggagaccaagaaagcctggagctggagttcatcagactcctctctctgagccatcaatcatgattcatatgcaaagttcaggttccaccggctctcgctcgctccgtgtcctgcacgactgcttgttgatctactctagtagatgtcgatgtggcacaggcgcactcgatccatgtgtaccgaggagacaatatgttttgccacgtaggcacatactacaatttgctgtttctgtatgcatatggtgatagagagtgcctactacaaattcaggcatgttggaaattggatctctggatttcaatatgacagcagcaagtccaaaaatcgtggaataggaatttgtgtgtgaataatttgtgcataaaagggcacagaaaactgttgatatcagtatatgtgtgagaaatggtggaactcaaaagaaaatttgttcagatactcgagtttaacatttggtacatgtaaaatagtacatcacggtggactgctatctagtgtaccagcgccgcttcgtggggcgggaatgagacactagacctgtttagtttactacctaatttaccatattttgtctattttttctgcttaaatttagtttttcaatttagacgactaaccttagacaaaatgtgcacagttagtcgcgagccaaacaagcccatggttcgtttggtaactgtggtacgccgtacgcggatgaccatcgaaggaagagatgacttaatttcaacgtgtttggtctaaggaatggtgtggtccattaccttgttactggtcgtttttttttgtttggtttgtgaaatgaaatgaattgatccatcatcatttcattccttatagtctaataattagtaataatatgagaattaagtttattctattaatctatggaaaagacccataatgaaataatacaccatctcatctagaattaattgattcctcaaaccaaacacttcttttggttttactttaattcatctcaatcccagttcacccagtggattcttccccgtttcagccttgttcattttgtccaactcccttgctttggaaataaaatgaataagacctcaccctatggacttagagtacatttggtagatacctagatttttacagagacgtttttagatccggattctcttagggctcgtttgggataaagagtaatgaagtggattgagggggctagaatcctccactacttaattttgaatagtgagggattctagccccctcaatcccctccattactctttatcccaaacgagcccttaatgaacgtttccctaaattctggctcataagaagaaacccttttcataaaaaacaaatgaataaaaatgtactttgattttttaagaactttacaggtgaagaataacttaagtaaatacatttttacttgttatacctgagcaagataattaaagaaatgataatcgctagtgtgtgcgaaggatcagaaaccaaaacgctcgaatccagcttgaagccgtttactaccacaaactttcaagccagaaacgtttcgtggctatagcgtttcttcagtttattttgagaaacggaaccgctcgccacgccagtccaaatgcagatttagacatgtttagtttgagggactaagaattagtctctccatttaagttatattagttagttacccgtgcgttgcaacgggacatagattatcatttaataaaatgttagtgcataatatatctagagcatacaagagatatagaaacacgaaggaaaaagacatggaatagtagtaagagaagtaacaatgccaaaccctaaaccttttatcattgatttagtcaaatccgcatgcaaactgtccatgacttgagtgacaagtagtacgatcagttgaaatctaaaatgaataaaaaaacctcgagtggttcatctattaagctcttggaagtttggcataagatgtatacaatttatctctcagaaagaaagaaaacaaaagagatcagttctctcatctattatgttctctcatctattatgtattgtatcatagtgatgtgaaatgaaatcttttcaaatacaacttgtttattacagttgatataagcatagggaatggagacgacaaaacatgtacacctttatcatattgtcacaacaaacatgtattggtgtgtatccatatatgaaccatgaaatcaaaactatgaactgaacaagctgagaatttcaacaaatgaaagaattgttgtcattcatcaagtagagttgacagaccaactaaccatatcctttctcaccgtgtgcattgcaaatgccacatcgtcacgtatcttgtaccatagagagagaaatttgcatgaaatcgtgtttttatatatagaaaaatgaaattttaattcctacaaactacaatagaactctttactgcaaaaagttgtgcatacacgatctatttccctaccattaagggcacacaataaattaaatgtggttttcaataacccaacgagaaatgcacatcaatgttaatcaatctaatactaaacatcaagcaaaaagtgatgtttagccatttttaggcgcaagcaaataaaaagtacctgaaggaatatatctagtatgaaattgaccctaagatgtgcaagtataaggaaatggctactacttttagctttatccaatagactatctttgaaggagtgaaatacgcaaacagtaagaatttatctagtggaggtgcacatagttgatcaccattttagtgaatctaacaaaacattcaattaccaaaaaaagagtaagaattgacttgacaaaaacatgccaattcactttttcacccataattctcctttgccaaaagcagcgcttgtgcaccattggacgattgagtggccaacaaacatttaagtataaaagagttctatttcaataaccaagtcagtttgttgcttttgcaaatctatttccacgacaagccaaatgttaatatgaagaaaaaaaatgggatgttcaacactccaacttaggcatttggatatggagtgcatggtggccagaacatttgagcaaattttttacatagtggacatttttaccactatcttgtcagagtattgtcaaaaaacaacactaagttgcagattaatttctatagcagtcatcaggttatttgatttgaaatgcaccatagaggatggaaggatcaaggaaaggctatctgatttttatggcttgaatgtttcatcttataaccatttattgagactgtctacaaccgttcaccctaattttggccccaaatatcccactatctcgccacgtcaaagtcagtgtatgaagaaagagtatatcgctgcgactgtttagagcctaaatggcctttctcgacaccattgcttaattttaatgaaacttatctcacgttgatggaatatgaagggcataatggtggaaaatgcaccatcagtaacaactgtcctaatgaaagtaaagaaattgacgagtcgaaactgaaagattgaagtattaaaaaattgttaggtataaatatatgtatcatgtgtaatgtagttctttttttaaaatggcaatagcttcgaatttattttcatgtctggttcacacacacacaaagacatcaaccctgccaccataatttttactatttaatgtaaaaagaaatgaaagagcatatgcatctcaaatttatattgaacagatgcagaaataaatcaaaaacataagatgatgagaaagcaaagtagcaaatgtctagtctatataatatgcttaaataatataacaagtaaaagttaccagcaatagcctttgtttgtgcagcaacaacgaccactgttgttcctacctctctctgaaaacaatctcacagagaatgaaaacatcacgtctgctagtgcaattgctgtttgcaagcaccacaaactaaagtgcttgagattcaggaaaaaataagagaggcacaccttaagatttgtgcagttgtttggaactgcatagagggattcatctgtgatgaatgttccaccaatgttaccatatatcagaaaatccatcaactctataaaccaaatactcaccagtactaaatctgtagcacacgaaatttcttatggttgcagagggggattgcaaggccgctgactccctaaaagatctgcacaccgattttcaggcagtcagtaggcatctcttaactgaaggtcaatgttctgaagttcatttgattcaccatcatatagctcaccaccccaatctaatgacgtccatgcctgtattgctcctaaaccaagcatagaatggaaacctttaaccaagtaggacatatgacagacctattaacagggtattggagaaaaatattattggagttgacatcagactaacttaccaagcaagaaactaccttatcaaactatgagatctgaattttaaataactgaatcaacattcattgtgccaatacaacgtgtgttgcccattgcaggcctctctgctccagccatatccacccttcatgcagacacagaatcgtcccactacaagcgaagcacgagcggaaccacctgaatcagacaccttcagaaggcagccttcagtgcaatcaacagttgagacgcgacagatcgagacgaaaaaatgtggacctctatatgaggttggggattgagtcggcgaggtgctcgtagtcggtgatgacctaccacagcgtgtcaacatcggcggccactgacacgtacgcgagcacccaccacgaccacgtcgcactgacgccgcacgccaagacagtgggtccggcctccggcacgcccgcgcgccctctgtggtagtgctggtggtcagcgcctcagtggtcccctgtggcggacgcagccgcggcggcgacggagcgcccgacaggggccgtgagagcacgaccacagcggagcggggagacacgacaacacgagggcagatacccgagaggaaggagcaatgtggcggccacagccgcaactgcgacaaagcacccagaaggggggcgcgagagcgcaatcgccacagagcggggaggcatgaccgcgtgagggctagggctcaggctcgggataccggattgtgcggcggcgagtgcggatcgagggggatgcgcggatggcggggtttggcggcggttccagggacggcgcgcgcgggttcggcggtggtttctgggaacgacgtgcacgacagattatgccgcgcccaatgctggcttgtgcagcagcgggtggccgggctctgggacggggcgtcggcgctcgggacggggatggggatggggatggcgcggccgcgaggtcgaggcgaggcggatttctgggcttggggacggggcgtcggcgctcggggtggggacgtgctgcagggatggcgcggtcatggtcgggctcgaggctcgtcggggctcggggatggggcgttggcgcttggggacggggcgtcgacgctcggggacggggatggcggtggcagggtcgggctgggggatcagcggggatggcgcgtgggtcggcggggatggagggggtgtcgttgtaa

SEQ ID NO: 22822 - DNA, 6816 bp, Zea Mays
cctatgcgtcagtaactaggattaggttgggctcgagagaaggaacgggaagaacgaggccgacgagaactgggaaggcatggcgatggggttagaggacggcgagtacggtgccttcatggagaaattcaagatgctgccttcgcaatctcagcatcagcagcagctcccgcttcacggcctcaccttcgctatcaaagacatcttcgacatcggcggccgtgtcactgggttcggcaacccggactgggcgaggacgcatgcccccgccggcgccacctcccccgtcgtcctggcggcgctggccgccggcgccatcagcatcggcaagaccgtcatggatgagatggcctacagcataaatggggagaacgcgcactatggcacgccgactaatccgtgcgctcctgatagagtccctggaggatcctccagtggatcagctgttgcagttgctgcaaaactcgtcgacttcgctctgggcactgacactggaggtagtgtgagggtacctgctgcctattgtggcatatttggactcaggccttcccatggattggtttcgacagaaaatgtcattccaatgtcacagatgtttgacactgttggctctctgagtgaccaaacatatcagattctcaatgcttcggtagctaagagatttggtaacgatgcagtagacaataggaaccttggtgagttcgtctccgccaatgttccaactgttgggaaattcattagcgacttctccagaagcgaagcaccatctgtacctgctctatctgttatttcatatgtcatgcgatgcctccaaaggtctgaattcaaagctaaccatggagagtgggtcaaaactgtaaaacctaacctaggccctggcatccgagagcgggtgcatgaagccattgcatcagaagatggacccatggaggattttcatgttctgaagactgaattcaagtcggcgctttctgctcttatcaaggatgatgggatccttgcgataccgacagttcctggttctccgccaaagctgcgcatggaggctgttgcattagaaaacttccgcgcaagagcattttcattgctgtccatcgccggactatctgggttttgccagctgagcattccacttggagtgcgccatggtgttccagtgtcagtctccctagtggcatgccatggtgcggaccgtttcctcctgagtgtggctcaggagctgtatgggacgctcaaacaggagaccaagaaagcctggagctggagttcatcagactcctctctctgagccatcaatcatgattcatatgcaaagttcaggttccaccggctctcgctcgctccgtgtcctgcacgactgcttgttgatctactctagtagatgtcgatgtggcacaggcgcactcgatccatgtgtaccgaggagacaatatgttttgccacgtaggcacatactacaatttgctgtttctgtatgcatatggtgatagagagtgcctactacaaattcaggcatgttggaaattggatctctggatttcaatatgacagcagcaagtccaaaaatcgtggaataggaatttgtgtgtgaataatttgtgcataaaagggcacagaaaactgttgatatcagtatatgtgtgagaaatggtggaactcaaaagaaaatttgttcagatactcgagtttaacatttggtacatgtaaaatagtacatcacggtggactgctatctagtgtaccagcgccgcttcgtggggcgggaatgagacactagacctgtttagtttactacctaatttaccatattttgtctattttttctgcttaaatttagtttttcaatttagacgactaaccttagacaaaatgtgcacagttagtcgcgagccaaacaagcccatggttcgtttggtaactgtggtacgccgtacgcggatgaccatcgaaggaagagatgacttaatttcaacgtgtttggtctaaggaatggtgtggtccattaccttgttactggtcgtttttttttgtttggtttgtgaaatgaaatgaattgatccatcatcatttcattccttatagtctaataattagtaataatatgagaattaagtttattctattaatctatggaaaagacccataatgaaataatacaccatctcatctagaattaattgattcctcaaaccaaacacttcttttggttttactttaattcatctcaatcccagttcacccagtggattcttccccgtttcagccttgttcattttgtccaactcccttgctttggaaataaaatgaataagacctcaccctatggacttagagtacatttggtagatacctagatttttacagagacgtttttagatccggattctcttagggctcgtttgggataaagagtaatgaagtggattgagggggctagaatcctccactacttaattttgaatagtgagggattctagccccctcaatcccctccattactctttatcccaaacgagcccttaatgaacgtttccctaaattctggctcataagaagaaacccttttcataaaaaacaaatgaataaaaatgtactttgattttttaagaactttacaggtgaagaataacttaagtaaatacatttttacttgttatacctgagcaagataattaaagaaatgataatcgctagtgtgtgcgaaggatcagaaaccaaaacgctcgaatccagcttgaagccgtttactaccacaaactttcaagccagaaacgtttcgtggctatagcgtttcttcagtttattttgagaaacggaaccgctcgccacgccagtccaaatgcagatttagacatgtttagtttgagggactaagaattagtctctccatttaagttatattagttagttacccgtgcgttgcaacgggacatagattatcatttaataaaatgttagtgcataatatatctagagcatacaagagatatagaaacacgaaggaaaaagacatggaatagtagtaagagaagtaacaatgccaaaccctaaaccttttatcattgatttagtcaaatccgcatgcaaactgtccatgacttgagtgacaagtagtacgatcagttgaaatctaaaatgaataaaaaaacctcgagtggttcatctattaagctcttggaagtttggcataagatgtatacaatttatctctcagaaagaaagaaaacaaaagagatcagttctctcatctattatgttctctcatctattatgtattgtatcatagtgatgtgaaatgaaatcttttcaaatacaacttgtttattacagttgatataagcatagggaatggagacgacaaaacatgtacacctttatcatattgtcacaacaaacatgtattggtgtgtatccatatatgaaccatgaaatcaaaactatgaactgaacaagctgagaatttcaacaaatgaaagaattgttgtcattcatcaagtagagttgacagaccaactaaccatatcctttctcaccgtgtgcattgcaaatgccacatcgtcacgtatcttgtaccatagagagagaaatttgcatgaaatcgtgtttttatatatagaaaaatgaaattttaattcctacaaactacaatagaactctttactgcaaaaagttgtgcatacacgatctatttccctaccattaagggcacacaataaattaaatgtggttttcaataacccaacgagaaatgcacatcaatgttaatcaatctaatactaaacatcaagcaaaaagtgatgtttagccatttttaggcgcaagcaaataaaaagtacctgaaggaatatatctagtatgaaattgaccctaagatgtgcaagtataaggaaatggctactacttttagctttatccaatagactatctttgaaggagtgaaatacgcaaacagtaagaatttatctagtggaggtgcacatagttgatcaccattttagtgaatctaacaaaacattcaattaccaaaaaaagagtaagaattgacttgacaaaaacatgccaattcactttttcacccataattctcctttgccaaaagcagcgcttgtgcaccattggacgattgagtggccaacaaacatttaagtataaaagagttctatttcaataaccaagtcagtttgttgcttttgcaaatctatttccacgacaagccaaatgttaatatgaagaaaaaaaatgggatgttcaacactccaacttaggcatttggatatggagtgcatggtggccagaacatttgagcaaattttttacatagtggacatttttaccactatcttgtcagagtattgtcaaaaaacaacactaagttgcagattaatttctatagcagtcatcaggttatttgatttgaaatgcaccatagaggatggaaggatcaaggaaaggctatctgatttttatggcttgaatgtttcatcttataaccatttattgagactgtctacaaccgttcaccctaattttggccccaaatatcccactatctcgccacgtcaaagtcagtgtatgaagaaagagtatatcgctgcgactgtttagagcctaaatggcctttctcgacaccattgcttaattttaatgaaacttatctcacgttgatggaatatgaagggcataatggtggaaaatgcaccatcagtaacaactgtcctaatgaaagtaaagaaattgacgagtcgaaactgaaagattgaagtattaaaaaattgttaggtataaatatatgtatcatgtgtaatgtagttctttttttaaaatggcaatagcttcgaatttattttcatgtctggttcacacacacacaaagacatcaaccctgccaccataatttttactatttaatgtaaaaagaaatgaaagagcatatgcatctcaaatttatattgaacagatgcagaaataaatcaaaaacataagatgatgagaaagcaaagtagcaaatgtctagtctatataatatgcttaaataatataacaagtaaaagttaccagcaatagcctttgtttgtgcagcaacaacgaccactgttgttcctacctctctctgaaaacaatctcacagagaatgaaaacatcacgtctgctagtgcaattgctgtttgcaagcaccacaaactaaagtgcttgagattcaggaaaaaataagagaggcacaccttaagatttgtgcagttgtttggaactgcatagagggattcatctgtgatgaatgttccaccaatgttaccatatatcagaaaatccatcaactctataaaccaaatactcaccagtactaaatctgtagcacacgaaatttcttatggttgcagagggggattgcaaggccgctgactccctaaaagatctgcacaccgattttcaggcagtcagtaggcatctcttaactgaaggtcaatgttctgaagttcatttgattcaccatcatatagctcaccaccccaatctaatgacgtccatgcctgtattgctcctaaaccaagcatagaatggaaacctttaaccaagtaggacatatgacagacctattaacagggtattggagaaaaatattattggagttgacatcagactaacttaccaagcaagaaactaccttatcaaactatgagatctgaattttaaataactgaatcaacattcattgtgccaatacaacgtgtgttgcccattgcaggcctctctgctccagccatatccacccttcatgcagacacagaatcgtcccactacaagcgaagcacgagcggaaccacctgaatcagacaccttcagaaggcagccttcagtgcaatcaacagttgagacgcgacagatcgagacgaaaaaatgtggacctctatatgaggttggggattgagtcggcgaggtgctcgtagtcggtgatgacctaccacagcgtgtcaacatcggcggccactgacacgtacgcgagcacccaccacgaccacgtcgcactgacgccgcacgccaagacagtgggtccggcctccggcacgcccgcgcgccctctgtggtagtgctggtggtcagcgcctcagtggtcccctgtggcggacgcagccgcggcggcgacggagcgcccgacaggggccgtgagagcacgaccacagcggagcggggagacacgacaacacgagggcagatacccgagaggaaggagcaatgtggcggccacagccgcaactgcgacaaagcacccagaaggggggcgcgagagcgcaatcgccacagagcggggaggcatgaccgcgtgagggctagggctcaggctcgggataccggattgtgcggcggcgagtgcggatcgagggggatgcgcggatggcggggtttggcggcggttccagggacggcgcgcgcgggttcggcggtggtttctgggaacgacgtgcacgacagattatgccgcgcccaatgctggcttgtgcagcagcgggtggccgggctctgggacggggcgtcggcgctcgggacggggatggggatggggatggcgcggccgcgaggtcgaggcgaggcggatttctgggcttggggacggggcgtcggcgctcggggtggggacgtgctgcagggatggcgcggtcatggtcgggctcgaggctcgtcggggctcggggatggggcgttggcgcttggggacggggcgtcgacgctcggggacggggatggcggtggcagggtcgggctgggggatcagcggggatggcgcgtgggtcggcggggatggagggggtgtcgttgtaa

SEQ ID NO: 22823 - DNA, 7328 bp, Zea Mays
cctatgcgtcagtaactaggattaggttgggctcgagagaaggaacgggaagaacgaggccgacgagaactgggaaggcatggcgatggggttagaggacggcgagtacggtgccttcatggagaaattcaagatgctgccttcgcaatctcagcatcagcagcagctcccgcttcacggcctcaccttcgctatcaaagacatcttcgacatcggcggccgtgtcactgggttcggcaacccggactgggcgaggacgcatgcccccgccggcgccacctcccccgtcgtcctggcggcgctggccgccggcgccatcagcatcggcaagaccgtcatggatgagatggcctacagcataaatggggagaacgcgcactatggcacgccgactaatccgtgcgctcctgatagagtccctggaggatcctccagtggatcagctgttgcagttgctgcaaaactcgtcgacttcgctctgggcactgacactggaggtagtgtgagggtacctgctgcctattgtggcatatttggactcaggccttcccatggattggtttcgacagaaaatgtcattccaatgtcacagatgtttgacactgttggatggtttgctagagatttatctatgttatcttgtgtaagcaacgtgttgttgccactagctgctgacaacactatcaagcaaccaactcatgttacaattcctaaagactgttttgaaatcttaggctctctgagtgaccaaacatatcagattctcaatgcttcggtagctaagagatttggtaacgatgcagtagacaataggaaccttggtgagttcgtctccgccaatgttccaactgttgggaaattcattagcgacttctccagaagcgaagcaccatctgtacctgctctatctgttatttcatatgtcatgcgatgcctccaaaggtttcacttacaacttattcaaactatgtagtagcaataatactaaatactatgcaatattgactacataatttattattcccacaatattaaaataaaaggtcgtaaagatatgctttgctgttgcccacattattgttcataaaacacactccctctaatatcagaatacgatatcaaaatctacattttggaagcattcttctattactagagggagtaaccaatataaatggacctgaagtggtatagtttggccttggccaacagtttatagaatataggttgttaatcagtaatcaccatgaagttctgcactgcactcacctcctcgagttacctatccatcttggatgaggaaatttaaacatgaacatccttttcaggtctgaattcaaagctaaccatggagagtgggtcaaaactgtaaaacctaacctaggccctggcatccgagagcgggtgcatgaagccattgcatcagaagatggacccatggaggattttcatgttctgaagactgaattcaagtcggcgctttctgctcttatcaaggatgatgggatccttgcgataccgacagttcctggttctccgccaaagctgcgcatggaggctgttgcattagaaaacttccgcgcaagagcattttcattgctgtccatcgccggactatctgggttttgccagctgagcattccacttggagtgcgccatggtgttccagtgtcagtctccctagtggcatgccatggtgcggaccgtttcctcctgagtgtggctcaggagctgtatgggacgctcaaacaggagaccaagaaagcctggagctggagttcatcagactcctctctctgagccatcaatcatgattcatatgcaaagttcaggttccaccggctctcgctcgctccgtgtcctgcacgactgcttgttgatctactctagtagatgtcgatgtggcacaggcgcactcgatccatgtgtaccgaggagacaatatgttttgccacgtaggcacatactacaatttgctgtttctgtatgcatatggtgatagagagtgcctactacaaattcaggcatgttggaaattggatctctggatttcaatatgacagcagcaagtccaaaaatcgtggaataggaatttgtgtgtgaataatttgtgcataaaagggcacagaaaactgttgatatcagtatatgtgtgagaaatggtggaactcaaaagaaaatttgttcagatactcgagtttaacatttggtacatgtaaaatagtacatcacggtggactgctatctagtgtaccagcgccgcttcgtggggcgggaatgagacactagacctgtttagtttactacctaatttaccatattttgtctattttttctgcttaaatttagtttttcaatttagacgactaaccttagacaaaatgtgcacagttagtcgcgagccaaacaagcccatggttcgtttggtaactgtggtacgccgtacgcggatgaccatcgaaggaagagatgacttaatttcaacgtgtttggtctaaggaatggtgtggtccattaccttgttactggtcgtttttttttgtttggtttgtgaaatgaaatgaattgatccatcatcatttcattccttatagtctaataattagtaataatatgagaattaagtttattctattaatctatggaaaagacccataatgaaataatacaccatctcatctagaattaattgattcctcaaaccaaacacttcttttggttttactttaattcatctcaatcccagttcacccagtggattcttccccgtttcagccttgttcattttgtccaactcccttgctttggaaataaaatgaataagacctcaccctatggacttagagtacatttggtagatacctagatttttacagagacgtttttagatccggattctcttagggctcgtttgggataaagagtaatgaagtggattgagggggctagaatcctccactacttaattttgaatagtgagggattctagccccctcaatcccctccattactctttatcccaaacgagcccttaatgaacgtttccctaaattctggctcataagaagaaacccttttcataaaaaacaaatgaataaaaatgtactttgattttttaagaactttacaggtgaagaataacttaagtaaatacatttttacttgttatacctgagcaagataattaaagaaatgataatcgctagtgtgtgcgaaggatcagaaaccaaaacgctcgaatccagcttgaagccgtttactaccacaaactttcaagccagaaacgtttcgtggctatagcgtttcttcagtttattttgagaaacggaaccgctcgccacgccagtccaaatgcagatttagacatgtttagtttgagggactaagaattagtctctccatttaagttatattagttagttacccgtgcgttgcaacgggacatagattatcatttaataaaatgttagtgcataatatatctagagcatacaagagatatagaaacacgaaggaaaaagacatggaatagtagtaagagaagtaacaatgccaaaccctaaaccttttatcattgatttagtcaaatccgcatgcaaactgtccatgacttgagtgacaagtagtacgatcagttgaaatctaaaatgaataaaaaaacctcgagtggttcatctattaagctcttggaagtttggcataagatgtatacaatttatctctcagaaagaaagaaaacaaaagagatcagttctctcatctattatgttctctcatctattatgtattgtatcatagtgatgtgaaatgaaatcttttcaaatacaacttgtttattacagttgatataagcatagggaatggagacgacaaaacatgtacacctttatcatattgtcacaacaaacatgtattggtgtgtatccatatatgaaccatgaaatcaaaactatgaactgaacaagctgagaatttcaacaaatgaaagaattgttgtcattcatcaagtagagttgacagaccaactaaccatatcctttctcaccgtgtgcattgcaaatgccacatcgtcacgtatcttgtaccatagagagagaaatttgcatgaaatcgtgtttttatatatagaaaaatgaaattttaattcctacaaactacaatagaactctttactgcaaaaagttgtgcatacacgatctatttccctaccattaagggcacacaataaattaaatgtggttttcaataacccaacgagaaatgcacatcaatgttaatcaatctaatactaaacatcaagcaaaaagtgatgtttagccatttttaggcgcaagcaaataaaaagtacctgaaggaatatatctagtatgaaattgaccctaagatgtgcaagtataaggaaatggctactacttttagctttatccaatagactatctttgaaggagtgaaatacgcaaacagtaagaatttatctagtggaggtgcacatagttgatcaccattttagtgaatctaacaaaacattcaattaccaaaaaaagagtaagaattgacttgacaaaaacatgccaattcactttttcacccataattctcctttgccaaaagcagcgcttgtgcaccattggacgattgagtggccaacaaacatttaagtataaaagagttctatttcaataaccaagtcagtttgttgcttttgcaaatctatttccacgacaagccaaatgttaatatgaagaaaaaaaatgggatgttcaacactccaacttaggcatttggatatggagtgcatggtggccagaacatttgagcaaattttttacatagtggacatttttaccactatcttgtcagagtattgtcaaaaaacaacactaagttgcagattaatttctatagcagtcatcaggttatttgatttgaaatgcaccatagaggatggaaggatcaaggaaaggctatctgatttttatggcttgaatgtttcatcttataaccatttattgagactgtctacaaccgttcaccctaattttggccccaaatatcccactatctcgccacgtcaaagtcagtgtatgaagaaagagtatatcgctgcgactgtttagagcctaaatggcctttctcgacaccattgcttaattttaatgaaacttatctcacgttgatggaatatgaagggcataatggtggaaaatgcaccatcagtaacaactgtcctaatgaaagtaaagaaattgacgagtcgaaactgaaagattgaagtattaaaaaattgttaggtataaatatatgtatcatgtgtaatgtagttctttttttaaaatggcaatagcttcgaatttattttcatgtctggttcacacacacacaaagacatcaaccctgccaccataatttttactatttaatgtaaaaagaaatgaaagagcatatgcatctcaaatttatattgaacagatgcagaaataaatcaaaaacataagatgatgagaaagcaaagtagcaaatgtctagtctatataatatgcttaaataatataacaagtaaaagttaccagcaatagcctttgtttgtgcagcaacaacgaccactgttgttcctacctctctctgaaaacaatctcacagagaatgaaaacatcacgtctgctagtgcaattgctgtttgcaagcaccacaaactaaagtgcttgagattcaggaaaaaataagagaggcacaccttaagatttgtgcagttgtttggaactgcatagagggattcatctgtgatgaatgttccaccaatgttaccatatatcagaaaatccatcaactctataaaccaaatactcaccagtactaaatctgtagcacacgaaatttcttatggttgcagagggggattgcaaggccgctgactccctaaaagatctgcacaccgattttcaggcagtcagtaggcatctcttaactgaaggtcaatgttctgaagttcatttgattcaccatcatatagctcaccaccccaatctaatgacgtccatgcctgtattgctcctaaaccaagcatagaatggaaacctttaaccaagtaggacatatgacagacctattaacagggtattggagaaaaatattattggagttgacatcagactaacttaccaagcaagaaactaccttatcaaactatgagatctgaattttaaataactgaatcaacattcattgtgccaatacaacgtgtgttgcccattgcaggcctctctgctccagccatatccacccttcatgcagacacagaatcgtcccactacaagcgaagcacgagcggaaccacctgaatcagacaccttcagaaggcagccttcagtgcaatcaacagttgagacgcgacagatcgagacgaaaaaatgtggacctctatatgaggttggggattgagtcggcgaggtgctcgtagtcggtgatgacctaccacagcgtgtcaacatcggcggccactgacacgtacgcgagcacccaccacgaccacgtcgcactgacgccgcacgccaagacagtgggtccggcctccggcacgcccgcgcgccctctgtggtagtgctggtggtcagcgcctcagtggtcccctgtggcggacgcagccgcggcggcgacggagcgcccgacaggggccgtgagagcacgaccacagcggagcggggagacacgacaacacgagggcagatacccgagaggaaggagcaatgtggcggccacagccgcaactgcgacaaagcacccagaaggggggcgcgagagcgcaatcgccacagagcggggaggcatgaccgcgtgagggctagggctcaggctcgggataccggattgtgcggcggcgagtgcggatcgagggggatgcgcggatggcggggtttggcggcggttccagggacggcgcgcgcgggttcggcggtggtttctgggaacgacgtgcacgacagattatgccgcgcccaatgctggcttgtgcagcagcgggtggccgggctctgggacggggcgtcggcgctcgggacggggatggggatggggatggcgcggccgcgaggtcgaggcgaggcggatttctgggcttggggacggggcgtcggcgctcggggtggggacgtgctgcagggatggcgcggtcatggtcgggctcgaggctcgtcggggctcggggatggggcgttggcgcttggggacggggcgtcgacgctcggggacggggatggcggtggcagggtcgggctgggggatcagcggggatggcgcgtgggtcggcggggatggagggggtgtcgttgtaa

SEQ ID NO: 22824 - DNA, 2417 bp, Zea Mays
ggcacaacagccacccgcgaccccaagtcccgatcggccgccgatcccgatcccgatcccgaccccacctccctggctccacagcacccctgctccacacacacggccgccagcaagccgccggccctaggccctaccgtcgcagcgtcgcctgcttgactatctgcctccagccctccagcaagacttcagtcgcctgccccagcctggctgccgccgccctccagcaaggcagcaaacgccggcctccggccgcccgtccctaggccagaggccacccctaggccgctaggcttccaccgccgacgcccacagaaaccgtaggcgccaccaggccaccacgagatccctgccgtgacggagaatggaggccgccgcggccgtcctccccacgctggtgccctccgggagcgcggtggtgtctcgtcgctcatcgctcgcgaccgttgttcctctggtctgctgcgggttgctgcacatggatcgctcactgtgtacttgtgtgctcgctctttgctgcgcaggtggtggtgctcctcgcctacctcgggtatctcgccgccgctggagccatcctcccagggaagctcgtcgacggagccctactcccggactcctctcgcctccactatcgctgcaacggtttgctctcgctcctgctgctgctgggactctcggcgttcggtgtctacatggggtggatgtctcccacggttgtagctgacatgggactcgaacttctgtcagtgacctttatttttagtgtcattgtttcttttgcactctacattgccggcatcaagtccggccacaaaagttcttctttgagaccacatgttagtgggagcttcatgcaagattggtggtttggagtgcaacttaatcctcattttatggaagttgacctcaaattcttctttgtgagggcaggaatgatggcatggttatttattaacctctctttgtttgcaaagagctactttgctggttcagccaatctttcggtcattctctaccaatttttttgtgcgtggtatatcattgattacttcgtccatgaagaattcatgacctcaacgtgggacattattgctgaaagactgggtttcatgctggtgtttggtgatctagttttcatccctttcaccttcactattcaggtatcctacattcctgcaaatgttgacccatggtgctagctattgaataccttatttttgagaaaaaacatagaataccttattaccttaggcacactatcctaccctaacattgatttgattttggcgtttcctaattgtcagatttgtggctcagatcactgcttctcttacattaaaacagtaggctgagaattaagctaatcaacaagtatgatttgtttgtcaggggtggtggcttttgaagaacaaagtagagctgtcccttttgtctggtctagctaacttatgcatctttcttattgggtactcttggtttttctccagaatatcaaagctatagcaatttgatatatacctgtttcttgcattgtaactttgttgtctacatgctataccatgtggcatgtggtactcagctacctagtgttccgaggagctaacaagcaaaaacatgtgttcaagaaggaccccaaagctcctatatggggaaaacctcccaaagttgtcgggggaaagctactagcatctggttactggggcatcgcaaggcactgcaattatctcggagacctgctgctagcactttcgttcagcttgccctgtggagtgagttccgtggtcccatacttctaccccacgtacctgctcattctactggtcttgagggaaaggcgcgatgaggcgaggtgctcgcagaagtacagggagatctgggcagagtactgcaagctcgtgccgtggaggatcctgccttatgtgtactgaagagacggtagaaaccaaggcagctcatggccctgggccagctgtaaaccttattttgtttgcccttaaccagttggtgaatgttgatgtagcactcggtaaactgtgaccgtgcaaacttttgttattgttggtccatacatgtttggaatcgtgaatcagaccgcctcacttggtggcatattattccctttagcgcttgcttgggagctaggacccgagaggattgaaggggttaaaattttcttgttattcaatattgaatattaaggaaattttagtgactttaatcctctccggtatccttgctctcaaataagcccttagttatgtataatctaaatattatgttattgttcttcaaacattagatacatctaagaaatttattcatacaatctaatatgttgaagtcttgtattttatttactaaaactccttaagatatagcttatttatatgagttgtatgagtttaactggatctaga

SEQ ID NO: 22825 - DNA, 2004 bp, Zea Mays
caacagccacccgcgaccccaagtcccgatcggccgccgatcccgatcccgatcccgaccccacctccctggctccacagcacccctgctccacacacacggccgccagcaagccgccggccctaggccctaccgtcgcagcgtcgcctgcttgactatctgcctccagccctccagcaagacttcagtcgcctgccccagcctggctgccgccgccctccagcaaggcagcaaacgccggcctccggccgcccgtccctaggccagaggccacccctaggccgctaggcttccaccgccgacgcccacagaaaccgtaggcgccaccaggccaccacgagatccctgccgtgacggagaatggaggccgccgcggccgtcctccccacgctggtgccctccgggagcgcggtggtgtctcgtcgctcatcgctcgcgaccgttgttcctctggtggtggtgctcctcgcctacctcgggtatctcgccgccgctggagccatcctcccagggaagctcgtcgacggagccctactcccggactcctctcgcctccactatcgctgcaacggtttgctctcgctcctgctgctgctgggactctcggcgttcggtgtctacatggggtggatgtctcccacggttgtagctgacatgggactcgaacttctgtcagtgacctttatttttagtgtcattgtttcttttgcactctacattgccggcatcaagtccggccacaaaagttcttctttgagaccacatgttagtgggagcttcatgcaagattggtggtttggagtgcaacttaatcctcattttatggaagttgacctcaaattcttctttgtgagggcaggaatgatggcatggttatttattaacctctctttgtttgcaaagagctactttgctggttcagccaatctttcggtcattctctaccaatttttttgtgcgtggtatatcattgattacttcgtccatgaagaattcatgacctcaacgtgggacattattgctgaaagactgggtttcatgctggtgtttggtgatctagttttcatccctttcaccttcactattcaggggtggtggcttttgaagaacaaagtagagctgtcccttttgtctggtctagctaacttatgcatctttcttattggctacctagtgttccgaggagctaacaagcaaaaacatgtgttcaagaaggaccccaaagctcctatatggggaaaacctcccaaagttgtcgggggaaagctactagcatctggttactggggcatcgcaaggcactgcaattatctcggagacctgctgctagcactttcgttcagcttgccctgtggagtgagttccgtggtcccatacttctaccccacgtacctgctcattctactggtcttgagggaaaggcgcgatgaggcgaggtgctcgcagaagtacagggagatctgggcagagtactgcaagctcgtgccgtggaggatcctgccttatgtgtactgaagagacggtagaaaccaaggcagctcatggccctgggccagctgtaaaccttattttgtttgcccttaaccagttggtgaatgttgatgtagcactcggtaaactgtgaccgtgcaaacttttgttattgttggtccatacatgtttggaatcgtgaatcagaccgcctcacttggtggcatattattccctttagcgcttgcttgggagctaggacccgagaggattgaaggggttaaaattttcttgttattcaatattgaatattaaggaaattttagtgactttaatcctctccggtatccttgctctcaaataagcccttagttatgtataatctaaatattatgttattgttcttcaaacattagatacatctaagaaatttattcatacaatctaatatgttgaagtcttgtattttatttactaaaactccttaagatatagcttatttatatgagttgtatgagtttaactggatctaga

SEQ ID NO: 22826 - DNA, 1914 bp, Zea Mays
caacagccacccgcgaccccaagtcccgatcggccgccgatcccgatcccgatcccgaccccacctccctggctccacagcacccctgctccacacacacggccgccagcaagccgccggccctaggccctaccgtcgcagcgtcgcctgcttgactatctgcctccagccctccagcaagacttcagtcgcctgccccagcctggctgccgccgccctccagcaaggcagcaaacgccggcctccggccgcccgtccctaggccagaggccacccctaggccgctaggcttccaccgccgacgcccacagaaaccgtaggcgccaccaggccaccacgagatccctgccgtgacggagaatggaggccgccgcggccgtcctccccacgctggtgccctccgggagcgcggtggtggtgctcctcgcctacctcgggtatctcgccgccgctggagccatcctcccagggaagctcgtcgacggagccctactcccggactcctctcgcctccactatcgctgcaacggtttgctctcgctcctgctgctgctgggactctcggcgttcggtgtctacatggggtggatgtctcccacggttgtagctgacatgggactcgaacttctgtcagtgacctttatttttagtgtcattgtttcttttgcactctacattgccggcatcaagtccggccacaaaagttcttctttgagaccacatgttagtgggagcttcatgcaagattgattcttctttgtgagggcaggaatgatggcatggttatttattaacctctctttgtttgcaaagagctactttgctggttcagccaatctttcggtcattctctaccaatttttttgtgcgtggtatatcattgattacttcgtccatgaagaattcatgacctcaacgtgggacattattgctgaaagactgggtttcatgctggtgtttggtgatctagttttcatccctttcaccttcactattcaggggtggtggcttttgaagaacaaagtagagctgtcccttttgtctggtctagctaacttatgcatctttcttattggctacctagtgttccgaggagctaacaagcaaaaacatgtgttcaagaaggaccccaaagctcctatatggggaaaacctcccaaagttgtcgggggaaagctactagcatctggttactggggcatcgcaaggcactgcaattatctcggagacctgctgctagcactttcgttcagcttgccctgtggagtgagttccgtggtcccatacttctaccccacgtacctgctcattctactggtcttgagggaaaggcgcgatgaggcgaggtgctcgcagaagtacagggagatctgggcagagtactgcaagctcgtgccgtggaggatcctgccttatgtgtactgaagagacggtagaaaccaaggcagctcatggccctgggccagctgtaaaccttattttgtttgcccttaaccagttggtgaatgttgatgtagcactcggtaaactgtgaccgtgcaaacttttgttattgttggtccatacatgtttggaatcgtgaatcagaccgcctcacttggtggcatattattccctttagcgcttgcttgggagctaggacccgagaggattgaaggggttaaaattttcttgttattcaatattgaatattaaggaaattttagtgactttaatcctctccggtatccttgctctcaaataagcccttagttatgtataatctaaatattatgttattgttcttcaaacattagatacatctaagaaatttattcatacaatctaatatgttgaagtcttgtattttatttactaaaactccttaagatatagcttatttatatgagttgtatgagtttaactggatctaga

SEQ ID NO: 22827 - DNA, 2338 bp, Zea Mays
caacagccacccgcgaccccaagtcccgatcggccgccgatcccgatcccgatcccgaccccacctccctggctccacagcacccctgctccacacacacggccgccagcaagccgccggccctaggccctaccgtcgcagcgtcgcctgcttgactatctgcctccagccctccagcaagacttcagtcgcctgccccagcctggctgccgccgccctccagcaaggcagcaaacgccggcctccggccgcccgtccctaggccagaggccacccctaggccgctaggcttccaccgccgacgcccacagaaaccgtaggcgccaccaggccaccacgagatccctgccgtgacggagaatggaggccgccgcggccgtcctccccacgctggtggtggtgctcctcgcctacctcgggtatctcgccgccgctggagccatcctcccagggaagctcgtcgacggagccctactcccggactcctctcgcctccactatcgctgcaacggtttgctctcgctcctgctgctgctgggactctcggcgttcggtgtctacatggggtggatgtctcccacggttgtagctgacatgggactcgaacttctgtcagtgacctttatttttagtgtcattgtttcttttgcactctacattgccggcatcaagtccggccacaaaagttcttctttgagaccacatgtggtttggagtgcaacttaatcctcattttatggaagttgacctcaaattcttctttgtgagggcaggaatgatggcatggttatttattaacctctctttgtttgcaaagagctactttgctggttcagccaatctttcggtcattctctaccaatttttttgtgcggtattggacatgaccatcttcttaactgatcatctttcagcccattagttgttaaattaattatacttttccatgcagtggtatatcattgattacttcgtccatgaagaattcatgacctcaacgtgggacattattgctgaaagactgggtttcatgctggtgtttggtgatctagttttcatccctttcaccttcactattcaggtatcctacattcctgcaaatgttgacccatggtgctagctattgaataccttatttttgagaaaaaacatagaataccttattaccttaggcacactatcctaccctaacattgatttgattttggcgtttcctaattgtcagatttgtggctcagatcactgcttctcttacattaaaacagtaggctgagaattaagctaatcaacaagtatgatttgtttgtcaggggtggtggcttttgaagaacaaagtagagctgtcccttttgtctggtctagctaacttatgcatctttcttattgggtactcttggtttttctccagaatatcaaagctatagcaatttgatatatacctgtttcttgcattgtaactttgttgtctacatgctataccatgtggcatgtggtactcagctacctagtgttccgaggagctaacaagcaaaaacatgtgttcaagaaggaccccaaagctcctatatggggaaaacctcccaaagttgtcgggggaaagctactagcatctggttactggggcatcgcaaggcactgcaattatctcggagacctgctgctagcactttcgttcagcttgccctgtggagtgagttccgtggtcccatacttctaccccacgtacctgctcattctactggtcttgagggaaaggcgcgatgaggcgaggtgctcgcagaagtacagggagatctgggcagagtactgcaagctcgtgccgtggaggatcctgccttatgtgtactgaagagacggtagaaaccaaggcagctcatggccctgggccagctgtaaaccttattttgtttgcccttaaccagttggtgaatgttgatgtagcactcggtaaactgtgaccgtgcaaacttttgttattgttggtccatacatgtttggaatcgtgaatcagaccgcctcacttggtggcatattattccctttagcgcttgcttgggagctaggacccgagaggattgaaggggttaaaattttcttgttattcaatattgaatattaaggaaattttagtgactttaatcctctccggtatccttgctctcaaataagcccttagttatgtataatctaaatattatgttattgttcttcaaacattagatacatctaagaaatttattcatacaatctaatatgttgaagtcttgtattttatttactaaaactccttaagatatagcttatttatatgagttgtatgagtttaactggatctaga

SEQ ID NO: 22828 - DNA, 1299 bp, Zea Mays
gcagcgatgaacggtcaaggtcgatcctcgcaacagtgccgtgcggcgcccgctcctcctaccctcgcccgccctatataagcgctactcgtgttttccctcttccccctcgtccaaaaccctagccctcgcgccgccgccgccgtgcccagcgctcgagctcctcgcctgccgcgagctcgcgccgcaacgccaccatgaagttcaacatcgcgaacccgtctaccgggtgccagaagaagctggaaatcgatgacgaccagaaactacgtgccttttatgaccgaaggatctcccaggaggtcagtggtgatgctctgggagtttaagggttatgtcttcaagatcatgggtggatgtgacaaacaaggcttcccaatgaagcaaggagttctgacttctggtcgtgtccgccttctgctccacagaggcactccctgcttccgcggttatggcaggcgtaatggtgagcgcaggaggaagtctgtccgtggttgtattgtgagccaagacctatctgttatcaacttggtaattgttaagaagggtgagaacgatctgcctggtttaactgacactgagaagccaaggatgaggggtcccaaaagggcctccaagatcaggaagctgttcaatcttgcaaaggatgacgacgtgcgcaagtacgtgaacacgtaccgcaggacattcactaccaagaatggcaagaaggtgagcaaggcacctaagatccagcggcttgtgacccccttgaccctccagaggaagcgtgctagaattgctgacaagaagaagaggatcgctaagaagaagtctgaggctgctgagtaccagaagcttcttgcccagaggctgaaagaacagagggaccgccgcagtgagagcttggccaagaggaggtctaagctttctgccgccgccaaggcttctgctgccacctctgcctaagaatgatcagtgctttgagatgttttcaaggcctattttgttacagcttataagtaccttatgctgccctggctgtgttgcatcagtcgaccctccctacttagacttatgagtaattgttgcaattttgtatggacatggtactggcttgtcgggattttttgagtaccagaggtttgatatgttgttttattctgtgaacgtcagctagccttgttcttttgtctgcagtctgcaccatatgttgaactgctggattttttctgcttggttctatgtggcgttaaccttgtatactgcgttgctgcttcgtgcgtgataatagtcttgacgctgcacactgtttgatta

SEQ ID NO: 22829 - DNA, 1303 bp, Zea Mays
gcagcgatgaacggtcaaggtcgatcctcgcaacagtgccgtgcggcgcccgctcctcctaccctcgcccgccctatataagcgctactcgtgttttccctcttccccctcgtccaaaaccctagccctcgcgccgccgccgccgtgcccagcgctcgagctcctcgcctgccgcgagctcgcgccgcaacgccaccatgaagtcaacatcgcgaacccgtctaccgggtgccagaagaagctggaaatcgatgacgaccagaaactacgtgccttttatgaccgaaggatctcccaggaggtcagtggtgatgctctgggtgaggagtttaagggttatgtcttcaagatcatgggtggatgtgacaaacaaggcttcccaatgaagcaaggagttctgacttctggtcgtgtccgccttctgctccacagaggcactccctgcttccgcggttatggcaggcgtaatggtgagcgcaggaggaagtctgtccgtggttgtattgtgagccaagacctatctgttatcaacttggtaattgttaagaagggtgagaacgatctgcctggtttaactgacactgagaagccaaggatgaggggtcccaaaagggcctccaagatcaggaagctgttcaatcttgcaaaggatgacgacgtgcgcaagtacgtgaacacgtaccgcaggacattcactaccaagaatggcaagaaggtgagcaaggcacctaagatccagcggcttgtgacccccttgaccctccagaggaagcgtgctagaattgctgacaagaagaagaggatcgctaagaagaagtctgaggctgctgagtaccagaagcttcttgcccagaggctgaaagaacagagggaccgccgcagtgagagcttggccaagaggaggtctaagctttctgccgccgccaaggcttctgctgccacctctgcctaagaatgatcagtgctttgagatgttttcaaggcctattttgttacagcttataagtaccttatgctgccctggctgtgttgcatcagtcgaccctccctacttagacttatgagtaattgttgcaattttgtatggacatggtactggcttgtcgggattttttgagtaccagaggtttgatatgttgttttattctgtgaacgtcagctagccttgttcttttgtctgcagtctgcaccatatgttgaactgctggattttttctgcttggttctatgtggcgttaaccttgtatactgcgttgctgcttcgtgcgtgataatagtcttgacgctgcacactgtttgatta

SEQ ID NO: 22830 - DNA, 593 bp, Zea Mays
gaatcggcagcttctgtggacccctctcccactcccctccggccctcccctcccacctcacatcccttcttgcttctcgcctccccacccttcatccacccgccgctcctcaagccccaagctccggcgatatgtcacgcttcggtcgatccggtccgccgccgccgatccgcgacacatattcactcctcgtcctcaacatcaccttccgcacgactgctgatgacctcttcccgctcttcgacaagtacggcgagattgtcgacatctacatcccaagggaccgcaggactggcgactcgcgcggattcgcgttcgtgaggtacaagtacgaggacgaggcacagaaggcagttgataggctcgatgggagattggtagacgggagggagatcatggtgcagtttgccaagtacggtccaaatgctgaacggattaataaagggagaataatggagccagttccaaggcccaggggccgttccagaagccgcagtccaagacggagttgtgtgccattgattgataagtgtcaatgcacttgtcacgtggagcatctgtgtgcaaaagtcatatttcatcttcagaattag

SEQ ID NO: 22831 - DNA, 546 bp, Zea Mays
tgtggacccctctcccactcccctccggccctcccctcccacctcacatcccttcttgcttctcgcctccccacccttcatccacccgccgctcctcaagccccaagctccggcgatatgtcacgcttcggtcgatccggtccgccgccgccgatccgcgacacatattcactcctcgtcctcaacatcaccttccgcacgactgctgatgacctcttcccgctcttcgacaagtacggcgagattgtcgacatctacatcccaagggaccgcaggactggcgactcgcgcggattcgcgttcgtgaggtacaagtacgaggacgaggcacagaaggcagttgataggctcgatgggagattggtagacgggagggagatcatggtgcagtttgccaagtacggtccaaatgctgaacggatgttggtacttcaataacaagaacacagtaaattgtcgtttcgttttagtgaatacgacatgtcctaattttccatgtaacttttcttgggactgagtaaggagcaaaaaaaaaacctagtgcca

SEQ ID NO: 22832 - DNA, 1803 bp, Zea Mays
tgtggacccctctcccactcccctccggccctcccctcccacctcacatcccttcttgcttctcgcctccccacccttcatccacccgccgctcctcaagccccaagctccggcgatatgtcacgcttcggtcgatccggtccgccgccgccgatccgcgacacatattcactcctcgtcctcaacatcaccttccgcacgactgctgatgacctcttcccgctcttcgacaagtacggcgagattgtcgacatctacatcccaagggaccgcaggactggcgactcgcgcggattcgcgttcgtgaggtacaagtacgaggacgaggcacagaaggcagttgataggctcgatgggagattggtagacgggagggagatcatggtgcagtttgccaagtacggtccaaatgctgaacggattaataaagggagaataatggagccagttccaaggcccaggggccgttccagaagccgcagtccaagacggaggtaccgtgatgattatcgagatgactaccaggatagagattatagaaggcgaagccgtagccagagtagagatagatacgcccgtgacaggtacagagatagggattaccgccatcgtagcctgagtcgcaggtacagtcctgatgattacaagaagcgtgggagagacagtttgtctcctgcacgaagaagccctagtcatagccgcagccgcagttacactcctgatgattacaagaggcgtggcaaagacagcagcgcatcacctgcaagtaggagccctagtcgctcccctcctcgcaagacgccaccttctcctaagagatctcctgtcaggcacaatgatgaccggtctccacgctcacggagcccttcaacataagcacaattcacttgcaaagcatcttgaacagctcaggatgaatggacttgctctgatcctatgtgtgtgtggctatgcttgtgctcaatggtgggcacttttcagttaaagttttgtagtgctgtctgtcagttgctgcctcaaacttggaatactacttctgtttggcacctgaactgcttatcaaaaactttatttacatggagtgaagatatgctggctgatatgcggtcaacatgcacgtagcttactgttgaagttgatataatctgtgctgtttgcgttgttgatgatgatggctgatgagatgatggaactgcagctgactgcacaatttgctgctgtctgcacctattatgctgacaacaatagaaggcgtggggagaagtttcagcgacagaaatgcctgactagttgattgatcttctggatctgaatgctgatgatttgcttcaaagacttagtctcatgtagtcatgtcatttgtggagtctgctgacccatcaggctctggattttgtaacacgaactttgatatgcttctgtgaaaaaaaatgggtaaccttacataagtgtttagacggtttagtggtgttctgctcttttctttacggtactgaaaaacattgactgttagttgggttgttaacctggttgaatgttatacacacttagttcagctgaattaaattgtttatttgattgttcgttgcgatatgagcgtattccctcctttcttttttaaatgtcgtcctcacacttatcgagatgttaatcatgctcaacttggatcaattagatacaagaaaataataatatttagaagatatattagtattattatatagatcattgattctgtttttatagtgaacctatttggagatacaaatattgctattttttacaaatcaagttaaatttaag

SEQ ID NO: 22833 - DNA, 1658 bp, Zea Mays
tgtggacccctctcccactcccctccggccctcccctcccacctcacatcccttcttgcttctcgcctccccacccttcatccacccgccgctcctcaagccccaagctccggcgatatgtcacgcttcggtcgatccggtccgccgccgccgatccgcgacacatattcactcctcgtcctcaacatcaccttccgcacgactgctgatgacctcttcccgctcttcgacaagtacggcgagattgtcgacatctacatcccaagggaccgcaggactggcgactcgcgcggattcgcgttcgtgaggtacaagtacgaggacgaggcacagaaggcagttgataggctcgatgggagattggtagacgggagggagatcatggtgcagtttgccaagtacggtccaaatgctgaacggattaataaagggagaataatggagccagttccaaggcccaggggccgttccagaagccgcagtccaagacggaggtaccgtgatgattatcgagatgactaccaggatagagattatagaaggcgaagccgtagccagagtagagatagatacgcccgtgacaggtacagagatagggattaccgccatcgtagcctgagtcgcagtttgtctcctgcacgaagaagccctagtcatagccgcagccgcagttacactcctgatgattacaagaggcgtggcaaagacagcagcgcatcacctgcaagtaggagccctagtcgctcccctcctcgcaagacgccaccttctcctaagagatctcctgtcaggcacaatgatgaccggtctccacgctcacggagcccttcaacataagcacaattcacttgcaaagcatcttgaacagctcaggatgaatggacttgctctgatcctatgtgtgtgtggctatgcttgtgctcaatgttacatggagtgaagatatgctggctgatatgcggtcaacatgcacgtagcttactgttgaagttgatataatctgtgctgtttgcgttgttgatgatgatggctgatgagatgatggaactgcagctgactgcacaatttgctgctgtctgcacctattatgctgacaacaatagaaggcgtggggagaagtttcagcgacagaaatgcctgactagttgattgatcttctggatctgaatgctgatgatttgcttcaaagacttagtctcatgtagtcatgtcatttgtggagtctgctgacccatcaggctctggattttgtaacacgaactttgatatgcttctgtgaaaaaaaatgggtaaccttacataagtgtttagacggtttagtggtgttctgctcttttctttacggtactgaaaaacattgactgttagttgggttgttaacctggttgaatgttatacacacttagttcagctgaattaaattgtttatttgattgttcgttgcgatatgagcgtattccctcctttcttttttaaatgtcgtcctcacacttatcgagatgttaatcatgctcaacttggatcaattagatacaagaaaataataatatttagaagatatattagtattattatatagatcattgattctgtttttatagtgaacctatttggagatacaaatattgctattttttacaaatcaagttaaatttaag

SEQ ID NO: 22834 - DNA, 2436 bp, Zea Mays
tgtggacccctctcccactcccctccggccctcccctcccacctcacatcccttcttgcttctcgcctccccacccttcatccacccgccgctcctcaagccccaagctccggcgatatgtcacgcttcggtcgatccggtccgccgccgccgatccgcgacacatattcactcctcgtcctcaacatcaccttccgcacgactgctgatgacctcttcccgctcttcgacaagtacggcgagattgtcgacatctacatcccaagggaccgcaggactggcgactcgcgcggattcgcgttcgtgaggtacaagtacgaggacgaggcacagaaggcagttgataggctcgatgattggtagacgggagggagatcatggtgcagtttgccaagtacggtccaaatgctgaacggattaataaagggagaataatggagccagttccaaggcccaggggccgttccagaagccgcagtccaagacggaggtaccgtgatgattatcgagatgactaccaggatagagattatagaaggcgaagccgtagccagagtagagatagatacgcccgtgacaggtacagagatagggattaccgccatcgtagcctgagtcgcagtttgtctcctgcacgaagaagccctagtcatagccgcagccgcagttacactcctgatgattacaagaggcgtggcaaagacagcgcatcacctgcaagtaggagccctagtcgctcccctcctcgcaagacgccaccttctcctaagagatctcctgtcaggcacaatgatgaccggtctccacgctcacggagcccttcaacataagcacaattcacttgcaaagcatcttgaacagctcaggatgaatggacttgctctgatcctatgtgtgtgtggctatgcttgtgctcaatggtgggcacttttcagttaaagttttgtagtgctgtctgtcagttgctgcctcaaacttggaatactacttctgtttggcacctgaactgcttatcaaaaactttatgtataccagttacattccacttttaaccttcatattagtattaccatattataactgtcttttcagtatttagtacttactattcatggtgacttgcacctttctagttacatggagtgaagatatgctggctgatatgcggtcaacatgcacgtagcttactgttgaagttgatataatctgtgctgtttgcgttgttgatgatgatggctgatgagatgatggaactgcagctgactgcacaatttgctgctgtctgcacctattatgctgacaagtaagattccaatgatttagctgaattcagtgttcccatttttcgtgtcataaaatgcatgacaccacgaatcttgaatctacatgcttaggtgttaacacccttttaatattttggtttagaagtgtctgcactgatttatcatagatctgttttggggttgttggatcataagcctacatgtgcattattaattgttgcatgcactggttgtgctgtcaatgcatttctgccatttgccagacatgtcttgtaaagaaaagcataagctcagtcttacttttggaaactgttccattgtcttgagtagaggtgagtgttgtactgttgtttaagctgtatacacactcgtgtcataatgccgttgtagtgcaatccaagttcattgacatgatcacgagtcataaaagggtatcttttaccccaagtgttcattaatctcacctacttatgcttgcaagttaatgatttgcatgaaataaggaagttctctgcattaatgtatcgagagtaggaaaggtatgatggcatgtgagtatttggatttgttggtgctctttacccttcttcagcaatagaaggcgtggggagaagtttcagcgacagaaatgcctgactagttgattgatcttctggatctgaatgctgatgatttgcttcaaagacttagtctcatgtagtcatgtcatttgtggagtctgctgacccatcaggctctggattttgtaacacgaactttgatatgcttctgtgaaaaaaaatgggtaaccttacataagtgtttagacggtttagtggtgttctgctcttttctttacggtactgaaaaacattgactgttagttgggttgttaacctggttgaatgttatacacacttagttcagctgaattaaattgtttatttgattgttcgttgcgatatgagcgtattccctcctttcttttttaaatgtcgtcctcacacttatcgagatgttaatcatgctcaacttggatcaattagatacaagaaaataataatatttagaagatatattagtattattatatagatcattgattctgtttttatagtgaacctatttggagatacaaatattgctattttttacaaatcaagttaaatttaag

SEQ ID NO: 22835 - DNA, 2185 bp, Zea Mays
tgtggacccctctcccactcccctccggccctcccctcccacctcacatcccttcttgcttctcgcctccccacccttcatccacccgccgctcctcaagccccaagctccggcgatatgtcacgcttcggtcgatccggtccgccgccgccgatccgcgacacatattcactcctcgtcctcaacatcaccttccgcacgactgctgatgacctcttcccgctcttcgacaagtacggcgagattgtcgacatctacatcccaagggaccgcaggactggcgactcgcgcggattcgcgttcgtgaggtacaagtacgaggacgaggcacagaaggcagttgataggctcgatgggagattggtagacgggagggagatcatggtgcagtttgccaagtacggtccaaatgctgaacggattaataaagggagaataatggagccagttccaaggcccaggggccgttccagaagccgcagtccaagacggaggtaccgtgatgattatcgagatgactaccaggatagagattatagaaggcgaagccgtagccagagtagagatagatacgcccgtgacagtttgtctcctgcacgaagaagccctagtcatagccgcagccgcagttacactcctgatgattacaagaggcgtggcaaagacagcgcatcacctgcaagtaggagccctagtcgctcccctcctcgcaagacgccaccttctcctaagagatctcctgtcaggcacaatgatgaccggtctccacgctcacggagcccttcaacataagcacaattcacttgcaaagcatcttgaacagctcaggatgaatggacttgctctgatcctatgtgtgtgtggctatgcttgtgctcaatgttacatggagtgaagatatgctggctgatatgcggtcaacatgcacgtagcttactgttgaagttgatataatctgtgctgtttgcgttgttgatgatgatggctgatgagatgatggaactgcagctgactgcacaatttgctgctgtctgcacctattatgctgacaagtaagattccaatgatttagctgaattcagtgttcccatttttcgtgtcataaaatgcatgacaccacgaatcttgaatctacatgcttaggtgttaacacccttttaatattttggtttagaagtgtctgcactgatttatcatagatctgttttggggttgttggatcataagcctacatgtgcattattaattgttgcatgcactggttgtgctgtcaatgcatttctgccatttgccagacatgtcttgtaaagaaaagcataagctcagtcttacttttggaaactgttccattgtcttgagtagaggtgagtgttgtactgttgtttaagctgtatacacactcgtgtcataatgccgttgtagtgcaatccaagttcattgacatgatcacgagtcataaaagggtatcttttaccccaagtgttcattaatctcacctacttatgcttgcaagttaatgatttgcatgaaataaggaagttctctgcattaatgtatcgagagtaggaaaggtatgatggcatgtgagtatttggatttgttggtgctctttacccttcttcagcaatagaaggcgtggggagaagtttcagcgacagaaatgcctgactagttgattgatcttctggatctgaatgctgatgatttgcttcaaagacttagtctcatgtagtcatgtcatttgtggagtctgctgacccatcaggctctggattttgtaacacgaactttgatatgcttctgtgaaaaaaaatgggtaaccttacataagtgtttagacggtttagtggtgttctgctcttttctttacggtactgaaaaacattgactgttagttgggttgttaacctggttgaatgttatacacacttagttcagctgaattaaattgtttatttgattgttcgttgcgatatgagcgtattccctcctttcttttttaaatgtcgtcctcacacttatcgagatgttaatcatgctcaacttggatcaattagatacaagaaaataataatatttagaagatatattagtattattatatagatcattgattctgtttttatagtgaacctatttggagatacaaatattgctattttttacaaatcaagttaaatttaag

SEQ ID NO: 22836 - DNA, 2336 bp, Zea Mays
tgtggacccctctcccactcccctccggccctcccctcccacctcacatcccttcttgcttctcgcctccccacccttcatccacccgccgctcctcaagccccaagctccggcgatatgtcacgcttcggtcgatccggtccgccgccgccgatccgcgacacatattcactcctcgtcctcaacatcaccttccgcacgactgctgatgacctcttcccgctcttcgacaagtacggcgagattgtcgacatctacatcccaagggaccgcaggactggcgactcgcgcggattcgcgttcgtgaggtacaagtacgaggacgaggcacagaaggcagttgataggctcgatgggagattggtagacgggagggagatcatggtgcagtttgccaagtacggtccaaatgctgaacggattaataaagggagaataatggagccagttccaaggcccaggggccgttccagaagccgcagtccaagacggaggtaccgtgatgattatcgagatgactaccaggatagagattatagaaggcgaagccgtagccagagtagagatagatacgcccgtgacaggtacagagatagggattaccgccatcgtagcctgagtcgcagtttgtctcctgcacgaagaagccctagtcatagccgcagccgcagttacactcctgatgattacaagaggcgtggcaaagacagcagcgcatcacctgcaagtaggagccctagtcgctcccctcctcgcaagacgccaccttctcctaagagatctcctgtcaggcacaatgatgaccggtctccacgctcacggagcccttcaacataagcacaattcacttgcaaagcatcttgaacagctcaggatgaatggacttgctctgatcctatgtgtgtgtggctatgcttgtgctcaatggtgggcacttttcagttaaagttttgtagtgctgtctgtcagttgctgcctcaaacttggaatactacttctgtttggcacctgaactgcttatcaaaaactttatttacatggagtgaagatatgctggctgatatgcggtcaacatgcacgtagcttactgttgaagttgatataatctgtgctgtttgcgttgttgatgatgatggctgatgagatgatggaactgcagctgactgcacaatttgctgctgtctgcacctattatgctgacaagtaagattccaatgatttagctgaattcagtgttcccatttttcgtgtcataaaatgcatgacaccacgaatcttgaatctacatgcttaggtgttaacacccttttaatattttggtttagaagtgtctgcactgatttatcatagatctgttttggggttgttggatcataagcctacatgtgcattattaattgttgcatgcactggttgtgctgtcaatgcatttctgccatttgccagacatgtcttgtaaagaaaagcataagctcagtcttacttttggaaactgttccattgtcttgagtagaggtgagtgttgtactgttgtttaagctgtatacacactcgtgtcataatgccgttgtagtgcaatccaagttcattgacatgatcacgagtcataaaagggtatcttttaccccaagtgttcattaatctcacctacttatgcttgcaagttaatgatttgcatgaaataaggaagttctctgcattaatgtatcgagagtaggaaaggtatgatggcatgtgagtatttggatttgttggtgctctttacccttcttcagcaatagaaggcgtggggagaagtttcagcgacagaaatgcctgactagttgattgatcttctggatctgaatgctgatgatttgcttcaaagacttagtctcatgtagtcatgtcatttgtggagtctgctgacccatcaggctctggattttgtaacacgaactttgatatgcttctgtgaaaaaaaatgggtaaccttacataagtgtttagacggtttagtggtgttctgctcttttctttacggtactgaaaaacattgactgttagttgggttgttaacctggttgaatgttatacacacttagttcagctgaattaaattgtttatttgattgttcgttgcgatatgagcgtattccctcctttcttttttaaatgtcgtcctcacacttatcgagatgttaatcatgctcaacttggatcaattagatacaagaaaataataatatttagaagatatattagtattattatatagatcattgattctgtttttatagtgaacctatttggagatacaaatattgctattttttacaaatcaagttaaatttaag

SEQ ID NO: 22837 - DNA, 2291 bp, Zea Mays
tgtggacccctctcccactcccctccggccctcccctcccacctcacatcccttcttgcttctcgcctccccacccttcatccacccgccgctcctcaagccccaagctccggcgatatgtcacgcttcggtcgatccggtccgccgccgccgatccgcgacacatattcactcctcgtcctcaacatcaccttccgcacgactgctgatgacctcttcccgctcttcgacaagtacggcgagattgtcgacatctacatcccaagggaccgcaggactggcgactcgcgcggattcgcgttcgtgaggtacaagtacgaggacgaggcacagaaggcagttgataggctcgatgggagattggtagacgggagggagatcatggtgcagtttgccaagtacggtccaaatgctgaacggattaataaagggagaataatggagccagttccaaggcccaggggccgttccagaagccgcagtccaagacggaggtaccgtgatgattatcgagatgactaccaggatagagattatagaaggcgaagccgtagccagagtagagatagatacgcccgtgacagtttgtctcctgcacgaagaagccctagtcatagccgcagccgcagttacactcctgatgattacaagaggcgtggcaaagacagcgcatcacctgcaagtaggagccctagtcgctcccctcctcgcaagacgccaccttctcctaagagatctcctgtcaggcacaatgatgaccggtctccacgctcacggagcccttcaacataagcacaattcacttgcaaagcatcttgaacagctcaggatgaatggacttgctctgatcctatgtgtgtgtggctatgcttgtgctcaatggtgggcacttttcagttaaagttttgtagtgctgtctgtcagttgctgcctcaaacttggaatactacttctgtttggcacctgaactgcttatcaaaaactttatttacatggagtgaagatatgctggctgatatgcggtcaacatgcacgtagcttactgttgaagttgatataatctgtgctgtttgcgttgttgatgatgatggctgatgagatgatggaactgcagctgactgcacaatttgctgctgtctgcacctattatgctgacaagtaagattccaatgatttagctgaattcagtgttcccatttttcgtgtcataaaatgcatgacaccacgaatcttgaatctacatgcttaggtgttaacacccttttaatattttggtttagaagtgtctgcactgatttatcatagatctgttttggggttgttggatcataagcctacatgtgcattattaattgttgcatgcactggttgtgctgtcaatgcatttctgccatttgccagacatgtcttgtaaagaaaagcataagctcagtcttacttttggaaactgttccattgtcttgagtagaggtgagtgttgtactgttgtttaagctgtatacacactcgtgtcataatgccgttgtagtgcaatccaagttcattgacatgatcacgagtcataaaagggtatcttttaccccaagtgttcattaatctcacctacttatgcttgcaagttaatgatttgcatgaaataaggaagttctctgcattaatgtatcgagagtaggaaaggtatgatggcatgtgagtatttggatttgttggtgctctttacccttcttcagcaatagaaggcgtggggagaagtttcagcgacagaaatgcctgactagttgattgatcttctggatctgaatgctgatgatttgcttcaaagacttagtctcatgtagtcatgtcatttgtggagtctgctgacccatcaggctctggattttgtaacacgaactttgatatgcttctgtgaaaaaaaatgggtaaccttacataagtgtttagacggtttagtggtgttctgctcttttctttacggtactgaaaaacattgactgttagttgggttgttaacctggttgaatgttatacacacttagttcagctgaattaaattgtttatttgattgttcgttgcgatatgagcgtattccctcctttcttttttaaatgtcgtcctcacacttatcgagatgttaatcatgctcaacttggatcaattagatacaagaaaataataatatttagaagatatattagtattattatatagatcattgattctgtttttatagtgaacctatttggagatacaaatattgctattttttacaaatcaagttaaatttaag

SEQ ID NO: 22838 - DNA, 2375 bp, Zea Mays
tgtggacccctctcccactcccctccggccctcccctcccacctcacatcccttcttgcttctcgcctccccacccttcatccacccgccgctcctcaagccccaagctccggcgatatgtcacgcttcggtcgatccggtccgccgccgccgatccgcgacacatattcactcctcgtcctcaacatcaccttccgcacgactgctgatgacctcttcccgctcttcgacaagtacggcgagattgtcgacatctacatcccaagggaccgcaggactggcgactcgcgcggattcgcgttcgtgaggtacaagtacgaggacgaggcacagaaggcagttgataggctcgatgggagattggtagacgggagggagatcatggtgcagtttgccaagtacggtccaaatgctgaacggattaataaagggagaataatggagccagttccaaggcccaggggccgttccagaagccgcagtccaagacggaggtaccgtgatgattatcgagatgactaccaggatagagattatagaaggcgaagccgtagccagagtagagatagatacgcccgtgacaggtacagagatagggattaccgccatcgtagcctgagtcgcaggtacagtcctgatgattacaagaagcgtgggagagacagtttgtctcctgcacgaagaagccctagtcatagccgcagccgcagttacactcctgatgattacaagaggcgtggcaaagacagcagcgcatcacctgcaagtaggagccctagtcgctcccctcctcgcaagacgccaccttctcctaagagatctcctgtcaggcacaatgatgaccggtctccacgctcacggagcccttcaacataagcacaattcacttgcaaagcatcttgaacagctcaggatgaatggacttgctctgatcctatgtgtgtgtggctatgcttgtgctcaatggtgggcacttttcagttaaagttttgtagtgctgtctgtcagttgctgcctcaaacttggaatactacttctgtttggcacctgaactgcttatcaaaaactttatttacatggagtgaagatatgctggctgatatgcggtcaacatgcacgtagcttactgttgaagttgatataatctgtgctgtttgcgttgttgatgatgatggctgatgagatgatggaactgcagctgactgcacaatttgctgctgtctgcacctattatgctgacaagtaagattccaatgatttagctgaattcagtgttcccatttttcgtgtcataaaatgcatgacaccacgaatcttgaatctacatgcttaggtgttaacacccttttaatattttggtttagaagtgtctgcactgatttatcatagatctgttttggggttgttggatcataagcctacatgtgcattattaattgttgcatgcactggttgtgctgtcaatgcatttctgccatttgccagacatgtcttgtaaagaaaagcataagctcagtcttacttttggaaactgttccattgtcttgagtagaggtgagtgttgtactgttgtttaagctgtatacacactcgtgtcataatgccgttgtagtgcaatccaagttcattgacatgatcacgagtcataaaagggtatcttttaccccaagtgttcattaatctcacctacttatgcttgcaagttaatgatttgcatgaaataaggaagttctctgcattaatgtatcgagagtaggaaaggtatgatggcatgtgagtatttggatttgttggtgctctttacccttcttcagcaatagaaggcgtggggagaagtttcagcgacagaaatgcctgactagttgattgatcttctggatctgaatgctgatgatttgcttcaaagacttagtctcatgtagtcatgtcatttgtggagtctgctgacccatcaggctctggattttgtaacacgaactttgatatgcttctgtgaaaaaaaatgggtaaccttacataagtgtttagacggtttagtggtgttctgctcttttctttacggtactgaaaaacattgactgttagttgggttgttaacctggttgaatgttatacacacttagttcagctgaattaaattgtttatttgattgttcgttgcgatatgagcgtattccctcctttcttttttaaatgtcgtcctcacacttatcgagatgttaatcatgctcaacttggatcaattagatacaagaaaataataatatttagaagatatattagtattattatatagatcattgattctgtttttatagtgaacctatttggagatacaaatattgctattttttacaaatcaagttaaatttaag

SEQ ID NO: 22839 - DNA, 2372 bp, Zea Mays
tgtggacccctctcccactcccctccggccctcccctcccacctcacatcccttcttgcttctcgcctccccacccttcatccacccgccgctcctcaagccccaagctccggcgatatgtcacgcttcggtcgatccggtccgccgccgccgatccgcgacacatattcactcctcgtcctcaacatcaccttccgcacgactgctgatgacctcttcccgctcttcgacaagtacggcgagattgtcgacatctacatcccaagggaccgcaggactggcgactcgcgcggattcgcgttcgtgaggtacaagtacgaggacgaggcacagaaggcagttgataggctcgatgggagattggtagacgggagggagatcatggtgcagtttgccaagtacggtccaaatgctgaacggattaataaagggagaataatggagccagttccaaggcccaggggccgttccagaagccgcagtccaagacggaggtaccgtgatgattatcgagatgactaccaggatagagattatagaaggcgaagccgtagccagagtagagatagatacgcccgtgacaggtacagagatagggattaccgccatcgtagcctgagtcgcaggtacagtcctgatgattacaagaagcgtgggagagacagtttgtctcctgcacgaagaagccctagtcatagccgcagccgcagttacactcctgatgattacaagaggcgtggcaaagacagcgcatcacctgcaagtaggagccctagtcgctcccctcctcgcaagacgccaccttctcctaagagatctcctgtcaggcacaatgatgaccggtctccacgctcacggagcccttcaacataagcacaattcacttgcaaagcatcttgaacagctcaggatgaatggacttgctctgatcctatgtgtgtgtggctatgcttgtgctcaatggtgggcacttttcagttaaagttttgtagtgctgtctgtcagttgctgcctcaaacttggaatactacttctgtttggcacctgaactgcttatcaaaaactttatttacatggagtgaagatatgctggctgatatgcggtcaacatgcacgtagcttactgttgaagttgatataatctgtgctgtttgcgttgttgatgatgatggctgatgagatgatggaactgcagctgactgcacaatttgctgctgtctgcacctattatgctgacaagtaagattccaatgatttagctgaattcagtgttcccatttttcgtgtcataaaatgcatgacaccacgaatcttgaatctacatgcttaggtgttaacacccttttaatattttggtttagaagtgtctgcactgatttatcatagatctgttttggggttgttggatcataagcctacatgtgcattattaattgttgcatgcactggttgtgctgtcaatgcatttctgccatttgccagacatgtcttgtaaagaaaagcataagctcagtcttacttttggaaactgttccattgtcttgagtagaggtgagtgttgtactgttgtttaagctgtatacacactcgtgtcataatgccgttgtagtgcaatccaagttcattgacatgatcacgagtcataaaagggtatcttttaccccaagtgttcattaatctcacctacttatgcttgcaagttaatgatttgcatgaaataaggaagttctctgcattaatgtatcgagagtaggaaaggtatgatggcatgtgagtatttggatttgttggtgctctttacccttcttcagcaatagaaggcgtggggagaagtttcagcgacagaaatgcctgactagttgattgatcttctggatctgaatgctgatgatttgcttcaaagacttagtctcatgtagtcatgtcatttgtggagtctgctgacccatcaggctctggattttgtaacacgaactttgatatgcttctgtgaaaaaaaatgggtaaccttacataagtgtttagacggtttagtggtgttctgctcttttctttacggtactgaaaaacattgactgttagttgggttgttaacctggttgaatgttatacacacttagttcagctgaattaaattgtttatttgattgttcgttgcgatatgagcgtattccctcctttcttttttaaatgtcgtcctcacacttatcgagatgttaatcatgctcaacttggatcaattagatacaagaaaataataatatttagaagatatattagtattattatatagatcattgattctgtttttatagtgaacctatttggagatacaaatattgctattttttacaaatcaagttaaatttaag

SEQ ID NO: 22840 - DNA, 1334 bp, Zea Mays
tgtggacccctctcccactcccctccggccctcccctcccacctcacatcccttcttgcttctcgcctccccacccttcatccacccgccgctcctcaagccccaagctccggcgatatgtcacgcttcggtcgatccggtccgccgccgccgatccgcgacacatattcactcctcgtcctcaacatcaccttccgcacgactgctgatgacctcttcccgctcttcgacaagtacggcgagattgtcgacatctacatcccaagggaccgcaggactggcgactcgcgcggattcgcgttcgtgaggtacaagtacgaggacgaggcacagaaggcagttgataggctcgatgggagattggtagacgggagggagatcatggtgcagtttgccaagtacggtccaaatgctgaacggattaataaagggagaataatggagccagttccaaggcccaggggccgttccagaagccgcagtccaagacggaggtaccgtgatgattatcgagatgactaccaggatagagattatagaaggcgaagccgtagccagagtagagatagatacgcccgtgacaggtacagagatagggattaccgccatcgtagcctgagtcgcagtttgtctcctgcacgaagaagccctagtcatagccgcagccgcagttacactcctgatgattacaagaggcgtggcaaagacagcgcatcacctgcaagtaggagccctagtcgctcccctcctcgcaagacgccaccttctcctaagagatctcctgtcaggcacaatgatgaccggtctccacgctcacggagcccttcaacataagcacaattcacttgcaaagcatcttgaacagctcaggatgaatggacttgctctgatcctatgtgtgtgtggctatgcttgtgctcaatggtgggcacttttcagttaaagttttgtagtgctgtctgtcagttgctgcctcaaacttggaatactacttctgtttggcacctgaactgcttatcaaaaactttatgtataccagttacattccacttttaaccttcatattagtattaccatattataactgtcttttcagtatttagtacttactattcatggtgacttgcacctttctagttacatggagtgaagatatgctggctgatatgcggtcaacatgcacgtagcttactgttgaagttgatataatctgtgctgtttgcgttgttgatgatgatggctgatgagatgatggaactgcagctgactgcacaatttgctgctgtctgcacctattatgctgacaatgagcaactcatggtcaaccatattat

SEQ ID NO: 22841 - DNA, 1432 bp, Zea Mays
cctctcccgaccgcgcgcgcgcgcaatgacgaagcacacggccttcgccggcgcggacggcggcacgaccgccgccgccgccgtcacgctgtgcgcgccgccgagggcgcgcggcgcacgcagggtggccgcggggtccttgccggagctcgttcggcgccacgcggatctcgacgactggatgatgcgagacgcggtgagaggcgtggccgagcacttcccgacggcgatcgtgagcgggaggtgtagagacaaggtgttcaacttcgtgaagctggcggagctgtactacgccgggagccacggcatggacatcaagggacccacggcgcagtccaagcacaccaaggcaaaggccgaagctgttctgtgccaaccagcgagcgcgttcctgcccgtcatcgacgaggcgtaccgcgcgctgacggcgaggacggcgccgatccccggcgcgacggtggagaacaacaagttctgcctctccgtccacttccgctgcgtccaggaggagaaatggcgcgctctggaggagcaggtgcggtcggtgctcaaggagtacccggacctccggctcaccaagggcaggaaggtcttggaggtccggccgtccatcaagtgggacaagggcaacgccattcagttcttgctcgagtgtctcggttttgctgacagtaacaatgtcttcccgatatatattggagacgatcgcaccgacgaggacgcgttcaaggtgctgcgcggcatggggcaggggatcggaatcctcgtgagcaagattccaaaggagaccagtgcatcctactccttgcgtgaaccttccgaggtgaaggagttcctgcacatgttggtcaggtccaagcagcggcgggactagtcatggtccaggcagcaggtggtgaaaagctagaagcaaccgaggtcggtcgaggtagtccaagcacatgcatgtccatggtcgacaagcgaagctgtttttgcccatggtctctgtgaatatatcagctgactgtatctgactggatccggattttaactgttgcgctaggaaggaaaagttttttttttggttccttcattagagaagaaaaaagagagtgctgtctccgcgcctcgccgccggcgccgacacgcagccacgggggtggacgcaggcgccgacgggctgcatggtggttttgcctgctataaggtgggctgggccggcgtgtgaggctgtgagccccaggagtccagtacacctcagcctacctacgaaagagaacagaaccgaatacgctcgcacccatgctttgtgcccattggggccttagggcgtgcacaaaggcattaaaaacatcgtgttttactgggtgttagggtgctaattgtaaaaatattggagagccaatctcttggtcaataaacacctcgggcgctcagctcaatgtcgaag

SEQ ID NO: 22842 - DNA, 1577 bp, Zea Mays
tcccgaccgcgcgcgcgcgcaatgacgaagcacacggccttcgccggcgcggacggcggcacgaccgccgccgccgccgtcacgctgtgcgcgccgccgagggcgcgcggcgcacgcagggtggccgcggggtccttgccggagctcgttcggcgccacgcggatctcgacgactggatggagaagcacccgtcggcattggccgggttcgagtcggtgctggcggccgccgaggggaagcaggtcgtgatgttcctggactacgacggcacgctgtcgccgatcgtcaaggaccccgacagcgccgtcatgtcggaggagatgcgagacgcggtgagaggcgtggccgagcacttcccgacggcgatcgtgagcgggaggtgtagagacaaggtgttcaacttcgtgaagctggcggagctgtactacgccgggagccacggcatggacatcaagggacccacggcgcagtccaagcacaccaaggcaaaggccgaagctgttctgtgccaaccagcgagcgcgttcctgcccgtcatcgacgaggcgtaccgcgcgctgacggcgaggacggcgccgatccccggcgcgacggtggagaacaacaagttctgcctctccgtccacttccgctgcgtccaggaggagctgggcagaaatggcgcgctctggaggagcaggtgcggtcggtgctcaaggagtacccggacctccggctcaccaagggcaggaaggtcttggaggtccggccgtccatcaagtgggacaagggcaacgccattcagttcttgctcgagtgtctcggttttgctgacagtaacaatgtcttcccgatatatattggagacgatcgcaccgacgaggacgcgttcaaggtgctgcgcggcatggggcaggggatcggaatcctcgtgagcaagattccaaaggagaccagtgcatcctactccttgcgtgaaccttccgaggtgaaggagttcctgcacatgttggtcaggtccaagcagcggcgggactagtcatggtccaggcagcaggtggtgaaaagctagaagcaaccgaggtcggtcgaggtagtccaagcacatgcatgtccatggtcgacaagcgaagctgtttttgcccatggtctctgtgaatatatcagctgactgtatctgactggatccggattttaactgttgcgctaggaaggaaaagttttttttttggttccttcattagagaagaaaaaagagagtgctgtctccgcgcctcgccgccggcgccgacacgcagccacgggggtggacgcaggcgccgacgggctgcatggtggttttgcctgctataaggtgggctgggccggcgtgtgaggctgtgagccccaggagtccagtacacctcagcctacctacgaaagagaacagaaccgaatacgctcgcacccatgctttgtgcccattggggccttagggcgtgcacaaaggcattaaaaacatcgtgttttactgggtgttagggtgctaattgtaaaaatattggagagccaatctcttggtcaataaacacctcgggcgctcagctcaatgtcgaag

SEQ ID NO: 22843 - DNA, 1189 bp, Zea Mays
aacgaaaaaaaatccctataccaaaaaaaaaatggaacgaacaaacgaaccccctcttcttgcattggaggaaatggatggattggctggggtcagcgtggcaggcacccgagcgatggaggcggtgggagaggagaagggagcgacggtggcggaggaggggaagatgatgaaggagcagggagagaaaggagtggtggcctcgacctcggaggcggagaaggagaagatggtggaggcgaagggagagaaggcagtggcggcatcggaggcagagggtgggaagatggtggaggggcagggagagaaggcagtggcgacctcggaggcggaggatgtgaagatggtggaggggaagggagagaaggcagtggcgaccacggaggcggagatagggacttcggaaccgaaggatgtggctggcgggaggcttatcaccttgaagagctcggacggcaaggttcatcgcgcgtcggtggcggcggcacagctgtcggtgattctcagcggcatgatagaggaagtcgtcaccgacgacgaagtcgtcatagtccctttagtcgacgggcccaccctggtcacggtgctggagtactgcaccaagcacgccgaggtcgcggccgccgccagaggcaccagcgcagtcgctttcgccacggcgtccaaggccctcgaggcttgggaccgcgacttcctcgaccgcctcaccatggacgcgctccacgacctcttcgtcgcctccaacttcctcgaaattcaagggctcctcaacgccatcgctcagaaggccgccgacgtgatcaagggcaagaccaccgagcagatccgggacgccttcaacatcgtcaacgacctcaccccggaacaggaggcgacggccgcggagctgcgtcggaagtacacctgggactaccatccagaagcctgagcctaacagtttgttccatgctgctctaaccatctatctcaccacatctgccaccctagcggaaggttccccgtgttccacttcctcccattcccatcgtagtatagcagctgtctcgcctctcgcgtccatagggttctgatctgctcggtctaataagtactggcttggcattttcatttcgtcctgttgaatgtgcggtggaactaagtctgaacttgcttgcctgaagcgaatacatatcagatatcacattctgaa

SEQ ID NO: 22844 - DNA, 2067 bp, Zea Mays
gcctctggttttcttccgcaagctgttatctctcgcacgcaaacgactagcgcagcaaacaccccacctcgctcgcgatcgcggcacggcggcggcaatccaccgcggctcgctgccttcgccagtgatctggcctcttcgagtttcgccatcagataatcatccccagccactcccctcatctcccatcccctcccttccccttccgctgaatcggcgcggagaggatggcgtcccggcggggcagcagcagttgcgcgctctgcgagggatccaacctgccgtcttgttgcgcctcgtgcgtcaacgcgaggctggtcgagtaccacacgaggctgcgcatgatgaggagcctccgcgactccctccacggccgaatcgccgcacgcctcgaagccaagagaaaaacagatgagcagcggatctggagaacaagcaaagaacaggatatcatggagttgaggaatcggctcactgaattgaagagaaaaactgccgtagacaagaccgaggtcgagcaggcatcgagtgatcttaaggcaaaaattgtgccattgaatttggctcttgccacgctaaaaaagagacgagctgatgcagtggccatgcacaccaatgccatgaaagttgctcagatgaatctcatggcaaccacctcagattgtatgaaaatgcaatcaaaatctgtaaagcaactttgcagattgtttccaatgcgacgagtaattaaagagggagaaaagaaagacggctacaatggtccgtatgattcaatatgtggggcacatgctacatttcatcaatatagcagttcgtatcttatcagcacctgctcttcatgtatcaggctgtaagggctcatgctcaaatatatggcagcggagttcctactggagcacacgacagtcccagagcaaggtttaccctctttttatacctaggaaaaatgtttgcacaggtggtgaagaaacttcattgacagaaagtggctcgagtaactttggggttgactctgtggattctgtcaagaaaccgtcttttgatcccaagagaagcaatagctttaacttttctggtgcatcttcccactccatggagaggcatcaatatttgcagagaggaatatcactattaaagacaagtgttacagccattactacctactattacaactcactgggcttggatgtgccatccaatctttctacttttgaggcgtttgctaagttgctccatatgttgtcgtcatcaaaggcccttcgaactgcctttgaattggacattgcttcaaggtcagagaagcaagcccagcagctgaacagatcgatttggaaggcaagttctgccatatcatcggacagcagttttatggacagcatgcacacaaccatcatgcactctggacaacctcctcatgaactcagacgagagcctgtacactggtaagctggtgaagcatggtggtgcgccagatagcatatttgacagctgggacatagtagagcgtgaggttctaccaccaccaccctcgcgggttgaagacgtcgctcagtgggaatgggccatgtatgctggcagcaccaaaaagaaatgacctctatttacaaatcctccgtgaagcccaaactgttagacactgcaagagcttcagtttagatatgtaagtacttgatcactaggctcttagaaaccgggaatgtggaacttggccacgttcctcatttctggaacgtgggaataatctcgttcccatagttttaaaacctaatttaaatagcgtactgtgtacaatgttcctatttctcgatccattcattgattcgatctggggacctggttactaagatcaggctccggtcccatgtacagtatcagtccagacctaacctcgccctgtggggctgacctgtgaatcatctatactgcaagaatgcacataggagaattgcagtgtagagttgatttgctgccatctctacatcagtacgtgtacatgagggcagccctgtaaatttgtaaatataacccctgtaccgtttagaaatgaaaataaaatacttggaatac

SEQ ID NO: 22845 - DNA, 2167 bp, Zea Mays
gcctctggttttcttccgcaagctgttatctctcgcacgcaaacgactagcgcagcaaacaccccacctcgctcgcgatcgcggcacggcggcggcaatccaccgcggctcgctgccttcgccagtgatctggcctcttcgagtttcgccatcagataatcatccccagccactcccctcatctcccatcccctcccttccccttccgctgaatcggcgcggagaggatggcgtcccggcggggcagcagcagttgcgcgctctgcgagggatccaacctgccgtcttgttgcgcctcgtgcgtcaacgcgaggctggtcgagtaccacacgaggctgcgcatgatgaggagcctccgcgactccctccacggccgaatcgccgcacgcctcgaagccaagagaaaaacagatgagcagcggatctggagaacaagcaaagaacaggatatcatggagttgaggaatcggctcactgaattgaagagaaaaactgccgtagacaagaccgaggtcgagcaggcatcgagtgatcttaaggcaaaaattgtgccattgaatttggctcttgccacgctaaaaaagagacgagctgatgcagtggccatgcacaccaatgccatgaaagttgctcagatgaatctcatggcaaccacctcagattgtatgaaaatgcaatcaaaatctgtaaagcaactttgcagattgtttccaatgcgacgagtaattaaagagggagaaaagaaagacggctacaatggtccgtatgattcaatatgtggggttcgtcttcctcgtggtcttgatccacattctatttcatcagaagaactgtcggcatctttggggcacatgctacatttcatcaatatagcagttcgtatcttatcagcacctgctcttcatgtatcaggctgtaagggctcatgctcaaatatatggcagcggagttcctactggagcacacgacagtcccagaggtggtgaagaaacttcattgacagaaagtggctcgagtaactttggggttgactctgtggattctgtcaagaaaccgtcttttgatcccaagagaagcaatagctttaacttttctggtgcatcttcccactccatggagaggcatcaatatttgcagagaggaatatcactattaaagacaagtgttacagccattactacctactattacaactcactgggcttggatgtgccatccaatctttctacttttgaggcgtttgctaagttgctccatatgttgtcgtcatcaaaggcccttcgaactgcctttgaattggacattgcttcaaggtcagagaagcaagcccagcagctgaacagatcgatttggaaggcaagttctgccatatcatcggacagcagttttatggacagcatgcacacaaccatcatggtaaatttctactttgctcttacatttcatgcgaacttcaatttccattttgatggaatatctgttcttcttagcccagcactctggacaacctcctcatgaactcagacgagagcctgtacactggtaagctggtgaagcatggtggtgcgccagatagcatatttgacagctgggacatagtagagcgtgaggttctaccaccaccaccctcgcgggttgaagacgtcgctcagtgggaatgggccatgtatgctggcagcaccaaaaagaaatgacctctatttacaaatcctccgtgaagcccaaactgttagacactgcaagagcttcagtttagatatgtaagtacttgatcactaggctcttagaaaccgggaatgtggaacttggccacgttcctcatttctggaacgtgggaataatctcgttcccatagttttaaaacctaatttaaatagcgtactgtgtacaatgttcctatttctcgatccattcattgattcgatctggggacctggttactaagatcaggctccggtcccatgtacagtatcagtccagacctaacctcgccctgtggggctgacctgtgaatcatctatactgcaagaatgcacataggagaattgcagtgtagagttgatttgctgccatctctacatcagtacgtgtacatgagggcagccctgtaaatttgtaaatataacccctgtaccgtttagaaatgaaaataaaatacttggaatac

SEQ ID NO: 22846 - DNA, 2037 bp, Zea Mays
gcctctggttttcttccgcaagctgttatctctcgcacgcaaacgactagcgcagcaaacaccccacctcgctcgcgatcgcggcacggcggcggcaatccaccgcggctcgctgccttcgccagtgatctggcctcttcgagtttcgccatcagataatcatccccagccactcccctcatctcccatcccctcccttccccttccgctgaatcggcgcggagaggatggcgtcccggcggggcagcagcagttgcgcgctctgcgagggatccaacctgccgtcttgttgcgcctcgtgcgtcaacgcgaggctggtcgagtaccacacgaggctgcgcatgatgaggagcctccgcgactccctccacggccgaatcgccgcacgcctcgaagccaagacaagaccgaggtcgagcaggcatcgagtgatcttaaggcaaaaattgtgccattgaatttggctcttgccacgctaaaaaagagacgagctgatgcagtggccatgcacaccaatgccatgaaagttgctcagatgaatctcatggcaaccacctcagattgtatgaaaatgcaatcaaaatctgtaaagcaactttgcagattgtttccaatgcgacgagtaattaaagagggagaaaagaaagacggctacaatggtccgtatgattcaatatgtggggttcgtcttcctcgtggtcttgatccacattctatttcatcagaagaactgtcggcatctttggggcacatgctacatttcatcaatatagcagttcgtatcttatcagcacctgctcttcatgtatcaggctgtaagggctcatgctcaaatatatggcagcggagttcctactggagcacacgacagtcccagagcaaggtttaccctctttttatacctaggaaaaatgtttgcacaggtggtgaagaaacttcattgacagaaagtggctcgagtaactttggggttgactctgtggattctgtcaagaaaccgtcttttgatcccaagagaagcaatagctttaacttttctggtgcatcttcccactccatggagaggcatcaatatttgcagagaggaatatcactattaaagacaagtgttacagccattactacctactattacaactcactgggcttggatgtgccatccaatctttctacttttgaggcgtttgctaagttgctccatatgttgtcgtcatcaaaggcccttcgaactgcctttgaattggacattgcttcaaggtcagagaagcaagcccagcagctgaacagatcgatttggaaggcaagttctgccatatcatcggacagcagttttatggacagcatgcacacaaccatcatgcccagcactctggacaacctcctcatgaactcagacgagagcctgtacactggtaagctggtgaagcatggtggtgcgccagatagcatatttgacagctgggacatagtagagcgtgaggttctaccaccaccaccctcgcgggttgaagacgtcgctcagtgggaatgggccatgtatgctggcagcaccaaaaagaaatgacctctatttacaaatcctccgtgaagcccaaactgttagacactgcaagagcttcagtttagatatgtaagtacttgatcactaggctcttagaaaccgggaatgtggaacttggccacgttcctcatttctggaacgtgggaataatctcgttcccatagttttaaaacctaatttaaatagcgtactgtgtacaatgttcctatttctcgatccattcattgattcgatctggggacctggttactaagatcaggctccggtcccatgtacagtatcagtccagacctaacctcgccctgtggggctgacctgtgaatcatctatactgcaagaatgcacataggagaattgcagtgtagagttgatttgctgccatctctacatcagtacgtgtacatgagggcagccctgtaaatttgtaaatataacccctgtaccgtttagaaatgaaaataaaatacttggaatac

SEQ ID NO: 22847 - DNA, 2536 bp, Zea Mays
gcctctggttttcttccgcaagctgttatctctcgcacgcaaacgactagcgcagcaaacaccccacctcgctcgcgatcgcggcacggcggcggcaatccaccgcggctcgctgccttcgccagtgatctggcctcttcgagtttcgccatcagataatcatccccagccactcccctcatctcccatcccctcccttccccttccgctgaatcggcgcggagaggatggcgtcccggcggggcagcagcagttgcgcgctctgcgagggatccaacctgccgtcttgttgcgcctcgtgcgtcaacgcgaggctggtcgagtaccacacgaggctgcgcatgatgaggagcctccgcgactccctccacggccgaatcgccgcacgcctcgaagccaagagaaaaacagatgagcagcggatctggagaacaagcaaagaacaggatatcatggagttgaggaatcggctcactgaattgaagagaaaaactgccgtagacaagaccgaggtcgagcaggcatcgagtgatcttaaggcaaaaattgtgccattgaatttggctcttgccacgctaaaaaagagacgagctgatgcagtggccatgcacaccaatgccatgaaagttgctcagatgaatctcatggcaaccacctcagattgtatgaaaatgcaatcaaaatctgtaaagcaactttgcagattgtttccaatgcgacgagtaattaaagagggagaaaagaaagacggctacaatggtccgtatgattcaatatgtggggttcgtcttcctcgtggtcttgatccacattctatttcatcagaagaactgtcggcatctttggggttatactttgctctaactatttctttttatcgttctaatggttacatcccctcattcagttattttcttaattggaattttatcgtcttaattaaaatatttttaacatttctctatggtctatgacctatctatcttctgaacatcaatctaaagcacactgtcaaattatttgaaaatatttcatagagttgcgcttctaaacatcgataaccgttgtctggaccatagagaaatgttatatggagaccagtagcaatagcattccttgttatctacatgcacctgagtattttaagtattatgttcttgggttgtctaaattgttctctagtacagattgcaacaatactttgtcaatttggttctgaattagtgaaacttaagtttcttcttgctacaggcacatgctacatttcatcaatatagcagttcgtatcttatcagcacctgctcttcatgtatcaggctgtaagggctcatgctcaaatatatggcagcggagttcctactggagcacacgacagtcccagagcaaggtttaccctctttttatacctaggaaaaatgtttgcacaggtggtgaagaaacttcattgacagaaagtggctcgagtaactttggggttgactctgtggattctgtcaagaaaccgtcttttgatcccaagagaagcaatagctttaacttttctggtgcatcttcccactccatggagaggcatcaatatttgcagagaggaatatcactattaaagacaagtgttacagccattactacctactattacaactcactgggcttggatgtgccatccaatctttctacttttgaggcgtttgctaagttgctccatatgttgtcgtcatcaaaggcccttcgaactgcctttgaattggacattgcttcaaggtcagagaagcaagcccagcagctgaacagatcgatttggaaggcaagttctgccatatcatcggacagcagttttatggacagcatgcacacaaccatcatgcactctggacaacctcctcatgaactcagacgagagcctgtacactggtaagctggtgaagcatggtggtgcgccagatagcatatttgacagctgggacatagtagagcgtgaggttctaccaccaccaccctcgcgggttgaagacgtcgctcagtgggaatgggccatgtatgctggcagcaccaaaaagaaatgacctctatttacaaatcctccgtgaagcccaaactgttagacactgcaagagcttcagtttagatatgtaagtacttgatcactaggctcttagaaaccgggaatgtggaacttggccacgttcctcatttctggaacgtgggaataatctcgttcccatagttttaaaacctaatttaaatagcgtactgtgtacaatgttcctatttctcgatccattcattgattcgatctggggacctggttactaagatcaggctccggtcccatgtacagtatcagtccagacctaacctcgccctgtggggctgacctgtgaatcatctatactgcaagaatgcacataggagaattgcagtgtagagttgatttgctgccatctctacatcagtacgtgtacatgagggcagccctgtaaatttgtaaatataacccctgtaccgtttagaaatgaaaataaaatacttggaatac

SEQ ID NO: 22848 - DNA, 819 bp, Zea Mays
ttctgctgctggtttgttataaagatagcattggagttaggtgacttctgatagctcaataactgttgttcagccacctatcgtcgtccagatcttccagtttctagttgcaatgttagtgatggactcatggcagtactttgtgcaccgctacatgcaccaaaacaagttcctgtatcggcacatccactcgcagcaccatcggctgattgtcccttacgctatcggggctctgtacaaccacccactggagggcctgcttctggacaccttaggaggcgccatctccttcttggtctccggcatgacgccgaggaccgccatgttcttcttctgcttcgcagtcctcaagacggtcgacgatcactgcgggctttggctaccgtataacatcttccagcacctgtttcagaacaacaccgcctatcacgacatccaccaccagctgcaaggaaccaaatacaactactcccagccattcttctcgatctgggacagaatgctaggaacccacatgccgtacgacttagtgagcaggaaagaaggtggatttgaagcaaggccgtcgcgagactagcttgaagtcatggaagtgtacaggctccggtgaatgagtcagacagaatatggttttttagctgtcatggttcattttttaaaaattttgtgcagggctgccatttacattgctgtgcagatagtgcatttgaaaatccacacttctgtatgtacccagttatttgtgtaattgattgaacctctggtcgtgatcgacaccttcggagcaatctttggctactactgactgtgctttgtttc

SEQ ID NO: 22849 - DNA, 2057 bp, Zea Mays
agtaaataatctatatctagtaagggatgtttagatacaccaactaaaattttatcggcgacaccggatgtttgaatgctagttagaagtattaaatatactgtaactataaactagtgctgtgatatagtaaacattttctaattatagactaattatgtttaataaactttcttctatgattaattttataattaaattatatataaacgctggatgtgatatatactaaacctttgtttgggggaattaaacacccttggatcattttctcgtaggcagagactagagagagcattacccatgggcacttggcccaggaagagaagaagctaaaaaatccagaggaactgtctgacagcttctgccatttcctgggaggctggtaccatttctctccggattctcagctttaatcacggtgcggcgtcagctcctcacagataggaccggcgggcggctgccggctttgtggcgttaagcagtggccggactgccggaggagggcagaggtggtcaggtggagttcgccagttcggagtcgccgattgagtcgggagccagagaggccgagaacggatgcttcctgttgcttgctgcgcacctcgtgggctggaagttgggcgtcagctaattttccgctccgcaccgactgcagccccgggcaccgtatccgctctttagcaatcataacaaacatacccgaaggaagccaacagatttcatcccatctcccatcccacctggaggcgaatttcgtctggggaaaaagtcggcggccatggccgggcgagactccctcccggagggttctctcttcctcgggttggacagctccactcaatcactgaaagctacggtgctcaataatgagctcaccatagtagcttctgaaattgttaattttgactctgaattgccacactacaaaactgaaggtggggtgtacagagacccagcagatgataggcacattttttcaccaaccattatgtgggtggaagctttggatgtgctgcttgagaagctaaaaccaaagatcaacttcggtaaggtagtggctgtttctgggagtgggcagcaacatggcagtgtttattggaaaaagggcagccatgctgtgttatcctccttggatgctagtaaaagcttgttatcgcaactaaaggatgcattttctacaatgaactcaccattatggatggatagtagcacaacaaagcaatgcagagaaatagagaacgcagttggaggtgcactggagttagcaaaactcacaggatctcgtgcgtatgaaagattcactggcccccagataaggaagatctatcagacagagcctgatgtttatgaagataccgagagaatatctttggtgagctcgttcatggcatctatccttgttggaagctatgcaagtattgatgaaactgatggtgcggggatgaacttgatggatatcaagcaaaggatctggtcaaagtctgctttagaggcaactgctcctggacttgaagcaaagcttggaaatctagcaccagcatattcagctgctggtcgaattgctccttattttgtagaaaggtttcagtttgataagaactgtttggtcattcagtggtctggagataatcctaatagccttgcaggtttaactctgaatacccctggtgatcttgccattagccttggtactagtgatacagtattcgggataacaacagaagctaaaccaagccttgaaggacatgttttccccaatcctgttgagcctaatggttatatggtcatgctatgctacaaaaatggctccttgaccagagaagatgtacgaaatcgctgtgcagacaaatcatgggacgtttttaacagctatctggagaaaacgccccctctaaatggtgggaagataggattctactacaaagaccatgagatcctccctccacttccagtgggtttccatcggtacactgtcgaaaacctcaacgacgtctcatcagacgctctgttggagcgtgaagtggaagaacttgacccaccgtccgaggtttgcg

SEQ ID NO: 22850 - DNA, 1299 bp, Zea Mays
gtgtcctctctatttggggacaccatctatagaggaggaaatatagaggttgaatagaggatgctgattaattaatgaaaaacaaatcactgaaagctacggtgctcaataatgagctcaccatagtagcttctgaaattgttaattttgactctgaattgccacactacaaaactgaaggtggggtgtacagagacccagcagatgataggcacattttttcaccaaccattatgtgggtggaagctttggatgtgctgcttgagaagctaaaaccaaagatcaacttcggtaaggtagtggctgtttctgggagtgggcagcaacatggcagtgtttattggaaaaagggcagccatgctgtgttatcctccttggatgctagtaaaagcttgttatcgcaactaaaggatgcattttctacaatgaactcaccattatggatggatagtagcacaacaaagcaatgcagagaaatagagaacgcagttggaggtgcactggagttagcaaaactcacaggatctcgtgcgtatgaaagattcactggcccccagataaggaagatctatcagacagagcctgatgtttatgaagataccgagagaatatctttggtgagctcgttcatggcatctatccttgttggaagctatgcaagtattgatgaaactgatggtgcggggatgaacttgatggatatcaagcaaaggatctggtcaaagtctgctttagaggcaactgctcctggacttgaagcaaagcttggaaatctagcaccagcatattcagctgctggtcgaattgctccttattttgtagaaaggtttcagtttgataagaactgtttggtcattcagtggtctggagataatcctaatagccttgcaggtttaactctgaatacccctggtgatcttgccattagccttggtactagtgatacagtattcgggataacaacagaagctaaaccaagccttgaaggacatgttttccccaatcctgttgagcctaatggttatatggtcatgctatgctacaaaaatggctccttgaccagagaagatgtacgaaatcgctgtgcagacaaatcatgggacgtttttaacagctatctggagaaaacgccccctctaaatggtgggaagataggattctactacaaagaccatgagatcctccctccacttccagtgggtttccatcggtacactgtcgaaaacctcaacgacgtctcatcagacgctctgttggagcgtgaagtggaagaacttgacccaccgtccgaggtttgcg

SEQ ID NO: 22851 - DNA, 919 bp, Zea Mays
ccgagtcaggcgatcctagtcccatcaaagacccctaaccccaccgcttcgctggggaaaccgggctggcggcgtcggggactaatgggggagtacgcagcggtgaagacgtcggtgtggtgggacatcgagaactgtcatgtgccccgctgctgcgacccccacctcatcgcccagaaaatgagctccgccgtcgccgccgctggctacaccggccccatcaccatctcagcctacggggaccccaactgcgtccctaaacacgtccagcacgccctctccagcaccggcatcgcgctcaaccacgtccccgcaggtattaaagatgcaagtgataaaaagatcttagttgacatgttaatctgggctattgacaatcctccaccggcaaattatttgctaatttctggtgatcgggacttctcgaatgcccttcataagctagtgatgaggcggtacaatattctactagcacaacctccaaatgtgtctcaagcgcttactgctgcagcaaaacatgtttggctatggaaagacctcgtggctggggaaccaccattggcagagtccccatacataagtagcataacaaatggcagtgtggaccattcaaatgcatcgaagaacatggattcagattcttcagttgcaactccacatagcagtactcaaggacagaatagcataccgtgtgatcagcaaaaaggtggtaacagcaaggcagacaaacaatctaaagttaggcaacctcggaaaaaccagtcagatgaagcttcagttgatgggctacctggtagtcctaaaggaagcactgcttcccgagccaaatcaatctcagccttcatcatcctcactaccaagttctgattttgcaagatgagggtggggcacaggtggttcagctgatacacaaaaaacc

SEQ ID NO: 22852 - DNA, 2454 bp, Zea Mays
ctctcgcgcgatgcgctcgcggggaggcggcgcggcggcgtggccggagcacctggccgcgcacgcgcgcctcctcaagtcggcgtgcccggacgcgttcctcctcaccaccgcgatgcggggctacctccgcgcgtgcctcccgctgcaagccctgctcttgcttcgctcggtcctgccgcgggcgccccgcctcctcgacaactccttctcgctctccctagcgatgcaggcatccgccgcgctctcggcctccgttccggctatgcgtgacctcggcctcggcgctgcgtccctccacgcgcgcgcgctcaagtccggcttcgccgcagccgacctcttcgtgcgcaccgcgctcgtcgaggcttacgccaaggcggggcgcgcggacctcgcgcgcgccgctttcgacgaggcgccgcgcagggacgtgttcctctgcaacgtcatgctcgcggcatacgttacgcgtggcgaggttgcggaggcgaggagagtgttcgatggaatgcgcgagagggacatggtctcttggaacacgatgatccatgggtatgcggtgaatggggaggtcgacctggcgagagaggtgttcaacggcatggacgacagggatgccttctcgtggagctccatgatgtcggcgtacaccaaggggcggaggtccaaggatgcgctggagctgtggcgggagatgcgcgcggcctgtgtcaacccggactgcaccaccatggtgagcgtgctctcggcgtgcagtgatatgggggcgcttgctgttggtgctgaagtgcatcagtttgtggagagcaatggggttgaattggatgtcaagcttgggaccgctctgatcgacatgtatgccaagtgcggtgacattgagaattcagtaagagtgttccactctatgccagtgaaggatgtgctgacttggagctcgatgatcatcgggttggccaatcatgggttcggccatgatgctctctccttgttctcaaggatgctatcagaaggactgcaaccaaatgaggttaccttcattggagttcttatatcatgtactcatcttggtcttgtgagcgatggcaagaaatatttcagctcaatgagtgtagtgcatggtgtaacccctaaggttcagcactatggatgcatggttgatcttttggggcgatcaggtcatattgaggaggcaaagcagcttatcagggacatgccattcgagccagatgcagtcatctggagggcacttctaggggcttgtcgcatctacaagaatgtagaagttgcagaggaagctatggcgaaactgcgagtattggatcctcatgccgatgggcactatgtcttactgtcaaacatatatgcacaggcgaattcctgggaaggtgttgcagagatgaggaggacgcttaggagggagagaatccagagaattcctggaagaagctcgattgaatggcagaatacaattcacgagtttatttctggtgatagatcgcatccaaggtccaaggagatctacaaaatgttgggagagatgatggatcgcttaaggcaagctggatataagccaatgacaggtttagtgttgcaagacattgatgagcaatctaaggaacgtgcactggctgaacatagtgagaagctggcagttgcttttgggctgctaaccactcctgcagggtcaactctccgaataacaaaaaatctcagagcttgtgaagactgccattcagctattaagcttattgccctgttatacgagcgcaagttgattattagagaccgtaaccgtttccaccatttcagtgaaggacggtgctcatgcaaggactactggtgattggcaaagtttcaaacttgtaccaaatgcaccgtgtaggagttgttatcttatttccatggtcttcacaggttttcttttagctgaacatgcatctgaaaggacttctttcaacgaacaacatatcacaatttttcttgagtcatggaagtcaaccaggggcttcaaaaacaaacaatcttacattccaacaacaacaacaaagccttttatcccaagcaagttggggtaggctagagaaacatagagaccaggaccagaaagctgcctgacgaaaccgcacggccggaaggaagaggcgatgatccaataattgggatcgcgcacgccacctccacgaatcaaagggcattttatccagtgtggtcggggtgtggcaccagccgccgtccgatcatcgggggctgacggctgggatgtcgcacgtggcgtgtcgtccccggatgggcaacggctgtcagcagatctggaaggagaaggacccgaccggtcggcgtctgaccacctcaggatcttttttatttggattattagattatttttagtgttatataataattgatcgattgatgtgtacagcaataataaataaaataagaggcacgagtaca

SEQ ID NO: 22853 - DNA, 2360 bp, Zea Mays
cctctcacctaatcaatacaggcatcggatcctcctctgctctgccgctctggagagagtgaggcgtcgactctagctcgacgcagcaggcgccccctagtcgccacccctgccgctgccaaggagacctcccccgccctgcaaatcatctcacgaaggaggttcgaatgtttttggggtacatgctggccaatgctataggattcgagggctgatgcaacgggattcgagggctcatggttaggatggacgctcctgattccctacgaaggtggtttctattggccctaaacatgattgcgcaagcactagcaaggtgacaggaaaggaagcttctgcagcttggattgccaatagagtgaagcctatgttgattaaagagccagggcttggtgcaagagaaatgcagtataggttggaggatcagttcacagtcactttgtcatataacaaggtctgggaagggagaaagttggcactaaaggaacttcatggtacatgggaggatagcttcaagttgctatggaattggaaagcagccgttgaggcaacttgtcctggaagtctcattgagattgattgcaagaaggtaaagggacagatgcacttctcaaagatgtttgtggctttacggccttgtgtcaatggatttcttatgggatgtcggccttatcttggagtagactcaactcatttgactggaaagtaccttggacagcttgcttcagcgacagccatagatggacataactggatgtatccagtagcatatgccatatttgacaaagaaacaaatttgaattggaaatggtttatgacactcctgaagagggctattggaacacccccaggtttgaccatacacactgatgcatgcaagggtcttgcatatggggtgtcacaagtgtttggtgatgcagctgaacatagggagtgttttagacacctcatggctaatttcaggaggaagtacaatggtgaggtgctgaaatacatgtggccttgcgcatgggcatgcacacatgagagacatcaagtacttatggataaaatttcagaaacttgtccaaatgctgtcgcatatcttagatatgaccacccacacttatggacaagagccaaattcaataaaatctgcaaggtggattacgttaataacaacatttcagaatgtttcaacaattggattaaaaatgtgaaggagttgcctgcagttgatctcatggacatgctcagggtgatgataatggagaagattgctacaagacagtccatagccaataaaatgcaaggccacatcctacctagtgtagttaatgatctgcatgagaagagtaggaatcttcgatataccatcactaaaagtgggtacatgaagggtgaggtttctggtgctagtagagatggtgttgcttggagatatggagtaaaccttgttactcaggcttgttcatgtggacagtgggatgtaactggaaaaccatgcactcatgccatagcattcataacttctcaacgaaatttgagaatcgaggactatgttggagaatgttattcggttcaaaggtttaaagatgcataccaatttgaggtgtatccaatgggagacaggttacagtggccgaaattggacccaggattcgaaatgaggccaccaaaacttgagggcaggcctgctggcagaccaagaaagaaaagaatcaagagtgctggagagccaggtaagagagggccatatcaatgcaagaggtgcttccagtatggccacattgaaaaaggatgcaaaaatccagtggtggagccacatgaagaccttccagacaaccatttgcagagaaagacaaaaaaaggcaccaaaaaaaggaagaaaagtgagccagaacagacttcaacttcacttgttcaaatatcgccatctagttctggaccaatgacaaggagaagggtggcgatgtccccaacctgcagctcaccttcagccagcaagcaaggagaagcaccggcttcaagcaaaaggagattaattatctagctgactgtgatggattgtatgtcatttgcatgtgtttgctacttatgcgatggacgtgtaagccatatattgtattttattgttagaatcaggcacccctgaattatattgttgcaaagtatcgattgggagagaggagggcaagagtgtcttttcccatgggctgctgggttaaaaaaaagaaaataattcaaaacagcctccgaactggttttgtggtagatttctaaataatcgagtctttgcatggtattaaagtgtaccaggaaagttagatggtagatttctaaagacgagatctttcggtgccaagaaaccaattttccca

SEQ ID NO: 22854 - DNA, 2316 bp, Zea Mays
cctctcacctaatcaatacaggcatcggatcctcctctgctctgccgctctggagagagtgaggcgtcgactctagctcgacgcagcaggcgccccctagtcgccacccctgccgctgccaaggagacctcccccgccctgcaaatcatctcacgaaggaggattcgagggctgatgcaacgggattcgagggctcatggttaggatggacgctcctgattccctacgaaggtggtttctattggccctaaacatgattgcgcaagcactagcaaggtgacaggaaaggaagcttctgcagcttggattgccaatagagtgaagcctatgttgattaaagagccagggcttggtgcaagagaaatgcagtataggttggaggatcagttcacagtcactttgtcatataacaaggtctgggaagggagaaagttggcactaaaggaacttcatggtacatgggaggatagcttcaagttgctatggaattggaaagcagccgttgaggcaacttgtcctggaagtctcattgagattgattgcaagaaggtaaagggacagatgcacttctcaaagatgtttgtggctttacggccttgtgtcaatggatttcttatgggatgtcggccttatcttggagtagactcaactcatttgactggaaagtaccttggacagcttgcttcagcgacagccatagatggacataactggatgtatccagtagcatatgccatatttgacaaagaaacaaatttgaattggaaatggtttatgacactcctgaagagggctattggaacacccccaggtttgaccatacacactgatgcatgcaagggtcttgcatatggggtgtcacaagtgtttggtgatgcagctgaacatagggagtgttttagacacctcatggctaatttcaggaggaagtacaatggtgaggtgctgaaatacatgtggccttgcgcatgggcatgcacacatgagagacatcaagtacttatggataaaatttcagaaacttgtccaaatgctgtcgcatatcttagatatgaccacccacacttatggacaagagccaaattcaataaaatctgcaaggtggattacgttaataacaacatttcagaatgtttcaacaattggattaaaaatgtgaaggagttgcctgcagttgatctcatggacatgctcagggtgatgataatggagaagattgctacaagacagtccatagccaataaaatgcaaggccacatcctacctagtgtagttaatgatctgcatgagaagagtaggaatcttcgatataccatcactaaaagtgggtacatgaagggtgaggtttctggtgctagtagagatggtgttgcttggagatatggagtaaaccttgttactcaggcttgttcatgtggacagtgggatgtaactggaaaaccatgcactcatgccatagcattcataacttctcaacgaaatttgagaatcgaggactatgttggagaatgttattcggttcaaaggtttaaagatgcataccaatttgaggtgtatccaatgggagacaggttacagtggccgaaattggacccaggattcgaaatgaggccaccaaaacttgagggcaggcctgctggcagaccaagaaagaaaagaatcaagagtgctggagagccaggtaagagagggccatatcaatgcaagaggtgcttccagtatggccacattgaaaaaggatgcaaaaatccagtggtggagccacatgaagaccttccagacaaccatttgcagagaaagacaaaaaaaggcaccaaaaaaagaaaagtgagccagaacagacttcaacttcacttgttcaaatatcgccatctagttctggaccaatgacaaggagaagggtggcgatgtccccaacctgcagctcaccttcagccagcaagcaaggagaagcaccggcttcaagcaaaaggagattaattatctagctgactgtgatggattgtatgtcatttgcatgtgtttgctacttatgcgatggacgtgtaagccatatattgtattttattgttagaatcaggcacccctgaattatattgttgcaaagtatcgattgggagagaggagggcaagagtgtcttttcccatgggctgctgggttaaaaaaaagaaaataattcaaaacagcctccgaactggttttgtggtagatttctaaataatcgagtctttgcatggtattaaagtgtaccaggaaagttagatggtagatttctaaagacgagatctttcggtgccaagaaaccaattttccca

SEQ ID NO: 22855 - DNA, 3668 bp, Zea Mays
gttaagttggctggtctgatcactgagagatgtgcggggtctccattggcagcaaaagcaatagggtctgtactgcgtaacaagaccactgatggagaatgggaggatgtgttacaacgaagcaccatatgtaatgatgagactggaattttgcctatactcaagcttagttataatgacttgccaattgacatgaagcaatgttttgccttttgtgctctatatccaaaggattatcatattgatgtggacaaacttatccaactatggatggccaatggttttatctcggatcaagaaaatgaacctgctgaaaccataggtaaaaggattgtcaatgagttggtctcaaggtcctttttccaatatgaggagcaaactatgatcggatacaattctactacatttttgaagattcatgacctcatgcaggaggttgcactgtctgtttcggaaaaggagtgtgcttgtgtaacggataaattcattacaaatagtgagttgcttccaagtgctgcccgccacatacttattcaaacatggagtaacaaacggatacatggttatttatatggttttatgaggaaattgtctcgacctatccaaacattgatgtttgatgggtcttgtgaagatgccgttgtgcaacatttatcaagacatagttctttgcgagtactttccatgccaggattttggtttcgttttccaataaaaccaaagcatatgtgccaccttaggttccttgatgtcacgggtagtagaatcaaagaacttccatatgacataagcatcctttataatcttcagacactcaaactttctggatgcaggaatcttattagacttcctgagcaaatgaagcacatgagtgcccttcgtcatctctacacagatgggtgcacaaggttggagtgcatgcctccagatcttggacaaatcacctcgcttcgaacaattacatggtttgtagtgggaagtggcttgagttgtagtagccttggagagctaagggatttaaatattggtggctcattaatgctaaagcagctcgaaaatgtgacagggagaagaaatgcagaagcagccaaacttgagaataagaaggaactgagacaactgtcactagagtggacaagtggtaaggaggaggaacaacagtgtcatgaggtgctagagagccttgaagctcatgatggactgttggctctagaaatatattcctaccaaggcacccgttttccatcttggatgggtatgttgaaaaacatactcgagcttcggttgttcgattgctgtaaagtagagcagcttccaccactatgtcaactagcagaactgcaactccttcatttgaaaagattgggaaatttgcggtccctgtgtagcagatgtacatcctccacatttggaaagcttaaggatcttaagctagttgatcttcacgtttttgaaggattttgtaagacaatgcatggatctacagtagcattccctcagcttgagatattgcacatcgagcgctgtggaaatctagcagctctaacagaagcatcgcattgcggtggagattatacagtggcccgctcaacatttccagaactgaagaggctcatattggaagatttgtgtagctttgagagatgggtggctggcctgcttgaaattgaagaagaacatgcactattccctgtggttgagattgttgttattagtaaatgcccaaagttaacaactgtgcctagggcaccgaaggtcaaagaactagttttgcgtgatgtacatgaacatatctctctaggagggatcagatgtatgacgtcattgtccactttgcttttggacggcgtgaagcttgatgttaaggagagatgggaccatccatcgtccgtggtagatatgcaactgtggaggtgcagtttgttcttccaaccacgcgcactagtgatgtgggtttgctattggcagctgcaagatctgacaatttatagatgtgatgagcttgtgtcctggccggagaaagtattccaaagcttgatttctttgcggaggctatggattggcaattgcaagaacctaattggatatgcagcggcgaatgtccccgaccaggcaacttctggaaggagcgagcttttgccccatctagagtatctagagatatgggggtgccaaaatctggtagagttattcaactcctcccctgctctcaagagaatggaagttagagaatgttgtaagcttgagtccctatatggcaagcaattgttggatgaagctgctagtagtaccgatgacgtgacggcatccgcacatgttgaggagaagctatcaccatcatccctagaatctctaacaatattggactgtgacaggttgtcagaggttgtcaatcttccttcgtctctcagggtaatagatattcagggttgcttcaaactacggttcatgtcagggcagctggatgcactcaataccttagcaatcaccaactgcccggagttgcgatcactggaaacatgcatcgtagatctcacgtcactggaaatcctcgctctgtgtggttgcaaaagcttggcgtccttgcctagtgcgtgggcaggacgacaagaatattcatctctccgtcagcttacgattagggagtgcccaggtataaaatcgttgccttcaactctgcagcagcgactggacaacggcctcttggattttacgaacctagattcccgtcgtcgtgaagtgcagcagcaggccacgctgaagctgaagctgaagctgaacctcatctgcaggggcacaggcaaggagcagatggcagtagtgtagtgacgctagctcatggaaaaaaggtagaacgatctgaagcaggagttacagacaatgaggaagatgcgcttgtttacagctccctaaaaaaaagagataaatgcgtcgataaggccaaccttgttcatcatttggtttggatttttcggggaaaaaggggaatcaagttggtgtaagctgtagttgctttgttctgacccttggctacctgaatgagtgggtcaaaattaaacaggcactgcgctaattaagtgctgaatcgtgtttggagtctgcacaggggtttgcaatttgggtttgcaattttctaagacaagagggagtagtcagctttcaggttcaggatcgattagtgaatagttagtgtttgtaaagatggagtacatgctagcaatgcagagatgatgattccacgcattgtcgctggtgctaataatctgcatagtattggagtaatacgacctgtacatgcatgcgtgtcgctagacctttagatttgcttgtacctgaaactgaaactcataggtgcgctcattccattgaggtgttcgatgtgggctgattgtgtcaggttcagatgcaaaccaatgtaatttcagagatagttaggataggactatgtatcagataaggtccgagaggaaaagatagtgttcagtttgttcttgtctttcataatccggtgcactcggtgttatatatagccgtgagtttgttgattatgtatctagattatatatatgccctgataagctatgatgtaaaacaatggcaaggattgatactgtgtgtaaaaaggatttttttcttttttgagttgctaacttgctattagaattgca

SEQ ID NO: 22856 - DNA, 3656 bp, Zea Mays
gagactggaattttgcctatactcaagcttagttataatgacttgccaattgacatgaagcaatgttttgccttttgtgctctatatccaaaggattatcatattgatgtggacaaacttatccaactatggatggccaatggttttatctcggatcaagaaaatgaacctgctgaaaccataggtaaaaggattgtcaatgagttggtctcaaggtcctttttccaatatgaggagcaaactatgatcggatacaattctactacatttttgaagattcatgacctcatgcaggaggttgcactgtctgtttcggaaaaggagtgtgcttgtgtaacggataaattcattacaaatagtgagttgcttccaagtgctgcccgccacatacttattcaaacatggagtaacaaacggatacatggttatttatatggttttatgaggaaattgtctcgacctatccaaacattgatgtttgatgggtcttgtgaagatgccgttgtgcaacatttatcaagacatagttctttgcgagtactttccatgccaggattttggtttcgttttccaataaaaccaaagcatatgtgccaccttaggttccttgatgtcacgggtagtagaatcaaagaacttccatatgacataagcatcctttataatcttcagacactcaaactttctggatgcaggaatcttattagacttcctgagcaaatgaagcacatgagtgcccttcgtcatctctacacagatgggtgcacaaggttggagtgcatgcctccagatcttggacaaatcacctcgcttcgaacaattacatggtttgtagtgggaagtggcttgagttgtagtagccttggagagctaagggatttaaatattggtggctcattaatgctaaagcagctcgaaaatgtgacagggagaagaaatgcagaagcagccaaacttgagaataagaaggaactgagacaactgtcactagagtggacaagtggtaaggaggaggaacaacagtgtcatgaggtgctagagagccttgaagctcatgatggactgttggctctagaaatatattcctaccaaggcacccgttttccatcttggatgggtatgttgaaaaacatactcgagcttcggttgttcgattgctgtaaagtagagcagcttccaccactatgtcaactagcagaactgcaactccttcatttgaaaagattgggaaatttgcggtccctgtgtagcagatgtacatcctccacatttggaaagcttaaggatcttaagctagttgatcttcacgtttttgaaggattttgtaagacaatgcatggatctacagtagcattccctcagcttgagatattgcacatcgagcgctgtggaaatctagcagctctaacagaagcatcgcattgcggtggagattatacagtggcccgctcaacatttccagaactgaagaggctcatattggaagatttgtgtagctttgagagatgggtggctggcctgcttgaaattgaagaagaacatgcactattccctgtggttgagattgttgttattagtaaatgcccaaagttaacaactgtgcctagggcaccgaaggtcaaagaactagttttgcgtgatgtacatgaacatatctctctaggagggatcagatgtatgacgtcattgtccactttgcttttggacggcgtgaagcttgatgttaaggagagatgggaccatccatcgtccgtggtagatatgcaactgtggaggtgcagtttgttcttccaaccacgcgcactagtgatgtgggtttgctattggcagctgcaagatctgacaatttatagatgtgatgagcttgtgtcctggccggagaaagtattccaaagcttgatttctttgcggaggctatggattggcaattgcaagaacctaattggatatgcagcggcgaatgtccccgaccaggcaacttctggaaggagcgagcttttgccccatctagagtatctagagatatgggggtgccaaaatctggtagagttattcaactcctcccctgctctcaagagaatggaagttagagaatgttgtaagcttgagtccctatatggcaagcaattgttggatgaagctgctagtagtaccgatgacgtgacggcatccgcacatgttgaggagaagctatcaccatcatccctagaatctctaacaatattggactgtgacaggttgtcagaggttgtcaatcttccttcgtctctcagggtaatagatattcagggttgcttcaaactacggttcatgtcagggcagctggatgcactcaataccttagcaatcaccaactgcccggagttgcgatcactggaaacatgcatcgtagatctcacgtcactggaaatcctcgctctgtgtggttgcaaaagcttggcgtccttgcctagtgcgtgggcaggacgacaagaatattcatctctccgtcagcttacgattagggagtgcccaggtataaaatcgttgccttcaactctgcagcagcgactggacaacggcctcttggattttacgaacctagattcccgtcgtcgtgaagatcggcctccacgacggctgcttgggtgtctcttcctcctgcctttattttgtctggtctcaagggccaaatgttgctttgtctctgattaacattatgagcggcacgtcaccgggtgatatgcagtgcagcagcaggccacgctgaagctgaagctgaagctgaacctcatctgcaggggcacaggcaaggagcagatggcagtagtgtagtgacgctagctcatggaaaaaaggtagaacgatctgaagcaggagttacagacaatgaggaagatgcgcttgtttacagctccctaaaaaaaagagataaatgcgtcgataaggccaaccttgttcatcatttggtttggatttttcggggaaaaaggggaatcaagttggtgtaagctgtagttgctttgttctgacccttggctacctgaatgagtgggtcaaaattaaacaggcactgcgctaattaagtgctgaatcgtgtttggagtctgcacaggggtttgcaatttgggtttgcaattttctaagacaagagggagtagtcagctttcaggttcaggatcgattagtgaatagttagtgtttgtaaagatggagtacatgctagcaatgcagagatgatgattccacgcattgtcgctggtgctaataatctgcatagtattggagtaatacgacctgtacatgcatgcgtgtcgctagacctttagatttgcttgtacctgaaactgaaactcataggtgcgctcattccattgaggtgttcgatgtgggctgattgtgtcaggttcagatgcaaaccaatgtaatttcagagatagttaggataggactatgtatcagataaggtccgagaggaaaagatagtgttcagtttgttcttgtctttcataatccggtgcactcggtgttatatatagccgtgagtttgttgattatgtatctagattatatatatgccctgataagctatgatgtaaaacaatggcaaggattgatactgtgtgtaaaaaggatttttttcttttttgagttgctaacttgctattagaattgca

SEQ ID NO: 22857 - DNA, 2044 bp, Zea Mays
cttcccccgccgctctcgcttgcccgtcgactatacaattccactgcggggcaggggtccagctccttatcctgtccccctcccacctttcccttcccccgctgctctcgattgcccgcgcaccgagtttcctgcctgctcgctccgctgctctcctcgactcctcctgcgtaccgaccggtccgaggcacgccgcggcgaaggctccgccggtcaggtcgtcgttaggttggttggttgggtcgcgggcatgtccacggcggtggcgcggccggcgcacggcggattccggcggtcggggagcgggaagccggatccggacgaggcggacaggatgatgcagagcgccaacgggtacttggtccaagaagaggaggaggaagagcatggcgatgaggcggcggcgaggagagaggatgaggacgaggcggaggcggtgtcggaggcctcgtcgatcggggcggcgttgtccgacagctcctcctctatcggggagaactccgcatccgacaaggaggaggaggaggaggtggagagcacggcgcaggggctcggcatgatggggctggccacgctcgaatccttggatgatgccctgcatccaatactcggccgcggcgacgaccgcggtggtgggcagctgcgtctcccagagccgccgcacgtcgaagtcgaggtatatcgtgcgcggcacgcagcgcgggagcaggccgtcgaggttgttccgcgcgtagttgagcggcgcctcaagcgcggcgcgcacggacgcggagatgagcccggcgaccgcgtcagcgcggaacgggtagatctcgaagctcagggacgggaaggaggccgccacgacggcccggagcccggcggccaccggcgcgccgctgccctccgtgtcgagcgtcatggcgatgttgaaagggaaatgtgcccttgggccatttctaagtgttttggtgatttagtgtccaacacaagtgcctaagtgtaaagaggtggacaaattataaatcaaggataaaggtatgtttctcagacttagtacattgttttatggactaatgtatagtgtctaagtgctggaaacaggaaaaatccaattgtaaatgtcttggctcgagcagccaagactctgctgagtctgggagcaccggactgtccggtggtgcaccggacagtgtccggtgcgccaggctggtgcgagcgaagtggccgctctcgggaattcaccggcgacgtacggctataattcactggactgtccggtgtgcactgtactgtccggtgaagccaacggtcggccgcgcaatctgcgcgggacacgtggccgagccaacagctagaagatgacaccggactgtccggtgtgcaccggacatgtccggtgcgccaacggctctcagcctgccaacggtcggcttcgctatttaaggaaggaaatcgggcaccggacagtgtccggtgtgcaccggactgtccggtgcgccagtcgacagaaggcaagatcagccttcctagattgctctcaacggctcctagctgcctttgggctataaaagggacccctaggcgcatggaggatgacaccaagcattcctacaacatctctaagcaccaagacctcgattccgcgcatttgtttcattgtgatagcatatagagctctagtggagttgtgaactcattgagttgtgttgcgaactcttgttgcgacttgtgtgcgtgttgacactctgattcttgtgtcttgtgtgcattgctaatccctcccttgctctgtgcttctttgtggatttcaagtgtaagggcgagaggctccaagttgtggagattcctcgcaaacgggattgagaaaagcaagcaaaacaccgtggtattcaagtgggtctttggaccgcttgagaggggttgattgcaaccctcgtccgttgggacgccacaacgtggagtaggcaagcgttggtcttggccgaaccacgggataaccactgtgccatctctgtgattgatccttgttggttattgtgttttgttgaggattcctctctag

SEQ ID NO: 22858 - DNA, 1178 bp, Zea Mays
aagcccctcctcactccccaagtcctcccgtgtcatcgccattcacctccagccaggctccggaaccttatcaccaaaatcctcgtcccctacccgaggcgagcatcatggcggccgcgctcttctccagctcgctctcgccccgcttcctcgccctatcctccccgaagccggccgcgcccgcggccacagccttcctccccttcaggctgccgccgcgcgctgtctcggcgccgggtaggcgggtcttcgagcccgtcgccgtcgcggtgtcgtcggagtacaagacggagggcgcggagcaggagggggaggatggatccgaggagttctccgaggacctgaagctgttcgtcggcaacctaccgttcagcgtcgacagcgcgcagctcgcagggctcttcgagcaggccggctccgtcgagatggtcgaggcatttcaaggaagacaactgagggtgaactgcgggccaccgccacctagagatgaatccacaccaagagcaccaaggggtggtggtggcggcggcggcggcggctttgtcgattcagctaacaaggtctacgtggggaaccttgcgtggggcgttgacaactcgactctggagaacctgttcagtgagcaagggcaagtgcttgatgctaaggtcatctacgacagggatagcggcaggtcaagggggtttggtttcgtcacctatggctccgcccaagaggtcaacaatgccatatcaaacctcgatggcatcgacttggatggtagacagatccgagtcacggctgcggagtcaaagccgagacgtcaattttgagattattttcttatgggggtttagaggctgatagtgtgtttcaaaacttttagtttgtagtgtctattctttcctccatatgagtaccaagaagatgataatgagagactggctgtgaaatggctgtatacaggaagacttttccccgctggaaagatgcatttatttgtttcagctgtaccacaaaattggcagttcaaatttcccttccatctactcactttattttaaattataagagaatttagcttttctaaatactagcttttgctatgtgtacgccatatgtagatgtataggaaaaacaatgtttctgagatatttaagaaggacaacaactaatatgccagcaatcattaaatgcaa

SEQ ID NO: 22859 - DNA, 1457 bp, Zea Mays
aagcccctcctcactccccaagtcctcccgtgtcatcgccattcacctccagccaggctccggaaccttatcaccaaaatcctcgtcccctacccgaggcgagcatcatggcggccgcgctcttctccagctcgctctcgccccgcttcctcgccctatcctccccgaagccggccgcgcccgcggccacagccttcctccccttcaggctgccgccgcgcgctgtctcggcgccgggtaggcgggtcttcgagcccgtcgccgtcgcggtgtcgtcggagtacaagacggagggcgcggagcaggagggggaggatggatccgaggagttctccgaggacctgaagctgttcgtcggcaacctaccgttcagcgtcgacagcgcgcagctcgcagggctcttcgagcaggccggctccgtcgagatggtcgaggttgtatatgacagaatgactggacggagccgaggatttggattcgtgacaatgtcttcggccgaagaagccgaagctgctgtcgagcagttcaacggttatgtgaggatactttcactcttttaagctaactgtctcttttggtatgttactgaggaaaaatatgtggcagcagtgctgataatgccagttcttaggattttcggattcggggtttgcactaaagcttgcattgctcggaaacctgacatcggaatcataccttctatccaatcattggcatttcaaggaagacaactgagggtgaactgcgggccaccgccacctagagatgaatccacaccaagagcaccaaggggtggtggtggcggcggcggcggcggctttgtcgattcagctaacaaggtctacgtggggaaccttgcgtggggcgttgacaactcgactctggagaacctgttcagtgagcaagggcaagtgcttgatgctaaggtcatctacgacagggatagcggcaggtcaagggggtttggtttcgtcacctatggctccgcccaagaggtcaacaatgccatatcaaacctcgatggcatcgacttggatggtagacagatccgagtcacggctgcggagtcaaagccgagacgtcaattttgagattattttcttatgggggtttagaggctgatagtgtgtttcaaaacttttagtttgtagtgtctattctttcctccatatgagtaccaagaagatgataatgagagactggctgtgaaatggctgtatacaggaagacttttccccgctggaaagatgcatttatttgtttcagctgtaccacaaaattggcagttcaaatttcccttccatctactcactttattttaaattataagagaatttagcttttctaaatactagcttttgctatgtgtacgccatatgtagatgtataggaaaaacaatgtttctgagatatttaagaaggacaacaactaatatgccagcaatcattaaatgcaa

SEQ ID NO: 22860 - DNA, 2344 bp, Zea Mays
gaactaatctaagtgcctcctagaaaaagcttaaccaaagcaaacccctcgcccccacgcaaaccccgataccttcgccttttccgcccgcgccgtccgtctccgtcgatggcgatggagattccggcgcaggtgcgccgctactggctgccgatactcctattcaccgccggattcctgttccaggtcctcgtcctgccccgccacttcccgcccactcactacgacgtattgggagtggagaggttcgcgtctgtcgagcgggtcgtggaggcatacgagtcgctctccaaggagtggtatattcaaaggggagtcctcggtgtgctcaatttattgagtactggaagcaaattggcactcaattggatggaattgtcagaactgctatggtagaagttggtgattcacaagtggctggttatttcgccgaaaaacggttctcgaaacggccatttttccgtaatggtgtaccaacacttgttgcataccctgctaactgcaaaagtccatcctgttacatgaggtacccaggtgggctttttgtggattctgttgttgattgggttgcaacatcagttgtaggattgcctcggatcttgtactattcaaaggagacattgggcccccaattcattgggaagagtggcaatcataaggtcaaaactatctttttctcaagtactggagagcgtgctgctccattcgttcgccaagctgcccaagagtattcaagttattcatcatttggatttgtcctatggagagaagacgaatcccagatttggtggaattcgttaggggtggaatcggctccagcacttgttttcttgaaggggccaggcacaacgccttttgtacaccatggaatttttagcaagtcagagttcatagagatgatggaggagcacaagcaccatgaactgcgacagctaagaagtgacacatctttggaactgggttgtgatgctagaggtcattcacgtgctggcaatgatgcagcaatttggtattgtgtaattgttgctggtcgtccaggtgcagaattaagcaagaagagacaaattttgcggaaggctcaagacaaattgttaggtgatgttgacagaagtgctgggaacgttgacaattcagtagagacatcaagtgctgcaactgccttcaaagatgataggttaacctttgtttggttagatggagaagtacaaaagcaaatttgtgccttctaccttgccactgattatactggagcctgtggccctcgagactttggagatgacaatgataaacctgaaatttttattgttcgattccaaagaaatgcaacatatgaggcactgaaagctgaaaaaaagaacaatcttgtggatgttctccagggacagcatgctgatgcgtcccagttagtggcaaggtacaagggcccagttgaaattgaagagataaataggtggatctctcagattatcaaagatggagatactagagaaattccttactttacttcaaaggtgccagatcttgtaccagaggaaacaagcaaagcatggaattctaaaagtatccgctcagcagggaaaagtctaaaagagaacatcggtttccatttccaagattacctaacccacccaatgattggttcaactttgcttatgtgcggatgtatttctatgggaatattatggttcaggaacaacacacccactcaaagtactcgacaggagaaagctcggaaagacaaggcaaagaggccccgtccgaagcttagcacgtcgctcttcggtgaaccttctgtcccagacgtcgacccaaaagatgctcgtcagtgggaaatgtcaagctcggattcagactaatgactcgcttcttacatttggacctgacgtactgcaaagacgttttaaaattaagtaaactacatagtagtgcggtggccttagttttgggaaatggaacagagtataaccgatgtagtgaaaacagttggaccactgaagtaatccagttgccatctttccgatgcttcagctgccctgtgacgtgactccagggacgtatttgttgacacctgcttgaaaactgacaagcctctctattagacagagtgttaacctgtggtctcagaatggagtaaacaatggtagacagagtgttaacgtacatcatgtctgatgtaagccggcaggtattttcgtcgtgagccaaaactcggctaacgtcgtgacacggactattatttttatttttcttaaataataatcccttttcagacataccactcgcgttcgctgcagttgaatcaaactgcaggttgccaaacaccttctcagacgctgtcaatgcc

SEQ ID NO: 22861 - DNA, 2422 bp, Zea Mays
gaactaatctaagtgcctcctagaaaaagcttaaccaaagcaaacccctcgcccccacgcaaaccccgataccttcgccttttccgcccgcgccgtccgtctccgtcgatggcgatggagattccggcgcaggtgcgccgctactggctgccgatactcctattcaccgccggattcctgttccaggtcctcgtcctgccccgccacttcccgcccactcactacgacgtattgggagtggagaggttcgcgtctgtcgagcgggtcgtggaggcatacgagtcgctctccaaggagtgatccgttatgcatatgagctgttgacaaatccagttttaaagagggactatgatctttttggactggatgagcataaggatgtccttgagagagtcaaagaacaatatcaaatggtgcactttctcaaaattgatcttccattgttaaaagactctgtagtcagtttgatcgatgatgccttcaatgtactcacacatgagtcgttcatgtctgctattagtgaagaatacccgttaatcatacttgtatattcaaaggggagtcctcggtgtgctcaatttattgagtactggaagcaaattggcactcaattggatggaattgtcagaactgctatggtagaagttggtgattcacaagtggctggttatttcgccgaaaaacggttctcgaaacggccatttttccgtaatggtgtaccaacacttgttgcataccctgctaactgcaaaagtccatcctgttacatgaggtacccaggtgggctttttgtggattctgttgttgattgggttgcaacatcagttgtaggattgcctcggatcttgtactattcaaaggagacattgggcccccaattcattgggaagagtggcaatcataaggtcaaaactatctttttctcaagtactggagagcgtgctgctccattcgttcgccaagctgcccaagagtattcaagttattcatcatttggatttgtcctatggagagaagacgaatcccagatttggtggaattcgttaggggtggaatcggctccagcacttgttttcttgaaggggccaggcacaacgccttttgtacaccatggaatttttagcaagtcagagttcatagagatgatggaggagcacaagcaccatgaactgcgacagctaagaagtgacacatctttggaactgggttgtgatgctagaggtcattcacgtgctggcaatgatgcagcaatttggtattgtgtaattgttgctggtcgtccaggtgcagaattaagcaagaagagacaaattttgcggaaggctcaagacaaattgttaggtgatgttgacagaagtgctgggaacgttgacaattcagtagagacatcaagtgctgcaactgccttcaaagatgataggttaacctttgtttggttagatggagaagtacaaaagggacagcatgctgatgcgtcccagttagtggcaaggtacaagggcccagttgaaattgaagagataaataggtggatctctcagattatcaaagatggagatactagagaaattccttactttacttcaaaggtgccagatcttgtaccagaggaaacaagcaaagcatggaattctaaaagtatccgctcagcagggaaaagtctaaaagagaacatcggtttccatttccaagattacctaacccacccaatgattggttcaactttgcttatgtgcggatgtatttctatgggaatattatggttcaggaacaacacacccactcaaagtactcgacaggagaaagctcggaaagacaaggcaaagaggccccgtccgaagcttagcacgtcgctcttcggtgaaccttctgtcccagacgtcgacccaaaagatgctcgtcagtgggaaatgtcaagctcggattcagactaatgactcgcttcttacatttggacctgacgtactgcaaagacgttttaaaattaagtaaactacatagtagtgcggtggccttagttttgggaaatggaacagagtataaccgatgtagtgaaaacagttggaccactgaagtaatccagttgccatctttccgatgcttcagctgccctgtgacgtgactccagggacgtatttgttgacacctgcttgaaaactgacaagcctctctattagacagagtgttaacctgtggtctcagaatggagtaaacaatggtagacagagtgttaacgtacatcatgtctgatgtaagccggcaggtattttcgtcgtgagccaaaactcggctaacgtcgtgacacggactattatttttatttttcttaaataataatcccttttcagacataccactcgcgttcgctgcagttgaatcaaactgcaggttgccaaacaccttctcagacgctgtcaatgcc

SEQ ID NO: 22862 - DNA, 2550 bp, Zea Mays
gaactaatctaagtgcctcctagaaaaagcttaaccaaagcaaacccctcgcccccacgcaaaccccgataccttcgccttttccgcccgcgccgtccgtctccgtcgatggcgatggagattccggcgcaggtgcgccgctactggctgccgatactcctattcaccgccggattcctgttccaggtcctcgtcctgccccgccacttcccgcccactcactacgacgtattgggagtggagaggttcgcgtctgtcgagcgggtcgtggaggcatacgagtcgctctccaaggagtggctatctgaaacgagtcaccaaccaactgttgatattataaagatccgttatgcatatgagctgttgacaaatccagttttaaagagggactatgatctttttggactggatgagcataaggatgtccttgagagagtcaaagaacaatatcaaatggtgcactttctcaaaattgatcttccattgttaaaagactctgtagtcagtatattcaaaggggagtcctcggtgtgctcaatttattgagtactggaagcaaattggcactcaattggatggaattgtcagaactgctatggtagaagttggtgattcacaagtggctggttatttcgccgaaaaacggttctcgaaacggccatttttccgtaatggtgtaccaacacttgttgcataccctgctaactgcaaaagtccatcctgttacatgaggtacccaggtgggctttttgtggattctgttgttgattgggttgcaacatcagttgtaggattgcctcggatcttgtactattcaaaggagacattgggcccccaattcattgggaagagtggcaatcataaggtcaaaactatctttttctcaagtactggagagcgtgctgctccattcgttcgccaagctgcccaagagtattcaagttattcatcatttggatttgtcctatggagagaagacgaatcccagatttggtggaattcgttaggggtggaatcggctccagcacttgttttcttgaaggggccaggcacaacgccttttgtacaccatggaatttttagcaagtcagagttcatagagatgatggaggagcacaagcaccatgaactgcgacagctaagaagtgacacatctttggaactgggttgtgatgctagaggtcattcacgtgctggcaatgatgcagcaatttggtattgtgtaattgttgctggtcgtccaggtgcagaattaagcaagaagagacaaattttgcggaaggctcaagacaaattgttaggtgatgttgacagaagtgctgggaacgttgacaattcagtagagacatcaagtgctgcaactgccttcaaagatgataggttaacctttgtttggttagatggagaagtacaaaagcaaatttgtgccttctaccttgccactgattatactggagcctgtggccctcgagactttggagatgacaatgataaacctgaaatttttattgttcgattccaaagaaatgcaacatatgaggcactgaaagctgaaaaaaagaacaatcttgtggatgttctccagggacagcatgctgatgcgtcccagttagtggcaaggtacaagggcccagttgaaattgaagagataaataggtggatctctcagattatcaaagatggagatactagagaaattccttactttacttcaaaggtgccagatcttgtaccagaggaaacaagcaaagcatggaattctaaaagtatccgctcagcagggaaaagtctaaaagagaacatcggtttccatttccaagattacctaacccacccaatgattggttcaactttgcttatgtgcggatgtatttctatgggaatattatggttcaggaacaacacacccactcaaagtactcgacaggagaaagctcggaaagacaaggcaaagaggccccgtccgaagcttagcacgtcgctcttcggtgaaccttctgtcccagacgtcgacccaaaagatgctcgtcagtgggaaatgtcaagctcggattcagactaatgactcgcttcttacatttggacctgacgtactgcaaagacgttttaaaattaagtaaactacatagtagtgcggtggccttagttttgggaaatggaacagagtataaccgatgtagtgaaaacagttggaccactgaagtaatccagttgccatctttccgatgcttcagctgccctgtgacgtgactccagggacgtatttgttgacacctgcttgaaaactgacaagcctctctattagacagagtgttaacctgtggtctcagaatggagtaaacaatggtagacagagtgttaacgtacatcatgtctgatgtaagccggcaggtattttcgtcgtgagccaaaactcggctaacgtcgtgacacggactattatttttatttttcttaaataataatcccttttcagacataccactcgcgttcgctgcagttgaatcaaactgcaggttgccaaacaccttctcagacgctgtcaatgcc

SEQ ID NO: 22863 - DNA, 2387 bp, Zea Mays
cgaaagagtttgtttggacatgattagtgcttgactgaatcaccagcatcgaggctatctgaaacgagtcaccaaccaactgttgatattataaagatccgttatgcatatgagctgttgacaaatccagttttaaagagggactatgatctttttggactggatgagcataaggatgtccttgagagagtcaaagaacaatatcaaatggtgcactttctcaaaattgatcttccattgttaaaagactctgtagtcagtttgatcgatgatgccttcaatgtactcacacatgagtcgttcatgtctgctattagtgaagaatacccgttaatcatacttgtatattcaaaggggagtcctcggtgtgctcaatttattgagtactggaagcaaattggcactcaattggatggaattgtcagaactgctatggtagaagttggtgattcacaagtggctggttatttcgccgaaaaacggttctcgaaacggccatttttccgtaatggtgtaccaacacttgttgcataccctgctaactgcaaaagtccatcctgttacatgaggtacccaggtgggctttttgtggattctgttgttgattgggttgcaacatcagttgtaggattgcctcggatcttgtactattcaaaggagacattgggcccccaattcattgggaagagtggcaatcataaggtcaaaactatctttttctcaagtactggagagcgtgctgctccattcgttcgccaagctgcccaagagtattcaagttattcatcatttggatttgtcctatggagagaagacgaatcccagatttggtggaattcgttaggggtggaatcggctccagcacttgttttcttgaaggggccaggcacaacgccttttgtacaccatggaatttttagcaagtcagagttcatagagatgatggaggagcacaagcaccatgaactgcgacagctaagaagtgacacatctttggaactgggttgtgatgctagaggtcattcacgtgctggcaatgatgcagcaatttggtattgtgtaattgttgctggtcgtccaggtgcagaattaagcaagaagagacaaattttgcggaaggctcaagacaaattgttaggtgatgttgacagaagtgctgggaacgttgacaattcagtagagacatcaagtgctgcaactgccttcaaagatgataggttaacctttgtttggttagatggagaagtacaaaagcaaatttgtgccttctaccttgccactgattatactggagcctgtggccctcgagactttggagatgacaatgataaacctgaaatttttattgttcgattccaaagaaatgcaacatatgaggcactgaaagctgaaaaaaagaacaatcttgtggatgttctccagggacagcatgctgatgcgtcccagttagtggcaaggtacaagggcccagttgaaattgaagagataaataggtggatctctcagattatcaaagatggagatactagagaaattccttactttacttcaaaggtgccagatcttgtaccagaggaaacaagcaaagcatggaattctaaaagtatccgctcagcagggaaaagtctaaaagagaacatcggtttccatttccaagattacctaacccacccaatgattggttcaactttgcttatgtgcggatgtatttctatgggaatattatggttcaggaacaacacacccactcaaagtactcgacaggagaaagctcggaaagacaaggcaaagaggccccgtccgaagcttagcacgtcgctcttcggtgaaccttctgtcccagacgtcgacccaaaagatgctcgtcagtgggaaatgtcaagctcggattcagactaatgactcgcttcttacatttggacctgacgtactgcaaagacgttttaaaattaagtaaactacatagtagtgcggtggccttagttttgggaaatggaacagagtataaccgatgtagtgaaaacagttggaccactgaagtaatccagttgccatctttccgatgcttcagctgccctgtgacgtgactccagggacgtatttgttgacacctgcttgaaaactgacaagcctctctattagacagagtgttaacctgtggtctcagaatggagtaaacaatggtagacagagtgttaacgtacatcatgtctgatgtaagccggcaggtattttcgtcgtgagccaaaactcggctaacgtcgtgacacggactattatttttatttttcttaaataataatcccttttcagacataccactcgcgttcgctgcagttgaatcaaactgcaggttgccaaacaccttctcagacgctgtcaatgcc

SEQ ID NO: 22864 - DNA, 1207 bp, Zea Mays
ctcacacccgtgtcttccaccaagaggaagccgccgccgatgccgcctccgcctgcatacccgctcccgcccgcgcccgccgcgcttgccggtgcccccgccccggccaaggtttgtgtcgctactcgctagactagaattccgcgcgcggacctttgccggccgagccgttctgcggcatctcgacggggacaaccatgcgaatttccttggcgtccacgttgacgccacctgagccaccaccggtgaaggccggctggccgctgacctccgagacaggggaggcgcccgagctccacaacggccgcgggcctcgacgactgggctaaggccgagcgctcgtcgaagttggactgccgctgcgtcagccccctcgaccgctgcgacaccgacaaccagcgcaccgtgacgtggagcctatcgtcctccgccacctcggcctccatctcggcgcgcccgccctacagcgacaacacgtccgggtccacatgcagcgacgcgatggctgccgtggtgtcagggaactggtccacgatgagcgtccgcgcggcgcagaacttgaagaggaacagcagcagtgtgtaccatatgatgcactggagggcaggcttgagcacgcggccagcctcgcgaggacgaccagcttctgcagcgtgtccgctgccaggaaccggagattcatggcgtacaggtcgttggtggagatgaagtggaaggatttgaatcaagaaatcgttggagagaatgttatccaaaggaaatattttaattggccatagcttacatagagatttatgcgccttaaagattgattactctcaagttattgatacaacatacatatttaagtatgcaaatttaccgactactgcatcaccttccttgaacagtctgtgcaaggctgttttggagtatttagttcgagaagaaggagaaccacataattgcttaaaggatgcagaagctgcaatgaatctagttcttgcaaagcttaagaatgagtttaatgaccccattgaaattgctgcaagtattgtaactgaatctgattttgtgaagttgctcgctcatagaattctagtgtcttattatgactatggatgagacttttgtgatgtaattgatgagactatggatttaaatattattatgtgattgtgtgtaagatgttttatatgaaaatatattgtgctatataactgttgat

SEQ ID NO: 22865 - DNA, 1291 bp, Zea Mays
cacacccgtgtcttccaccaagaggaagccgccgccgatgccgcctccgcctgcatacccgctcccgcccgcgcccgccgcgcttgccggtgcccccgccccggccaaggtttgtgtcgctactcgctagactagaattccgcgcgcggacctttgccggccgagccgttctgcggcatctcgacggggacaaccatgcgaatttccttggcgtccacgttgacgccacctgagccaccaccggtgaaggccggctggccgctgacctccgagacaggggaggcgcccgagctccacaacggccgcgggcctcgacgactgggctaaggccgagcgctcgtcgaagttggactgccgctgcgtcagccccctcgaccgctgcgacaccgacaaccagcgcaccgtgacgtggagcctatcgtcctccgccacctcggcctccatctcggcgcgcccgccctacagcgacaacacgtccgggtccacatgcagcgacgcgatggctgccgtggtgtcagggaactggtccacgatgagcgtccgcgcggcgcagaacttgaagaggaacagcagcagtgtgtaccatatgatgcactggagggcaggcttgagcacgcggccagcctcgcgaggacgaccagcttctgcagcgtgtccgctgccaggaaccggagattcatggcgtacaggtcgttggtggagatgaagtggaaggatttgaatcaagaaatcgttggagagaatgttatccaaaggaaatattttaattggccatagcttacatagagatttatgcggtaagccttaaagattgattactctcaagttattgatacaacatacatatttaagtatgcaaatttaccgactactgcatcaccttccttgaacagtctgtgcaaggctgttttggagtatttagttcgagaagaaggagaaccacataattgcttaaaggatgcagaagctgcaatgaatctagttcttgcaaagcttaagaatgagtttaatgaccccattgaaattgctgcaagtattgtaagcgccaaaaaaagatgttcttaaatcttaccattagtatagatgatgccaccttacttctttgtggtaccttcctaggtaactgaatctgattttgtgaagttgctcgctcatagaattctagtgtcttattatgactatggatgagacttttgtgatgtaattgatgagactatggatttaaatattattatgtgattgtgtgtaagatgttttatatgaaaatatattgtgctatataactgttgat

SEQ ID NO: 22866 - DNA, 1362 bp, Zea Mays
cacacccgtgtcttccaccaagaggaagccgccgccgatgccgcctccgcctgcatacccgctcccgcccgcgcccgccgcgcttgccggtgcccccgccccggccaaggtttgtgtcgctactcgctagactagaattccgcgcgcggacctttgccggccgagccgttctgcggcatctcgacggggacaaccatgcgaatttccttggcgtccacgttgacgccacctgagccaccaccggtgaaggccggctggccgctgacctccgagacaggggaggcgcccgagctccacaacggccgcgggcctcgacgactgggctaaggccgagcgctcgtcgaagttggactgccgctgcgtcagccccctcgaccgctgcgacaccgacaaccagcgcaccgtgacgtggagcctatcgtcctccgccacctcggcctccatctcggcgcgcccgccctacagcgacaacacgtccgggtccacatgcagcgacgcgatggctgccgtggtgtcagggaactggtccacgatgagcgtccgcgcggcgcagaacttgaagaggaacagcagcagtgtgtaccatatgatgcactggagggcaggcttgagcacgcggccagcctcgcgaggacgaccagcttctgcagcgtgtccgctgccaggaaccggagattcatggcgtacaggtcgttggtggagatgaagtggaaggatttgaatcaaggttcatttattttcaggcgtggaaagtattgcagatagatgtctctattttcacgtcatcattagttgatgttcagaaatcgttggagagaatgttatccaaaggaaatattttaattggccatagcttacatagagatttatgcgccttaaagattgattactctcaagttattgatacaacatacatatttaagtatgcaaatttaccgactactgcatcaccttccttgaacagtctgtgcaaggctgttttggagtatttagttcgagaagaaggagaaccacataattgcttaaaggatgcagaagctgcaatgaatctagttcttgcaaagcttaagaatgagtttaatgaccccattgaaattgctgcaagtattgtaagcgccaaaaaaagatgttcttaaatcttaccattagtatagatgatgccaccttacttctttgtggtaccttcctaggtaactgaatctgattttgtgaagttgctcgctcatagaattctagtgtcttattatgactatggatgagacttttgtgatgtaattgatgagactatggatttaaatattattatgtgattgtgtgtaagatgttttatatgaaaatatattgtgctatataactgttgat

SEQ ID NO: 22867 - DNA, 535 bp, Zea Mays
catgtcgacgcatcaattcacatgacataatgtcatgcgtaaacaacagcatatataaatatataaactttgccctgtagtattatactcctacttttttatatataaaactaattcatattcgggctatgtaaaatgtgaaattttctttctttctttctttctttctatctagggggtagttcgactcttttctctagcacggggagaggttgggtgcccggccgtgtggtcctcctcctgccgctctggctgtcagtgcccccaccccaccggccggacccggcgtctgatcttgatcggacctgctccgcctccgccatacgcacgtcggtccgggaccagcgccgtgccccctcccgaaccacgcgcggtggcgacaccgctgcatccacggcaccgtactcgtacacaccacgagcaagcaagcaagtccaccagcacgctgcgacgctcctgttctctgatggcgcggacaaaggagagccagacacagctactgcagctgcaggcaatggcaatttggcattgacaa

SEQ ID NO: 22868 - DNA, 602 bp, Zea Mays
atgaagatgagtgcgtgcgtgtgtcgaaccttggccttggggatgaccttgacggctacgtcctggcccttgtgctcgcccttcttggccttggcggagcacgtgtagccgaagtgaccgcggccgacctcctcgccgaggtcgtactttgcgaagaagtgcttcgagaagccgaagctcttgtccaggccgagctccggctcgccgccctcggggatggacgcctcgttgggcttgaccgagccgtgccgccgcgcgaggagagcgcggatgtgcttggcgggcgacggcggtgggaaagggcgcttgaacccgccgcgcgccggcgtggacgcgacgctcgagttcgccggcgagcccttgtagctggacggcgggagcgggctcggcaggtagaacgggaacttgggctgcttcggcgtgcccggcttcgccgtgggcgcggccgccgacggcgaggtcggcccgtccccactgtcacccgctccggaggctacatggggatcctcctccgcctcggcctccgggatttgcgtcggcttgccatggcaaagccccatggaccgaatcaagagctggaggagagctctagctcaacgacg

SEQ ID NO: 22869 - DNA, 1552 bp, Zea Mays
cttatattagctaaaaggatgaagtggtcaaacagtagaaggccacaccaaatcggcatatcaatcaaaaaccatcactgggtagtgttcttactgtgacagcgaggtagtgagtgcttcctcctctacagagatacaatacaactgccacatctccagctcaccataatgcggaacttcgaattacccgcattttgacaaataaccacccaagcattttgacaaaggcgagtcaaaggtcagagtgtcatttcagggtaatgtcaaatatgactcctccaagatttgagatggttgttctcgttccattcacttcttcaagacacattccatgcttttcggcttccttgagtaatgtcaaataatacccgagtttgttacaagtacaatatagacaaacaattgcataatatctctgacaaacacgctgacaaaggaatgggtgacatacgaattgtttgcctgtgaaccacaaggacttctgcgactgtatatgccattcgtaagtaaaaatttggctacaaagtacaaacctcttcaatgtttagatccatgagatccatggtttatagattcatataatgtctcagttagttggagatgctatgtacttctccctgccttttttctctgaggtactcagggacatgtacagattacaactttctaatctaactgatgcatagcctgaaattttttacaaatgggtattctcatctcagctacctttttctgttaagtggttcaaaacgctgtcttaaggactcctggggaaagcctcccccaaaatatttatttaataaccgaaaatctcacccacagggtcatgaaaaggccacaaatcctaactcatggaaagtatggtaaacagtatttgctgacaatttttacgtgtaaaaaaaagacaactcatctgttcgaataaaaatgggaggacgaaaatacatacactttagttcgggatacataagccaatatgaatttgcatttaccagcttgaatacgaaaaatcctctctggagtatcaaagaggcaggaaatgctagattgttggaagctttctgcgagtcaaggtccacaagctgcaaggattgctatataacaaatgaatagaagacaaaggccagagccttaaaataaaataaaaaaacagttaagtatggaaatttcaaggatcaagatcaaatccaccaggacgtttttcaataataccgcttaaatgatctgagtttccccactctagtttctcggatgtcaacactgcaatagaactacaattatagatctcattatcaaacatatttgaatgtagaagttaaggggtggcaatcctctaacctgcatgtgcattctcagaacatgactgcaactctatattttcccttataatctgtgaagttattatattcactataaatatgtgcggcacttgaattgaataataaggaatgatgcgagtataaaaggtaactgcatcatttatgatttaccactcttctggcgcttcattcaagacatagacagtacagtggacagaaaggtacgcagcgac

SEQ ID NO: 22870 - DNA, 663 bp, Zea Mays
tataacaaggcccttcatttgtttggtcacgaggaactagaatgacaggaaagattctcatataagataaggcaaaagtggtcctatgtcacatgaatgtgtaatgaacatccagtgttgctgctataaggccaaaataagaaaatgaacaaaaacacctgtcacaacaatctggagcgccactgcatctagtaaaacaaggcagcaaggcatgaagcacacacatactacagactccagtaacagctgattcagcaaatgaaagagcaagcacagaatttatcaccgataactgcatccactgtacaagcactgcaggatcaaagagaacacttgtgttgcaggtagcgatataaaaaaaagcgaacatattgagcagtaaaatactgcattcaatcaaccatgcccggcgatccttatgctaggtccccactccccagtaccctttgtactaaatcctcagttcctcttcatcagccggaggctgaattttttgtaataatgaatggttgagtgcaaaactctcgaagctgaaaatttacaagcaccctagttcaagaaagtaacaatttaccagaaaaacaactgcatcacccattttccggaacacaaatccattaatctcaaaggaaagaagcctatgacgagcaagaagcactaact

SEQ ID NO: 22871 - DNA, 364 bp, Zea Mays
atccatcttctctcaaacgagtccacatccacatcggcgtgctcccgagccctgaacgctgtccctgacccgttcacccgtcgcaggcgagcagcagacagccagaggagacgtcgcgcctgtgcctaccatggacgagaaggagttctggcgcatgctcgacctcttccccgtcgtccgctcccgtgactattgcgctgatcctggaacatctatcagaggaaccagacagcgatcacgagttcaggaggcagcgaagggcaatgacaaggactcatccgacgcacaagatttatttatgcagaagttgaagatggctgcagagaaaaagctcctgttggtctgagtggttgagagtgagagg

SEQ ID NO: 22872 - DNA, 2160 bp, Zea Mays
caccattctaaaaaaaatccccgatctactacctttctcctcctctctcacggtctcacctctagtttccaggatgacaaaatatgggatcagattcgattcgtgagcctgtagaacaaggatgctcctccaatccatactaaattgaacccacgcagcagacatccgcgcgcagtacgtccccttcgcgaagcaccgccatcctcaccacgccgccgagtcgggcggcgcatgcgccatggcgttcctattcggcgcattcctgggcctggtggtgggcgtggccgtcgtgatggcgttcgcgcgattcgagaacagccgcgccgagcagcgccgtgagctggctgctacagctgcagctttctcgaagttgactgtacaggatttgaggaagctcatcccacccgagttttatccatcatgggtttcattcacacaaaagcagaagcttaaatggctgaatcaagagctgacaaaaatctggccatttgtcaatgaggctgcatcagagttgatcaaaacttctgtggagcctatttttgagcagtacaagtcattcatcctggcctccctccatttctcaaagttgacacttggtactgttgctcctcagtttactggtgtttcaatcttggagagtgatgattctgccatcatcatggaacttgagttgcaatgggatggcaatcccaatatagtacttgacatccaaacaacacttggaatttctcttcctgtacaggtgaaaaatattggattcacaggagtacttcggctcatatttaaaccgctggtgtctgaattcccctgttttggagctgtttgctgttctttaagggagaagagcaaggtggaatttaccctcaaggttattggtggcgaaatgactgctattccaggaatttctgatgcaattgaggggacaatacgtgatactattgaggatacactgacatggccgaatcgcataattgttcccattgtacctggagactatagtgacttggagttgaaacctactggggtattagaagtaaaactggtggaagctagggacctaaagaacaaggatcttgtgggaaagtcggacccttttgcattgatatacatacgtccattgcatgataaaacaaagaaaagcaaaacaattaacaatgatttgaatcccatctggaatgagcactatgaatttgtggttgaggacatatctacgcagcacttgactgtaaaaatttatgatgatgaaggactccaatcatcagagatcattgggtgtgctcgagtagacttagctgatatacagccaggaaaagtgaaggatttatggttagatcttgtgaaggacctggaaattcaacgagacaagaaacctcgtggtcaggttcacctggagctcctctactacccttacgcgaagcatgaaggggttcctaatccttttgctaatcagattcaactaacttcattggagaaggttctcaaaaccgagtctaatggatatgatattaatcagaggaaaaatgttattatgagaggagtcctttcggtgacggtcatatctgcagaggagttgccacctatggacattggtggcaaggctgacccatttgtggtcctgtacttaaagaagggagaaaccaaaaagaagacaagggttgtgacagacacgctaaatccaatatggaaccagacatttgatttcatggtagaagatgcactgcatgatttgctcatggtggaagtatgggaccatgatacatttggaaaggtgaattccaagatacctttgtcttgcaaggtgccaaatcgggaaaactaaacttgcatttcaagtggacgccacagccaatctatcgtgatcgtgacagggatcagtgagacttgtaaacgaaaaaggccgataaacacttatccccaacggtgctatgtatattagtcgttctgtatttacaaaatcccacggttcttatagccacgtgaccaaaaagagatcaacccaccgacctgtattttctcctttgtgatgcaagtcagcaagtgcatggacctgtatatttgagtcgttaatgaataggaaatgctgttactatgctgcaagcacatatatgcttagtggtgccgtggtggtggttgcttctgtgctgctgtttgttcttccgg

SEQ ID NO: 22873 - DNA, 2112 bp, Zea Mays
caccattctaaaaaaaatccccgatctactacctttctcctcctctctcacggtctcacctctagtttccaggatgacaaaatatgggatcagattcgattcgtgagcctgtagaacaaggatgctcctccaatccatactaaattgaacccacgcagcagacatccgcgcgcagtacgtccccttcgcgaagcaccgccatcctcaccacgccgccgagtcgggcggcgcatgcgccatggcgttcctattcggcgcattcctgggcctggtggtgggcgtggccgtcgtgatggcgttcgcgcgattcgagaacagccgcgccgagcagcgccgtgagctggctgctacagctgcagctttctcgaagttgactgtacaggatttgaggaagctcatcccacccgagttttatccatcatgggtttcattcacacaaaagcagaagcttaaatggctgaatcaagagctgacaaaaatctggccatttgtcaatgaggctgcatcagagttgatcaaaacttctgtggagcctatttttgagcagtacaagtcattcatcctggcctccctccatttctcaaagttgacacttggtactgttgctcctcagtttactggtgtttcaatcttggagagtgatgattctgccatcatcatggaacttgagttgcaatgggatggcaatcccaatatagtacttgacatccaaacaacacttggaatttctcttcctgtacaggtgaaaaatattggattcacaggagtacttcggctcatatttaaaccgctggtgtctgaattcccctgttttggagctgtttgctgttctttaagggagaagagcaaggtggaatttaccctcaaggttattggtggcgaaatgactgctattccaggaatttctgatgcaattgaggggacaatacgtgatactattgaggatacactgacatggccgaatcgcataattgttcccattgtacctggagactatagtgacttggagttgaaacctactggggtattagaagtaaaactggtggaagctagggacctaaagaacaaggatcttgtgggaaagtcggacccttttgcattgatatacatacgtccattgcatgataaaacaaagaaaagcaaaacaattgactccaatcatcagagatcattgggtgtgctcgagtagacttagctgatatacagccaggaaaagtgaaggatttatggttagatcttgtgaaggacctggaaattcaacgagacaagaaacctcgtggtcaggttcacctggagctcctctactacccttacgcgaagcatgaaggggttcctaatccttttgctaatcagattcaactaacttcattggagaaggttctcaaaaccgagtctaatggatatgatattaatcagaggaaaaatgttattatgagaggagtcctttcggtgacggtcatatctgcagaggagttgccacctatggacattggtggcaaggctgacccatttgtggtcctgtacttaaagaagggagaaaccaaaaagaagacaagggttgtgacagacacgctaaatccaatatggaaccagacatttgatttcatggtagaagatgcactgcatgatttgctcatggtggaagtatgggaccatgatacatttggaaaggattacatagggaggtgcatcttgacactgacgagagttatactcgaaggtgaattccaagatacctttgtcttgcaaggtgccaaatcgggaaaactaaacttgcatttcaagtggacgccacagccaatctatcgtgatcgtgacagggatcagtgagacttgtaaacgaaaaaggccgataaacacttatccccaacggtgctatgtatattagtcgttctgtatttacaaaatcccacggttcttatagccacgtgaccaaaaagagatcaacccaccgacctgtattttctcctttgtgatgcaagtcagcaagtgcatggacctgtatatttgagtcgttaatgaataggaaatgctgttactatgctgcaagcacatatatgcttagtggtgccgtggtggtggttgcttctgtgctgctgtttgttcttccgg

SEQ ID NO: 22874 - DNA, 2264 bp, Zea Mays
ccattctaaaaaaaatccccgatctactacctttctcctcctctctcacggtctcacctctagtttccaggatgacaaaatatgggatcagattcgattcgtgagcctgtagaacaaggatgctcctccaatccatactaaattgaacccacgcagcagacatccgcgcgcagtacgtccccttcgcgaagcaccgccatcctcaccacgccgccgagtcgggcggcgcatgcgccatggcgttcctattcggcgcattcctgggcctggtggtgggcgtggccgtcgtgatggcgttcgcgcgattcgagaacagccgcgccgagcagcgccgtgagctggctgctacagctgcagctttctcgaagttgactgtacaggatttgaggaagctcatcccacccgagttttatccatcatgggtttcattcacacaaaagcagaacttaaatggctgaatcaagagctgacaaaaatctggccatttgtcaatgaggctgcatcagagttgatcaaaacttctgtggagcctatttttgagcagtacaagtcattcatcctggcctccctccatttctcaaagttgacacttggtactgttgctcctcagtttactggtgtttcaatcttggagagtgatgattctgccatcatcatggaacttgagttgcaatgggatggcaatcccaatatagtacttgacatccaaacaacacttggaatttctcttcctgtacaggtgaaaaatattggattcacaggagtacttcggctcatatttaaaccgctggtgtctgaattcccctgttttggagctgtttgctgttctttaagggagaagagcaaggtggaatttaccctcaaggttattggtggcgaaatgactgctattccaggaatttctgatgcaattgaggggacaatacgtgatactattgaggatacactgacatggccgaatcgcataattgttcccattgtacctggagactatagtgacttggagttgaaacctactggggtattagaagtaaaactggtggaagctagggacctaaagaacaaggatcttgtgggaaagtcggacccttttgcattgatatacatacgtccattgcatgataaaacaaagaaaagcaaaacaattgtaagtgcattctcttgtttaaggcagatgaatgtcatcctaacttattcttctgcagaacaatgatttgaatcccatctggaatgagcactatgaatttgtggttgaggacatatctacgcagcacttgactgtaaaaatttatgatgatgaaggactccaatcatcagagatcattgggtgtgctcgagtagacttagctgatatacagccaggaaaagtgaaggatttatggttagatcttgtgaaggacctggaaattcaacgagacaagaaacctcgtggtcaggttcacctggagctcctctactacccttacgcgaagcatgaaggggttcctaatccttttgctaatcagattcaactaacttcattggagaaggttctcaaaaccgagtctaatggatatgatattaatcagaggaaaaatgttattatgagaggagtcctttcggtgacggtcatatctgcagaggagttgccacctatggacattggtggcaaggctgacccatttgtggtcctgtacttaaagaagggagaaaccaaaaagaagacaagggttgtgacagacacgctaaatccaatatggaaccagacatttgatttcatggtagaagatgcactgcatgatttgctcatggtggaagtatgggaccatgatacatttggaaaggattacatagggaggtgcatcttgacactgacgagagttatactcgaaggtgaattccaagatacctttgtcttgcaaggtgccaaatcgggaaaactaaacttgcatttcaagtggacgccacagccaatctatcgtgatcgtgacagggatcagtgagacttgtaaacgaaaaaggccgataaacacttatccccaacggtgctatgtatattagtcgttctgtatttacaaaatcccacggttcttatagccacgtgaccaaaaagagatcaacccaccgacctgtattttctcctttgtgatgcaagtcagcaagtgcatggacctgtatatttgagtcgttaatgaataggaaatgctgttactatgctgcaagcacatatatgcttagtggtgccgtggtggtggttgcttctgtgctgctgtttgttcttccgg

SEQ ID NO: 22875 - DNA, 1057 bp, Zea Mays
gtttgccacggtagtatcgtaggagcagcacatcgaagatgctacggcctcaagcccgtccggcccacgggatactggactggcccacctatacaagtatgcgtagtttgggcttccgtctgcagcattgtaaagtttgttctgcagcccatggcctggcctccgctaccacgagtagggttgatcaaacttgatcggccgctctatcatgagctgtgtctatcttgaatttgagcccgtcgcacttgccaggtcgggcgtgggccaacgtaaaaagagtgacgtttcttcaccaatcaccctgcgtttcttctcctgttcatcacccgtgcgtgcgctctctctctttctcgtgcggcaactgcgaggccgccgacgcccgacggcagggtgcccaggccttcttcggtcccatcgcgaggccatagttgcatcattcgcctgagacgactgcccaccgccaggcgcgtagaggtgaagagaataacttgacaatgagcagcataggcacaggttacgatctgtctgtcaccaccttctccccagatggtcgtgtcttccaggtcgaatatgctaccaaggccgtcgacaacagcgggactgttgttgggatcaagtgcaaagatggcattgtcctgggtgttgagaagctggtaacctcaaagatgatgctggaagggtcaaaccggaggatccattcagtgcaccggcactctggcttggctgttgctggtttagcagcagatggcaggcaaattgtttcaaggacgaagtcagaagctgccagttatgaaaaggtctatggagaacccattcctgttaaggaattggctgatcgtgtggcaagttatgttcatctttgcacgctgtactggtggctcaggccttttggctgcggtgttattcttggaggttatgatagggatgggccacagctctacatgatagaaccctcaggagtttcttataaatactttggtgctgcattagggaaggggagacaggctgcaaaaacatggacctcaaaatgattctgaacccaactatttgaatgtgg

SEQ ID NO: 22876 - DNA, 2380 bp, Zea Mays
gtttgccacggtagtatcgtaggagcagcacatcgaagatgctacggcctcaagcccgtccggcccacgggatactggactggcccacctatacaagtatgcgtagtttgggcttccgtctgcagcattgtaaagtttgttctgcagcccatggcctggcctccgctaccacgagtagggttgatcaaacttgatcggccgctctatcatgagctgtgtctatcttgaatttgagcccgtcgcacttgccaggtcgggcgtgggccaacgtaaaaagagtgacgtttcttcaccaatcaccctgcgtttcttctcctgttcatcacccgtgcgtgcgctctctctctttctcgtgcggcaactgcgaggccgccgacgcccgacggcagggtgcccaggccttcttcggtcccatcgcgaggccatagttgcatcattcgcctgagacgactgcccaccgccaggactgatctcctcactaggcgcgtagaggtgaagagaataacttgacaatgagcagcataggcacaggttacgatctgtctgtcaccaccttctccccagatggtcgtgtcttccaggtcgaatatgctaccaaggccgtcgacaacagcgggactgttgttgggatcaagtgcaaagatggcattgtcctgggtgttgagaagctggtaacctcaaagatgatgctggaagggtcaaaccggaggatccattcagtgcaccggcactctggctgttgctggtttagcagcagatggcaggcaaattgtttcaaggacgaagtcagaagctgccagttatgaaaaggtctatggagaacccattcctgttaaggaattggctgatcgtgtggcaagttatgttcatctttgcacgctgtactggtggctcaggccttttggctgcggtgttattcttggaggttatgatagggatgggccacagctctacatgatagaaccctcaggagtttcttataaatactttggtgctgcattagggaaggggagacaggctgcaaaaactgagatagaaaagttgaaactttcagagcttacgtgccgggaaggcattgttgaagttgcaaagataatttatggagtgcatgacgaagcgaaggataaagctttcgagttggagttgagctggatctgcgatgaatcgaaccaccagcatcagaaggttccaaatgaactgttggagcatgccaaagctgctgcccaggctgctcttgaggagatggatgccgactaagagacacgatgatttgcccaaacttggtgttttcggtggtgttgatatctctgatcccttggggggggggggacccactaggggtaggcacatttcaaccgaaaaccgagccgaactggaatcaaggttttttcggtttttcgattcggtgtcggttttcctttcttacgaaccgaaaagatcggctcggcttcggtttctatttgctggacaccgatacaaccgaacttactgcagtctaatgtcctgtgtggcgcgcgttcaactggacctggacaatttgcagtgcagcccaccgaagcccaaaagacaccaacgcacagcttcatagtccataccagctagcccaattatttattaccaaacgtctagggctccaggccaagccacacgcccaaagtccaaaccatgccgcatcgtatagacagaagcgcttttggcctgcccctggtggctctcacgtcggcgtgtcgtgcgccagcgtggtgcatctgtggaaccagcagcgagcggcacctcgcgagaactgcggcgggcggcgcagctctctggaaagagcgcggcggcaacgcggagcagtcgatgggcggcgacgactgcggaagccagcagcagacacacgaagacgattcttttggtagaaactgaacaccgaacgaagtctacctcgacggcagcgtctacgtcgacggctggagtactgcactgagatacgaagtttagctgcaccaaagaaacagaaccgattggtcggtttaaaccgattgcccacgacccactggacatggccagtttcacacagcctacgttttgatccatgtcatgtagaactccaaccacggttgagtgtctcgctaggtaacgagcgaaaactggggaattttctcgttctcggtccacactgggatacgaaagccagctcggattttagtgtatttcggtttcaaatttgaaaatataataattgaatggtcaacaaaacggtttttgaaatttcaaaacgagaatgtaatccctgactccgaccatggaagtctggaatctagattgactgatatcagcgctgtggatgccttggcgtcttgaggaactttttagcttctgctgtaccggttacgcagac

SEQ ID NO: 22877 - DNA, 2259 bp, Zea Mays
gtttgccacggtagtatcgtaggagcagcacatcgaagatgctacggcctcaagcccgtccggcccacgggatactggactggcccacctatacaagtatgcgtagtttgggcttccgtctgcagcattgtaaagtttgttctgcagcccatggcctggcctccgctaccacgagtagggttgatcaaacttgatcggccgctctatcatgagctgtgtctatcttgaatttgagcccgtcgcacttgccaggtcgggcgtgggccaacgtaaaaagagtgacgtttcttcaccaatcaccctgcgtttcttctcctgttcatcacccgtgcgtgcgctctctctctttctcgtgcggcaactgcgaggccgccgacgcccgacggcagggtgcccaggccttcttcggtcccatcgcgaggccatagttgcatcattcgcctgagacgactgcccaccgccaggactgatctcctcactaggcgcgtagaggtgaagagaataacttgacaatgagcagcataggcacaggttacgatctgtctgtcaccaccttctccccagatggtcgtgtcttccaggtcgaatatgctaccaaggccgtcgacaacagcgggactgttgttgggatcaagtgcaaagatggcattgtcctgggtgttgagaagctggtaacctcaaagatgatgctggaagggtcaaaccggaggatccattcagtgcaccggcactctggcttggctgttgctggtttagcagcagatggcaggcaaattgtttcaaggacgaagtcagaagctgccagttatgatagggatgggccacagctctacatgatagaaccctcaggagtttcttataaatactttggtgctgcattagggaaggggagacaggctgcaaaaactgagatagaaaagttgaaactttcagagcttacgtgccgggaaggcattgttgaagttgcaaagataatttatggagtgcatgacgaagcgaaggataaagctttcgagttggagttgagctggatctgcgatgaatcgaaccaccagcatcagaaggttccaaatgaactgttggagcatgccaaagctgctgcccaggctgctcttgaggagatggatgccgactaagagacacgatgatttgcccaaacttggtgttttcggtggtgttgatatctctgatcccttggggggggggggacccactaggggtaggcacatttcaaccgaaaaccgagccgaactggaatcaaggttttttcggtttttcgattcggtgtcggttttcctttcttacgaaccgaaaagatcggctcggcttcggtttctatttgctggacaccgatacaaccgaacttactgcagtctaatgtcctgtgtggcgcgcgttcaactggacctggacaatttgcagtgcagcccaccgaagcccaaaagacaccaacgcacagcttcatagtccataccagctagcccaattatttattaccaaacgtctagggctccaggccaagccacacgcccaaagtccaaaccatgccgcatcgtatagacagaagcgcttttggcctgcccctggtggctctcacgtcggcgtgtcgtgcgccagcgtggtgcatctgtggaaccagcagcgagcggcacctcgcgagaactgcggcgggcggcgcagctctctggaaagagcgcggcggcaacgcggagcagtcgatgggcggcgacgactgcggaagccagcagcagacacacgaagacgattcttttggtagaaactgaacaccgaacgaagtctacctcgacggcagcgtctacgtcgacggctggagtactgcactgagatacgaagtttagctgcaccaaagaaacagaaccgattggtcggtttaaaccgattgcccacgacccactggacatggccagtttcacacagcctacgttttgatccatgtcatgtagaactccaaccacggttgagtgtctcgctaggtaacgagcgaaaactggggaattttctcgttctcggtccacactgggatacgaaagccagctcggattttagtgtatttcggtttcaaatttgaaaatataataattgaatggtcaacaaaacggtttttgaaatttcaaaacgagaatgtaatccctgactccgaccatggaagtctggaatctagattgactgatatcagcgctgtggatgccttggcgtcttgaggaactttttagcttctgctgtaccggttacgcagac

SEQ ID NO: 22878 - DNA, 2405 bp, Zea Mays
gtttgccacggtagtatcgtaggagcagcacatcgaagatgctacggcctcaagcccgtccggcccacgggatactggactggcccacctatacaagtatgcgtagtttgggcttccgtctgcagcattgtaaagtttgttctgcagcccatggcctggcctccgctaccacgagtagggttgatcaaacttgatcggccgctctatcatgagctgtgtctatcttgaatttgagcccgtcgcacttgccaggtcgggcgtgggccaacgtaaaaagagtgacgtttcttcaccaatcaccctgcgtttcttctcctgttcatcacccgtgcgtgcgctctctctctttctcgtgcggcaactgcgaggccgccgacgcccgacggcagggtgcccaggccttcttcggtcccatcgcgaggccatagttgcatcattcgcctgagacgactgcccaccgccagttttgaaattttgttttcaggactgatctcctcactaggcgcgtagaggtgaagagaataacttgacaatgagcagcataggcacaggttacgatctgtctgtcaccaccttctccccagatggtcgtgtcttccaggtcgaatatgctaccaaggccgtcgacaacagcgggactgttgttgggatcaagtgcaaagatggcattgtcctgggtgttgagaagctggtaacctcaaagatgatgctggaagggtcaaaccggaggatccattcagtgcaccggcactctggcttggctgttgctggtttagcagcagatggcaggcaaattgtttcaaggacgaagtcagaagctgccagttatgaaaaggtctatggagaacccattcctgttaaggaattggctgatcgtgtggcaagttatgttcatctttgcacgctgtactggtggctcaggccttttggctgcggtgttattcttggaggttatgatagggatgggccacagctctacatgatagaaccctcaggagtttcttataaatactttggtgctgcattagggaaggggagacaggctgcaaaaactgagatagaaaagttgaaactttcagagcttacgtgccgggaaggcattgttgaagttgcaaagataatttatggagtgcatgacgaagcgaaggataaagctttcgagttggagttgagctggatctgcgatgaatcgaaccaccagcatcagaaggttccaaatgaactgttggagcatgccaaagctgctgcccaggctgctcttgaggagatggatgccgactaagagacacgatgatttgcccaaacttggtgttttcggtggtgttgatatctctgatcccttggggggggggggacccactaggggtaggcacatttcaaccgaaaaccgagccgaactggaatcaaggttttttcggtttttcgattcggtgtcggttttcctttcttacgaaccgaaaagatcggctcggcttcggtttctatttgctggacaccgatacaaccgaacttactgcagtctaatgtcctgtgtggcgcgcgttcaactggacctggacaatttgcagtgcagcccaccgaagcccaaaagacaccaacgcacagcttcatagtccataccagctagcccaattatttattaccaaacgtctagggctccaggccaagccacacgcccaaagtccaaaccatgccgcatcgtatagacagaagcgcttttggcctgcccctggtggctctcacgtcggcgtgtcgtgcgccagcgtggtgcatctgtggaaccagcagcgagcggcacctcgcgagaactgcggcgggcggcgcagctctctggaaagagcgcggcggcaacgcggagcagtcgatgggcggcgacgactgcggaagccagcagcagacacacgaagacgattcttttggtagaaactgaacaccgaacgaagtctacctcgacggcagcgtctacgtcgacggctggagtactgcactgagatacgaagtttagctgcaccaaagaaacagaaccgattggtcggtttaaaccgattgcccacgacccactggacatggccagtttcacacagcctacgttttgatccatgtcatgtagaactccaaccacggttgagtgtctcgctaggtaacgagcgaaaactggggaattttctcgttctcggtccacactgggatacgaaagccagctcggattttagtgtatttcggtttcaaatttgaaaatataataattgaatggtcaacaaaacggtttttgaaatttcaaaacgagaatgtaatccctgactccgaccatggaagtctggaatctagattgactgatatcagcgctgtggatgccttggcgtcttgaggaactttttagcttctgctgtaccggttacgcagac

SEQ ID NO: 22879 - DNA, 2525 bp, Zea Mays
gtgccgtctagtcttccgcccctcttcttcccgggagagctcgagctcctcctcttcctatcgctgcgtgcctcgcagctccgccagctgcaccttccacccctccctagcggtatatggcatccccgtcctcctgcaacgccacgggcgtgccgttcaccctgctgggcgcgctcatcaccgccggacccgccgcctggccggcctgcgtcggcggcggccgcgccttcctccgggactacgcgcggcgcgggaccaacgcgctgctgtgggcgggcctcctcgccgtcacctggctcctgctcctccgcgtcgccgcgcttctccgcctctgggcgctcggctcccgcatcccggggccccgcgcgctaatcgccgaccccgggctcgcctccgtcttgcgcaacggcggcgacatctccggttttctatcaaaattgcatgggagatatggcccagttgttcgcctgtgggtgggaccctcccagctacttgtatcagtcgtagatcctactctagttaaagaggtgctgtcaaaggctaaagataagttaccattgactgggaggacatataatttagcttgtggaagacttgccttgtttgtgtcctcgttccagaaggtgaaaaggacaagagattctctgaaaatattcttgaatgaaagacttacagttggtactggtcaaagctcattcaaaattattgatgctgtcctgaatagaatcgactctattatgtccaaggattttatggacactagatctttctcccagcacatggcatttaatattatcagtgcaactcttctgggtgatgccttcttcgattggtctgatgctgctgcgtatgaggaacttcttatgttggtcgctaaagatggttgcttctgggcttcttacacaattcctccattttggaggcctagctataggaggtatcagaccctatgtgctaagctgaagatattaacagagagcgtcatcagaaaatcaagataccaaaatagttcgcttcaccattttgatcagagatcttgtcagaaaagtgaggggacagatccacatagaagtgttttagacaacatgatgcgaagtcattgcctccatggggctgctaaaggaccacttaatttagaagaggaaacatgtggaaacatcatgggtttgatgttgcatggtatttccacttctgctaacttgattggtaacattttgacaaggcttgtcttgtttcctgaattgcaagatcaggtatgtgttggctcctttattttctctgttgcaaactatttaagctgcttccttgtgatgctaaaaataatgaatggtttttggtgttttcttattcaaatgactacactctcgtggatttttttacatgttaattatttaaataagaaagaatcccactttgtgttccattgactgcaaagaaaggtttccactattatccacccatatttagtgtgtgtgcgttacatctctccactcatgctactctattttgtagctacatgaggagattgtttcagtctgcaataaatcatctaaagtggaggttgatgatctgcttaggatgcaagttctacttgctactgtatgtgaatctgctcgccttttgcctgctggacctcttctgcagcgatgttctttgaaacatgatttgactcttggctcaggtgtcactgtgccagcgcgatcaatattagtagttcctctgcatctcgtgcaaatggatgcttctgtttggggtgatgatgccgaccagtttaatcctcatcggttccttaaaagggacattgatcttggagaaatattaggagcacctaaaggatcaactaggttaaatatttccagtgagtgtaccaaggccgaatcatttcttccatttggttctggaagtcgagcatgtgttgggcagaagtttgtggttctggcaatatcgatgttgattgccagtctgctccgcagctatgaggtacaacctcatccaagtttgtctaaagaaatggacacaacagttgatagcagccaccttcatcttccaaaccctaagatcatcctcaccaaaagaaggatctgaagggagagtttggcaaacgaaaatctggcacgtttgctttcactgtattgtttttcactggtgttacaccagtatatgatctttagtttcctaccgtcgtttggaccatgctgaagtttggaaaggcgaccttgacgatgcggaagtgccttttttcctccggatttttgacagaccctgtgtgcttcgttggatctaagtttttgtcaggtttttggagcacagggctgttagatcacaggagacgtatgctgatgtgtataaacagactcgttttttcagttggggttttctcctatctgtggagaatgtaattaatgtccaacgcatgatgtcgctcgccacatatattttattgtatcttacttgcatataaacatgtgagcttattgtttggaccataatttgtgataaatctgtgggagtatctcatgttttcc

SEQ ID NO: 22880 - DNA, 2115 bp, Zea Mays
gtgccgtctagtcttccgcccctcttcttcccgggagagctcgagctcctcctcttcctatcgctgcgtgcctcgcagctccgccagctgcaccttccacccctccctagcggtatatggcatccccgtcctcctgcaacgccacgggcgtgccgttcaccctgctgggcgcgctcatcaccgccggacccgccgcctggccggcctgcgtcggcggcggccgcgccttcctccgggactacgcgcggcgcgggaccaacgcgctgctgtgggcgggcctcctcgccgtcacctggctcctgctcctccgcgtcgccgcgcttctccgcctctgggcgctcggctcccgcatcccggggccccgcgcgctaatcgccgaccccgggctcgcctccgtcttgcgcaacggcggcgacatctccggttttctatcaaaattgcatgggagatatggcccagttgttcgcctgtgggtgggaccctcccagctacttgtatcagtcgtagatcctactctagttaaagaggtgctgtcaaaggctaaagataagttaccattgactgggaggacatataatttagcttgtggaagacttgccttgtttgtgtcctcgttccagaaggtgaaaaggacaagagattctctgaaaatattcttgaatgaaagacttacagttggtactggtcaaagctcattcaaaattattgatgctgtcctgaatagaatcgactctattatgtccaaggattttatggacactagatctttctcccagcacatggcatttaatattatcagtgcaactcttctgggtgatgccttcttcgattggtctgatgctgctgcgtatgaggaacttcttatgttggtcgctaaagatggttgcttctgggcttcttacacaattcctccattttggaggcctagctataggaggtatcagaccctatgtgctaagctgaagatattaacagagagcgtcatcagaaaatcaagataccaaaatagttcgcttcaccattttgatcagagatcttgtcagaaaagtgaggggacagatccacatagaagtgttttagacaacatgatgcgaagtcattgcctccatggggctgctaaaggaccacttaatttagaagaggaaacatgtggaaacatcatgggtttgatgttgcatggtatttccacttctgctaacttgattggtaacattttgacaaggcttgtcttgtttcctgaattgcaagatcagatttgactcttggctcaggtgtcactgtgccagcgcgatcaatattagtagttcctctgcatctcgtgcaaatggatgcttctgtttggggtgatgatgccgaccagtttaatcctcatcggttccttaaaagggacattgatcttggagaaatattaggagcacctaaaggatcaactaggttaaatatttccagtgagtgtaccaaggccgaatcatttcttccatttggttctggaagtcgagcatgtgttgggcagaagtttgtggttctggcaatatcgatgttgattgccagtctgctccgcagctatgaggtacaacctcatccaagtttgtctaaagaaatggacacaacagttgatagcagccaccttcatcttccaaaccctaagatcatcctcaccaaaagaaggatctgaagggagagtttggcaaacgaaaatctggcacgtttgctttcactgtattgtttttcactggtgttacaccagtatatgatctttagtttcctaccgtcgtttggaccatgctgaagtttggaaaggcgaccttgacgatgcggaagtgccttttttcctccggatttttgacagaccctgtgtgcttcgttggatctaagtttttgtcaggtttttggagcacagggctgttagatcacaggagacgtatgctgatgtgtataaacagactcgttttttcagttggggttttctcctatctgtggagaatgtaattaatgtccaacgcatgatgtcgctcgccacatatattttattgtatcttacttgcatataaacatgtgagcttattgtttggaccataatttgtgataaatctgtgggagtatctcatgttttcc

SEQ ID NO: 22881 - DNA, 2201 bp, Zea Mays
gtgccgtctagtcttccgcccctcttcttcccgggagagctcgagctcctcctcttcctatcgctgcgtgcctcgcagctccgccagctgcaccttccacccctccctagcggtatatggcatccccgtcctcctgcaacgccacgggcgtgccgttcaccctgctgggcgcgctcatcaccgccggacccgccgcctggccggcctgcgtcggcggcggccgcgccttcctccgggactacgcgcggcgcgggaccaacgcgctgctgtgggcgggcctcctcgccgtcacctggctcctgctcctccgcgtcgccgcgcttctccgcctctgggcgctcggctcccgcatcccggggccccgcgcgctaatcgccgaccccgggctcgcctccgtcttgcgcaacggcggcgacatctccggttttctatcaaaattgcatgggagatatggcccagttgttcgcctgtgggtgggaccctcccagctacttgtatcagtcgtagatcctactctagttaaagaggtgctgtcaaaggctaaagataagttaccattgactgggaggacatataatttagcttgtggaagacttgccttgtttgtgtcctcgttccagaaggtgaaaaggacaagagattctctgaaaatattcttgaatgaaagacttacagttggtactggtcaaagctcattcaaaattattgatgctgtcctgaatagaatcgactctattatgtccaaggattttatggacactagatctttctcccagcacatggcatttaatattatcagtgcaactcttctgggtgatgccttcttcgattggtctgatgctgctgcgtatgaggaacttcttatgttggtcgctaaagatggttgcttctgggcttcttacacaattcctccattttggaggcctagctataggaggtatcagaccctatgtgctaagctgaagatattaacagagagcgtcatcagaaaatcaagataccaaaatagttcgcttcaccattttgatcagagatcttgtcagaaaagtgaggggacagatccacatagaagtgttttagacaacatgatgcgaagtcattgcctccatggggctgctaaaggaccacttaatttagaagaggaaacatgtggaaacatcatgggtttgatgttgcatggtatttccacttctgctaacttgattggtaacattttgacaaggcttgtcttgtttcctgaattgcaagatcaggatgcaagttctacttgctactgtatgtgaatctgctcgccttttgcctgctggacctcttctgcagcgatgttctttgaaacatgatttgactcttggctcaggtgtcactgtgccagcgcgatcaatattagtagttcctctgcatctcgtgcaaatggatgcttctgtttggggtgatgatgccgaccagtttaatcctcatcggttccttaaaagggacattgatcttggagaaatattaggagcacctaaaggatcaactaggttaaatatttccagtgagtgtaccaaggccgaatcatttcttccatttggttctggaagtcgagcatgtgttgggcagaagtttgtggttctggcaatatcgatgttgattgccagtctgctccgcagctatgaggtacaacctcatccaagtttgtctaaagaaatggacacaacagttgatagcagccaccttcatcttccaaaccctaagatcatcctcaccaaaagaaggatctgaagggagagtttggcaaacgaaaatctggcacgtttgctttcactgtattgtttttcactggtgttacaccagtatatgatctttagtttcctaccgtcgtttggaccatgctgaagtttggaaaggcgaccttgacgatgcggaagtgccttttttcctccggatttttgacagaccctgtgtgcttcgttggatctaagtttttgtcaggtttttggagcacagggctgttagatcacaggagacgtatgctgatgtgtataaacagactcgttttttcagttggggttttctcctatctgtggagaatgtaattaatgtccaacgcatgatgtcgctcgccacatatattttattgtatcttacttgcatataaacatgtgagcttattgtttggaccataatttgtgataaatctgtgggagtatctcatgttttcc

SEQ ID NO: 22882 - DNA, 1872 bp, Zea Mays
atttgacgcgggtgcgacctctgcacccggttttctatcaaaattgcatgggagatatggcccagttgttcgcctgtgggtgggaccctcccagctacttgtatcagtcgtagatcctactctagttaaagaggtgctgtcaaaggctaaagataagttaccattgactgggaggacatataatttagcttgtggaagacttgccttgtttgtgtcctcgttccagaaggtgaaaaggacaagagattctctgaaaatattcttgaatgaaagacttacagttggtactggtcaaagctcattcaaaattattgatgctgtcctgaatagaatcgactctattatgtccaaggattttatggacactagatctttctcccagcacatggcatttaatattatcagtgcaactcttctgggtgatgccttcttcgattggtctgatgctgctgcgtatgaggaacttcttatgttggtcgctaaagatggttgcttctgggcttcttacacaattcctccattttggaggcctagctataggaggtatcagaccctatgtgctaagctgaagatattaacagagagcgtcatcagaaaatcaagataccaaaatagttcgcttcaccattttgatcagagatcttgtcagaaaagtgaggggacagatccacatagaagtgttttagacaacatgatgcgaagtcattgcctccatggggctgctaaaggaccacttaatttagaagaggaaacatgtggaaacatcatgggtttgatgttgcatggtatttccacttctgctaacttgattggtaacattttgacaaggcttgtcttgtttcctgaattgcaagatcagctacatgaggagattgtttcagtctgcaataaatcatctaaagtggaggttgatgatctgcttaggatgcaagttctacttgctactgtatgtgaatctgctcgccttttgcctgctggacctcttctgcagcgatgttctttgaaacatgatttgactcttggctcaggtgtcactgtgccagcgcgatcaatattagtagttcctctgcatctcgtgcaaatggatgcttctgtttggggtgatgatgccgaccagtttaatcctcatcggttccttaaaagggacattgatcttggagaaatattaggagcacctaaaggatcaactaggttaaatatttccagtgagtgtaccaaggccgaatcatttcttccatttggttctggaagtcgagcatgtgttgggcagaagtttgtggttctggcaatatcgatgttgattgccagtctgctccgcagctatgaggtacaacctcatccaagtttgtctaaagaaatggacacaacagttgatagcagccaccttcatcttccaaaccctaagatcatcctcaccaaaagaaggatctgaagggagagtttggcaaacgaaaatctggcacgtttgctttcactgtattgtttttcactggtgttacaccagtatatgatctttagtttcctaccgtcgtttggaccatgctgaagtttggaaaggcgaccttgacgatgcggaagtgccttttttcctccggatttttgacagaccctgtgtgcttcgttggatctaagtttttgtcaggtttttggagcacagggctgttagatcacaggagacgtatgctgatgtgtataaacagactcgttttttcagttggggttttctcctatctgtggagaatgtaattaatgtccaacgcatgatgtcgctcgccacatatattttattgtatcttacttgcatataaacatgtgagcttattgtttggaccataatttgtgataaatctgtgggagtatctcatgttttcc

SEQ ID NO: 22883 - DNA, 1865 bp, Zea Mays
aaacacccctaaattacgattattgttacggaagaggtgctcctctctctatctcccccacgatctccgttccttcccctccccgatctccccaatccgaccagaccggcaggcaccttcgactcgagcggagcaggcgaggcagagatggcgctgcgacgggcgctcctcagatcggtcaacttctcccccgacagcaagtctgcttgttctctcaatggtgctggtctttgtcctgctagtagatcatttagcacccaggctgccactacgtcaagcacaccacagcctccacctccaccaccccctccagagaagactcactttggtggtctcaaagatgaggatcgcatttttcaccaacctctatggtctgcatgacccttttctgaaaggcgcggtgaagagaggtgactggtataggaccaaggatttggtgattaagggggcagactggatagttaatgaaatgaagaaatcaggtcttcggggtcgtggaggtgcaggttttccctctggtctgaaatggtcctttatgcccaaggtttctgatggacgcccttcttatcttgttgttaatgctgatgagagtgagcctggaacttgcaaagatagagaaatcatgcgccaagacccccacaagcttctggaaggatgccttattgctggagttggaatgagggcatcagctgcttacatctacattcgaggtgaatacgtgaatgagcgtctcaacctcgagaaagctcggcaggaagcatatgcagctggacttctcggtaagaatgcttgtggatctggttatgattttgatgtgcatattcattttggtgctggtgcgtacatctgtggtgaagagactgccctattagagagccttgaagggaagcagggcaaacctaggctgaagccacctttcccagccaatgctgggctttacggctgccccacaactgtgaccaatgttgaaactgtggctgtatccccaacaattcttaggcgtggtccagaatggttcgcaagctttgggcgcaagaacaactccggaaccaaactctactgcatctcaggtcatgtgaacaagccttgcaccgtggaagaggaaatgagcatacctctgaaggagttgctcgagaggcactgtggaggtgtgagaggaggatgggacaacctgcttgcagtaattcccggcggttcatccgttccccttttaccaaagcacatatgtgacgatgtgttgatggactacgacgcgctgaaggctgtgcagtctggattgggtaccgcagctgtcatcgtgatggacaaatctacggacgttgtcgacgcgattgccaggctgtcctacttctacaaacacgagagctgtgggcagtgcacgccctgccgagagggcacgccctggctctggatgatcatggagaggctcaaggttggtgacgcgaagctagaggaaatcgacatgcttcaggaggtcacgaagcaaatcgaagggcatactatctgtgccctcggggacgctgcggcgtggcctgtgcagggacttatcaggcacttcaggccggagttggagaggaggatccgcgagcgagctgaaagggagctgttggcggcttctgcatgatgtgccagccgcatgtactagttttctgatttctttctaccgaaataatacaaactgatggagctcctttctgtgtaagcaaatgctagcattcctgatttctttgaaccgtttatgtggatgtttatttgatgcactcaagcatctgacggattttgatggactaggtacaccttttcatagtagaaacaaacttgagggttgtaccgtgtgtatacctgcttgtctctttaattctgag

SEQ ID NO: 22884 - DNA, 449 bp, Zea Mays
cagcactcgtcttctccggccgaaacaaactcacccaggaaccgcccaggcccttctccatccttgtttcctaacctttcgggcgtaacaaacctcacccaaatctttttgaacccagccggtcgggctcctataaatgcctgggcatctgtctcctccggatatcctaactacatggaagctttgccgagcacgagaaaacagataggggagagagagggtacatgtcgtcgactacagcacgctatgccgcagaccagtcttgtccccggggtgcagttggtgtggttgccggggcacgccgtgcgtcctcagcgctttgatgagttgcacgggtggccggagtatggccgcgttctcgccagagtcatgggtggtcgcggctccgccttgcatcgtggagacgtgtcctgcagctccaccatcatgtgaggtcacgaggatctaaa

SEQ ID NO: 22885 - DNA, 1893 bp, Zea Mays
aaaaaacactttccgtcagctgcaagaaaggagaaccaattctccctcgaaaaaaaagtcccgtcgttttcctcacagttccttcgctctctggcctccgcttccactcccgcccgccccgccgtcgcgatgcacaagacggctcaggcctggttcaccggcgggaccgccgcctcctccggcgccgctgccgagtcgcagccgtccctgctcgctgactggaactcgtacgccgccacccgctccgacgcctcctcctcctccccgctccccttcgacatcgaagccgccgtccgctccgccaacgacaccgtctccggcaccttaagctcggtgaccaagggcgtgcgggagctgccggggagcttccagagcgccaccagcagcttcccctccggaaaggctctcatgtacttcggcctcttcctcgccaccggcatcttcttcgtcttcatcgccttcgcgctcttcctccccgtcatggtgctcatgccacagaagttcgccatctccttcacgctcgggtgcgcgctcatcattgcctcgctcttcgcgcttaaggggccagccaaccagctcgcccacatgacttccaaggagaggctaccgttttcagttggatttattggatgcatggtcggtacaatttatgtttctatggtgcttcacagctatttcctctctgtgatcttctcagtccttcaggtatgtccttggccagtgcaatttttgtctggtctgtattttttcaaatcttgctatactgtagaggtcacttgttttagtgctttaggcacacttcctgtttgtgaaacatctaaaacaggctgataatctgaataatgagttcacaatcagtgtcttcttcatttcgaagaggaaggaaagagtttgccttctccttcactcccaaaaaagaaaaagaaaacaaaataattctccttccctacttctctatcgaacaatacagtatcgtgataagctgtcatctggtctatggcttgtgaaactgcaatccctcagcattatcttgcgcattttgcttttcagactcatgcaatttttctctcttttctcaacccaggttctggcccttgcatattacaccatatcctacttccctggaggatctagtggactgaaattcatctcgtctggtctcttgtcctcggcaacaagctgttttggtcgatgaccttcctttgtcaattgtcatacatttatttgatcataccatgttatcgctttaagatttttgtatgtagctgctgatcatccctttgaggctttgtttggtactctagtattgactctaatcctcatgtgttgaggtggattgatgtgtaaattagtttatgttacacctcaatccacctcaatacatgtggattttggtcaatactagagtacccaaactaggtctgatagagattccatggtgtttcctctcctgtttgtttgtctagacttggactggtgttgaatatatagattatagtgtggaaatgattcgtcgcccctgtatctcattgactctgtgtcccttgtggctgtagattgtgaaagaaatatgctatgaccaatttaaaggtaacgctgtgggatgatgttgagattattgcaattctagaattgcattataaattgtcacgataattctaccgagctcaattatgttttcaaatggttggcacttgcctctgattcaacggtcatttgagatatgtggcgtccgatagattcggctgaagactgggttgtgaggtctattaaggcatgtttggttttggaccctagttgtatagaatgacttcgttcgaggcttccaacttatgagaatgaaatgactttgttctgcatttgaaagatagaatgactttggtccactgtgag

SEQ ID NO: 22886 - DNA, 1290 bp, Zea Mays
tcccgtcgttttcctcacagttccttcgctctctggcctccgcttccactcccgcccgccccgccgtcgcgatgcacaagacggctcaggcctggttcaccggcgggaccgccgcctcctccggcgccgctgccgagtcgcagccgtccctgctcgctgactggaactcgtacgccgccacccgctccgacgcctcctcctcctccccgctccccttcgacatcgaagccgccgtccgctccgccaacgacaccgtctccggcaccttaagctcaagttcgccatctccttcacgctcgggtgcgcgctcatcattgcctcgctcttcgcgcttaaggggccagccaaccagctcgcccacatgacttccaaggagaggctaccgttttcagttggatttattggatgcatggtcggtacaatttatgtttctatggtgcttcacagctatttcctctctgtgatcttctcagtccttcaggttctggcccttgcatattacaccatatcctacttccctggaggatctagtggactgaaattcatctcgtctggtctcttgtcctcggcaacaagctgttttggtcgatgaccttcctttgtcaattgtcatacatttatttgatcataccatgttatcgctttaagatttttgtatgtagctgctgatcatccctttgaggctttgtttggtactctagtattgactctaatcctcatgtgttgaggtggattgatgtgtaaattagtttatgttacacctcaatccacctcaatacatgtggattttggtcaatactagagtacccaaactaggtctgatagagattccatggtgtttcctctcctgtttgtttgtctagacttggactggtgttgaatatatagattatagtgtggaaatgattcgtcgcccctgtatctcattgactctgtgtcccttgtggctgtagattgtgaaagaaatatgctatgaccaatttaaaggtaacgctgtgggatgatgttgagattattgcaattctagaattgcattataaattgtcacgataattctaccgagctcaattatgttttcaaatggttggcacttgcctctgattcaacggtcatttgagatatgtggcgtccgatagattcggctgaagactgggttgtgaggtctattaaggcatgtttggttttggaccctagttgtatagaatgacttcgttcgaggcttccaacttatgagaatgaaatgactttgttctgcatttgaaagatagaatgactttggtccactgtgag

SEQ ID NO: 22887 - DNA, 1148 bp, Zea Mays
ggataatagaaataatacctcaccaacaactgtcaatgaggtttttgaggagtcagggaggacacttgtacgtggaactctagattatttacaagggttgaagatgctgggagtaaaacgaactgaaagggttcttccaactggaatctcattgacagttgttggtgaggctattaaagatgatgttggaactattagaattcagcgaccgcataaaggacccttctatgtatcaccaaaaagcatcgatcaacttattatgaatcttggaaaatgggccaagttataccgccttgcttcaatgggctttgcaacatttggtgccttccttcttgcaaagcgtgcaatacaacattttctagaaagaaagcgccggcatgaactgcaaaaaagggttcttaatgcagcagcacaaaggcaagctagagaagctgaagggagcattggttcatcggacacagagcctaacagtaaaaaagaccaattagtgttggacatatgtgtcatatgccttgagcaagagtacaatgctgtttttgtgccgtgcggtcacatgtgttgctgtatggcatgctcttcacatttgacaaactgcccgctttgccggagaagaattgaccaagctgtcagaacattccgccattgacggtgataccacgtgcactgcttttgaaaccagttggctattggaagtgctggctcctgtcaaccaacgatatgaactgcaaaactgggtcgtagcagcttcttcatggagtttgcttttcgaacagaacagcgagtgatgcaagttgcaagctcatgattggcagttaagaaagataccctactgagatagtgccaatgggtgctcttgcatgtaatgtactactactacaactgtgtacaggacacttgtgtaaatgcacataggttagcagcttgcttcttgactaacacctaatgggcatttatgttgtgctaaccgaatgacaaaattagctcgtttagttgtgataatcgttttttctagtgagtggggaatgatacggatatctccgttcttttgtgctcacaggatcataagaaacagaaaagatttgtaacatgttctatattttactgctcattttgtaacctgaatgtgaggacaacatgttggcgcatta

SEQ ID NO: 22888 - DNA, 2728 bp, Zea Mays
  misc_feature (1)..(1): n is a, c, g, or t
natcaacctcgcgcttgagaagcacgcggccatggagaacccagacgcgcaggcgaaggcgtgggcggcggagatgcgcgagctggcctacgacatggaggacagcatcgatctcttcacccaccacgtcgaccacgaaccggccgacaccgccaccaccggcgtcaagaggttcttcctccggatcatccggaagcttaagaaactccactaccgccacaggtttgctcaggagatcaaacaactccacgaccttgccaacgaatcgtaccggcgtaggaagaggtacaggattgaggagggcggttcaagcctcccgcacgcggagatcgatcctcggttagaggcgctctacgtggaggtggagaaactcgtgggcatccagggcccaagccaggagatcattggacagctcgtcggcgagaacgcagcggagcggcggagggttgtcgccgttgttggatctggaggttcaggcaagaccacacttgccaaacaggtgtacgagaaaatcaggtgccaattctcttgtgcagcctttgtgtccgtgtcgcaaaagcccaacatgaatagcctcctgtgggagttgttatctcaaatcgggaaccatggtggagatttaggaatgatggcagtaggatattgcagtgacaaacaactgatcgacagactaagatcacatcttgaaaagcagaggtatctcgttgtgatagatgatgtttggacaaactcagcgtgggagaccatacaatgtgcgctccctaaaaatgcccatgcaagtaaaataattctgacaacacgaatcaacagtgtaggccagttctcctgcactccagatgagggttttatctatcagatgaagcctctttgcagaaacgattctgaaaatctgtttctgaaaaggacactatgtgataaagataagtttcctgctcagctggaggggattaaaaacgagataatcgagaaatgcgatggtttgccactggctattgttactctagctagcatgttagctactaaacagagaacaagggaagaatgggagagggcacttgattcaatccattctacgcacaagaaagatagtagcctggaagtgatggacaagatactgtctctgagttacagggatctacctcacaacatgagaaattgcttgctgtatatcagtacatttccagaggaccacacgatttacaaagatgctctagtatggagatggatggctgaagggtttatcgctgaaacacaaggctttactttggagcaggttgccgagggctacttctacgagtttgtgaacaggagtttggttcagcccataaccttgcgttcaagatatgaaatgcgtggagaaggaggttgccgagtccatgacattgtactgaacttcctcatctctcgtgcagctgaagagaactttttaactacgctgtatggcgcccagggggttccatcttcagaccgaaggattcgccggctctctgtctgggacagtccagaacacgcactggcagtctctagagcgaccatgaatctgtcccatctccggtcagttagaatatgcaacgttggagactggcccgtgcctgctgttctagacttacctgtccttcgagtgttagatctagagggatgccgtgatctgaggatcgtcgaccctgactgcattctaagcttgtttcatctgaggtacctgggtttccgcagcgcaagtggtgtcgtgctaccggctcaaataggaaatttacaccatctgcagaccatcgatttaagcgggactggagtgacacagctgccagaaagcattgtccagctcaagcgactgatgcatcttgttgggcaacggctcatcatgccagacgggtttggtagcatggaatcccttgaggagttaggtactatcgactgctgcaagtgccccgctgagggtgctccgagtgaccgagtggctttcgtcggggtcgaaacaagtgacatggaaaccagaaggaaatctttgatgtcatccctctgcaaactcggaggagacaaccttcggcgtgtcactattatcgacctcgctggcggtggagattgctttgtggagtcgtggcaccctcctcctcgtctcctccagaagttcatccatatcagtcagcaacagcacttctccaggtttccagaatggatcagttcctgcctatgtgatctcacccacctggatataaaggccgaaaagatggaaagggagcatctaagtgttcttgaacacctgcccgccatccgttatctataccttttcgtgaagcgagtctccgaagacgggctcgtcatcagccacagcgcgttccgatgtctacggcgtctcgagttctgtaacttagatggacctggtttgatgtttgcaggaggcgttccaatgctggaatggctgaggctcgggttcgacgcggatagagcgcaatcgacatacggcggtctggaggttggcatccagcgcctctcgtctctcaaacatgtcgtgctcattgtctgtatggtttctgaaggcggtgatgatccagcggagcaagccgtctggtctgccatcaatggccaagtagagatgctccccaattctccgacggttgatatccggtttcgtagacggagtcagctgcaggcaagctcagaataaggagcacgaaaaagacgatgatgttgggtgtcgcctgctgtagtatgttgctgcttctgcttgttg

SEQ ID NO: 22889 - DNA, 1374 bp, Zea Mays
gtcgtcgtcgtcaggttacgagccgacgaaactgacagactgtagcaataattggtcgctccccgatccatctgggtttcgcctgccagcggcgagatgtccttcttcttccgggccgcatcgcggcagcgcccgttgccgcaggagatcgcgcgctccctcaaggactccctcgttgccctcgacaccaagaccggcgccaaggctctcgaggatgctgagaaaaacatacttacattgaggcatacgcttgctggcgatggagaagtggaaccaaatcaagagcaggttttgcagatagcccttgagatttgcaaggagggtgttctttccctctttgttcagaatcttccttcattgggttgggaggctagaaaggatcttgtccactgctggtgtattttgttgagacagaaggttgatgaaagctattgttgtgtccagtatattgaaaatcattttgatcttttggatttccttgttgtttgctataagaacttggaagtcgcgttgaattgtgggaacatgttgcgagaatgcataaaatatcctacacttgcaaatgctctttcagatatatattggagtcaagcagcttcgagttgtttttccagtatgttgaattgtcaaacttcgatattgcatctgatgctctgaacactttcaaggatttgctaaccaaacatgaagatgccgtctctgaatttctgagctcacattatgaacagttttttggactctacacaaaacttttatcttcaactaattatgtgacacgaagacaatcagtgaagagtttctgttggaggccccaaatgctcaaataatgaagcgttacattttggaagttcattacttaaacattatgatgggcctgctaaaggattcaagcaaaaatatcaggatatgtgccttccacatttttaaggtatttgttgccaatccaaacaagcctcgtgagattattcaggttttggttgagaatcacagagaagtgttgaagctactccacaatctccccacaagcaaaggtgaagatgaacagcttgatgaggagagagatttaattatcaaagaaatcgagaagcttgtgcggttgtcagtataaaccctcaggaaattcgagcgtatccttgaagacatactgtgcaatatgctgccttgtatagagcttgtttttcatgtatggaaaaaaagtttggccacaaattgcattcttcacgagaacacttagcatttctgtcagaaaattattttcgtgtagcagaatttgcaacaggaataatctgcattatggtgtggtgttgataccattaaggattggtgaaagtgcctgccatttgaaatgggtacgcttgtcatgtttgttttgat

SEQ ID NO: 22890 - DNA, 1259 bp, Zea Mays
gacagactgtagcaataattggtcgctccccgatccatctgggtttcgcctgccagcggcgagatgtccttcttcttccgggccgcatcgcggcagcgcccgttgccgcaggagatcgcgcgctccctcaaggactccctcgttgccctcgacaccaagaccggcgccaaggctctcgaggatgctgagaaaaacatacttacattgaggcatacgcttgctggcgatggagaagtggaaccaaatcaagagcaggctagaaaggatcttgtccactgctggtgtattttgttgagacagaaggttgatgaaagctattgttgtgtccagtatattgaaaatcattttgatcttttggatttccttgttgtttgctataagaacttggaagtcgcgttgaattgtgggaacatgttgcgagaatgcataaaatatcctacacttgcaaaatatatattggagtcaagcagcttcgagttgtttttccagtatgttgaattgtcaaacttcgatattgcatctgatgctctgaacactttcaaggatttgctaaccaaacatgaagatgccgtctctgaatttctgagctcacattatgaacagttttttggactctacacaaaacttttatcttcaactaattatgtgacacgaagacaatcagtgaagtttctttcagagtttctgttggaggccccaaatgctcaaataatgaagcgttacattttggaagttcattacttaaacattatgatgggcctgctaaaggattcaagcaaaaatatcaggatatgtgccttccacatttttaaggtatttgttgccaatccaaacaagcctcgtgagattattcaggttttggttgagaatcacagagaagtgttgaagctactccacaatctccccacaagcaaaggtgaagatgaacagcttgatgaggagagagatttaattatcaaagaaatcgagaagcttgtgcggttgtcagtataaaccctcaggaaattcgagcgtatccttgaagacatactgtgcaatatgctgccttgtatagagcttgtttttcatgtatggaaaaaaagtttggccacaaattgcattcttcacgagaacacttagcatttctgtcagaaaattattttcgtgtagcagaatttgcaacaggaataatctgcattatggtgtggtgttgataccattaaggattggtgaaagtgcctgccatttgaaatgggtacgcttgtcatgtttgttttgat

SEQ ID NO: 22891 - DNA, 1260 bp, Zea Mays
gacagactgtagcaataattggtcgctccccgatccatctgggtttcgcctgccagcggcgagatgtccttcttcttccgggccgcatcgcggcagcgcccgttgccgcaggagatcgcgcgctccctcaaggactccctcgttgccctcgacaccaagaccggcgccaaggctctcgaggatgctgagaaaaacatacttacattgaggcatacgcttgctggcgatggagaagtggaaccaaatcaagagcaggctagaaaggatcttgtccactgctggtgtattttgttgagacagaaggttgatgaaagctattgttgtgtccagtatattgaaaatcattttgatcttttggatttccttgttgtttgctataagaacttggaagtcgcgttgaattgtgggaacatgttgcgagaatgcataaaatatcctacacttgcaaatgctctttcagatatatattggagtcaagcagcttcgagttgtttttccagtatgttgaattgtcaaacttcgatattgcatctgatgctctgaacactttcaaggatttgctaaccaaacatgaagatgccgtctctgaatttctgagctcacattatgaacagttttttggactctacacaaaacttttatcttcaactaattatgtgacacgaagacaatcagtgaagagtttctgttggaggccccaaatgctcaaataatgaagcgttacattttggaagttcattacttaaacattatgatgggcctgctaaaggattcaagcaaaaatatcaggatatgtgccttccacatttttaaggtatttgttgccaatccaaacaagcctcgtgagattattcaggttttggttgagaatcacagagaagtgttgaagctactccacaatctccccacaagcaaaggtgaagatgaacagcttgatgaggagagagatttaattatcaaagaaatcgagaagcttgtgcggttgtcagtataaaccctcaggaaattcgagcgtatccttgaagacatactgtgcaatatgctgccttgtatagagcttgtttttcatgtatggaaaaaaagtttggccacaaattgcattcttcacgagaacacttagcatttctgtcagaaaattattttcgtgtagcagaatttgcaacaggaataatctgcattatggtgtggtgttgataccattaaggattggtgaaagtgcctgccatttgaaatgggtacgcttgtcatgtttgttttgat

SEQ ID NO: 22892 - DNA, 1379 bp, Zea Mays
gacagactgtagcaataattggtcgctccccgatccatctgggtttcgcctgccagcggcgagatgtccttcttcttccgggccgcatcgcggcagcgcccgttgccgcaggagatcgcgcgctccctcaaggactccctcgttgccctcgacaccaagaccggcgccaaggctctcgaggatgctgagaaaaacatacttacattgaggcatacgcttgctggcgatggagaagtggaaccaaatcaagagcaggttttgcagatagcccttgagatttgcaaggagggtgttctttccctctttgttcagaatcttccttcattgggttgggaggctagaaaggatcttgtccactgctggtgtattttgttgagacagaaggttgatgaaagctattgttgtgtccagtatattgaaaatcattttgatcttttggatttccttgttgtttgctataagaacttggaagtcgcgttgaattgtgggaacatgttgcgagaatgcataaaatatcctacacttgcaaaatatatattggagtcaagcagcttcgagttgtttttccagtatgttgaattgtcaaacttcgatattgcatctgatgctctgaacactttcaaggatttgctaaccaaacatgaagatgccgtctctgaatttctgagctcacattatgaacagttttttggactctacacaaaacttttatcttcaactaattatgtgacacgaagacaatcagtgaagtttctttcagagtttctgttggaggccccaaatgctcaaataatgaagcgttacattttggaagttcattacttaaacattatgatgggcctgctaaaggattcaagcaaaaatatcaggatatgtgccttccacatttttaaggtatttgttgccaatccaaacaagcctcgtgagattattcaggttttggttgagaatcacagagaagtgttgaagctactccacaatctccccacaagcaaaggtgaagatgaacagcttgatgaggagagagatttaattatcaaagaaatcgagaagcttgtgcggttgtcagtataaaccctcaggaaattcgagcgtatccttgaagacatactgtgcaatatgctgccttgtatagagcttgtttttcatgtatggaaaaaaagtttggccacaaattgcattcttcacgagaacacttagcatttctgtcagaaaattattttcgtgtagcagaatttgcaacaggaataatctgcattatggtgtggtgttgataccattaaggattggtgaaagtgcctgccatttgaaatggaatgcctactagcaaaatcatctgtcaagctatcatctaagactacaatgatctctgggttgtg

SEQ ID NO: 22893 - DNA, 722 bp, Zea Mays
ctggaatccttgatactcctaggagcatccacatttctgataaattccaaaacactggttttatgcattgaaatgcagtgtcatcaaactcgatcggatgttgctaacaataaacggatgacagaagcaccatttctgccacgtgagaggctcttcaagctgcaacatcatttccagaacatgaccaagcacacctacctgaaagggcgctacgatgtgatcacctccgttgccatccctcttgcacttgctgcctccagcatgttcatgattgggcgtggagtttacaacatgtctcatggaattgggaaaaaggagtgatctaccacgggttaactagtttttctacttggcatggaagtaccatccagactatgaagtcttctttgcttgctaaataatactgtcaaagaacaagtcgactacatttttgcatcatatttctgtttgtatttgtggatatgaaatgccatcaacttgaagatcagcattgttactattttggttaattactccattcctgtcgctgtttgtgtcctttcaattgaagctagccttatatttttttctgaggtccagtcatcttactcagttcatcagctgctccgcaccacgtcatgcacaaatctcaaatctggctgaagcatgcacgcaagaggcatcttgtgcacaaaactgtcaaaccaagcggaaattatggtcaattgctatcttaggctagg

SEQ ID NO: 22894 - DNA, 1702 bp, Zea Mays
ctgccccccatccctgtgggaccaacttgcctcgcgtcactggaatagggagtggtcactctagagtctagaccccactagtcagcgaacctgacagtatggacccactcttctcgatgacgcggcgtgcgtttccgcttctggaatccagttctttgctttgcccttcctccgcccccttcctccccccgcgctgcctgccgtaggtacgggaagggaaaaaagtcggcgccaaatctccgcatccattcgcacgccgcgattcttgtgcgcgatccgccgcgcgatgatgatcccgtggggcggcgtggggtgttgcctcagcgctgcggcgctgtatctcctcgggaggagcagcggaagggatgcggaggtgctgcggtcggtggcgagggctggcagcatgaaggatttagctgctatcttggacactgcaagtaaagtcctaccacttgtagttgccgtctctgggagagttggttcagacacaccacttatatgccaacaaagcggcatgagaggtgtgatcgttgaggaaacggcagaacaacacttcttgaagcacaacgatgctggatcctggattcaagattctgcagttatgctttctgttagcaaagaggttccatggtatctggatgatggaactggacgtgtatatatggttggtgctcgttctgcagctggtttaattttaactgttgccagtgaggtttttgaggagtcagggaggacacttgtacgtggaactctagattatttacaagggttgaagatgctgggagtaaaacgaactgaaagggttcttccaactggaatctcattgacagttgttggttataccgccttgcttcaatgggctttgcaacatttggtgccttccttcttgcaaagcgtgcaatacaacattttctagaaagaaagcgccggcatgaactgcaaaaaagggttcttaatgcagcagcacaaaggcaagctagagaagctgaagggagcattggttcatcggacacagagcctaacagtaaaaaagaccaattagtgttggacatatgtgtcatatgccttgagcaagagtacaatgctgtttttgtgccgtgcggtcacatgtgttgctgtatggcatgctcttcacatttgacaaactgcccgctttgccggagaagaattgaccaagctgtcagaacattccgccattgacggtgataccacgtgcactgcttttgaaaccagttggctattggaagtgctggctcctgtcaaccaacgatatgaactgcaaaactgggtcgtagcagcttcttcatggagtttgcttttcgaacagaacagcgagtgatgcaagttgcaagctcatgattggcagttaagaaagataccctactgagatagtgccaatgggtgctcttgcatgtaatgtactactactacaactgtgtacaggacacttgtgtaaatgcacataggttagcagcttgcttcttgactaacacctaatgggcatttatgttgtgctaaccgaatgacaaaattagctcgtttagttgtgataatcgttttttctagtgagtggggaatgatacggatatctccgttcttttgtgctcacaggatcataagaaacagaaaagatttgtaacatgttctatattttactgctcattttgtaacctgaatgtgaggacaacatgttggcgcatta

SEQ ID NO: 22895 - DNA, 1813 bp, Zea Mays
ctgccccccatccctgtgggaccaacttgcctcgcgtcactggaatagggagtggtcactctagagtctagaccccactagtcagcgaacctgacagtatggacccactcttctcgatgacgcggcgtgcgtttccgcttctggaatccagttctttgctttgcccttcctccgcccccttcctccccccgcgctgcctgccgtaggtacgggaagggaaaaaagtcggcgccaaatctccgcatccattcgcacgccgcgattcttgtgcgcgatccgccgcgcgatgatgatcccgtggggcggcgtggggtgttgcctcagcgctgcggcgctgtatctcctcgggaggagcagcggaagggatgcggaggtgctgcggtcggtggcgagggctggcagcatgaaggatttagctgctatcttggacactgcaagtaaagtcctaccacttgtagttgccgtctctgggagagttggttcagacacaccacttatatgccaacaaagcggcatgagaggtgtgatcgttgaggaaacggcagaacaacacttcttgaagcacaacgatgctggatcctggattcaagattctgcagttatgctttctgttagcaaagaggttccatggatgatggaactggacgtgtatatatggttggtgctcgttctgcagctggtttaattttaactgttgccagtgaggtttttgaggagtcagggaggacacttgtacgtggaactctagattatttacaagggttgaagatgctgggagtaaaacgaactgaaagggttcttccaactggaatctcattgacagttgttggtgaggctattaaagatgatgttggaactattagaattcagcgaccgcataaaggacccttctatgtatcaccaaaaagcatcgatcaacttattatgaatcttggaaaatgggccaagttataccgccttgcttcaatgggctttgcaacatttggtgccttccttcttgcaaagcgtgcaatacaacattttctagaaagaaagcgccggcatgaactgcaaaaaagggttcttaatgcagcagcacaaaggcaagctagagaagctgaagggagcattggttcatcggacacagagcctaacagtaaaaaagaccaattagtgttggacatatgtgtcatatgccttgagcaagagtacaatgctgtttttgtgccgtgcggtcacatgtgttgctgtatggcatgctcttcacatttgacaaactgcccgctttgccggagaagaattgaccaagctgtcagaacattccgccattgacggtgataccacgtgcactgcttttgaaaccagttggctattggaagtgctggctcctgtcaaccaacgatatgaactgcaaaactgggtcgtagcagcttcttcatggagtttgcttttcgaacagaacagcgagtgatgcaagttgcaagctcatgattggcagttaagaaagataccctactgagatagtgccaatgggtgctcttgcatgtaatgtactactactacaactgtgtacaggacacttgtgtaaatgcacataggttagcagcttgcttcttgactaacacctaatgggcatttatgttgtgctaaccgaatgacaaaattagctcgtttagttgtgataatcgttttttctagtgagtggggaatgatacggatatctccgttcttttgtgctcacaggatcataagaaacagaaaagatttgtaacatgttctatattttactgctcattttgtaacctgaatgtgaggacaacatgttggcgcatta

SEQ ID NO: 22896 - DNA, 1652 bp, Zea Mays
tatggacccactcttctcgatgacgcggcgtgcgtttccgcttctggaatccagttctttgctttgcccttcctccgcccccttcctccccccgcgctgcctgccgtaggtacgggaagggaaaaaagtcggcgccaaatctccgcatccattcgcacgccgcgattcttgtgcgcgatccgccgcgcgatgatgatcccgtggggcggcgtggggtgttgcctcagcgctgcggcgctgtatctcctcgggaggagcagcggaagggatgcggaggtgctgcggtcggtggcgagggctggcagcatgaaggatttagctgctatcttggacactgcaagtaaagtcctaccacttgtagttgccgtctctgggagagttggttcagacacaccacttatatgccaacaaagcggcatgagaggtgtgatcgttgaggaaacggcagaacaacacttcttgaagcacaacgatgctggatcctggattcaagattctgcagttatgctttctgttagcaaagaggttccatggtatctgtgaggtttttgaggagtcagggaggacacttgtacgtggaactctagattatttacaagggttgaagatgctgggagtaaaacgaactgaaagggttcttccaactggaatctcattgacagttgttggtgaggctattaaagatgatgttggaactattagaattcagcgaccgcataaaggacccttctatgtatcaccaaaaagcatcgatcaacttattatgaatcttggaaaatgggccaagttataccgccttgcttcaatgggctttgcaacatttggtgccttccttcttgcaaagcgtgcaatacaacattttctagaaagaaagcgccggcatgaactgcaaaaaagggttcttaatgcagcagcacaaaggcaagctagagaagctgaagggagcattggttcatcggacacagagcctaacagtaaaaaagaccaattagtgttggacatatgtgtcatatgccttgagcaagagtacaatgctgtttttgtgccgtgcggtcacatgtgttgctgtatggcatgctcttcacatttgacaaactgcccgctttgccggagaagaattgaccaagctgtcagaacattccgccattgacggtgataccacgtgcactgcttttgaaaccagttggctattggaagtgctggctcctgtcaaccaacgatatgaactgcaaaactgggtcgtagcagcttcttcatggagtttgcttttcgaacagaacagcgagtgatgcaagttgcaagctcatgattggcagttaagaaagataccctactgagatagtgccaatgggtgctcttgcatgtaatgtactactactacaactgtgtacaggacacttgtgtaaatgcacataggttagcagcttgcttcttgactaacacctaatgggcatttatgttgtgctaaccgaatgacaaaattagctcgtttagttgtgataatcgttttttctagtgagtggggaatgatacggatatctccgttcttttgtgctcacaggatcataagaaacagaaaagatttgtaacatgttctatattttactgctcattttgtaacctgaatgtgaggacaacatgttggcgcatta

SEQ ID NO: 22897 - DNA, 1492 bp, Zea Mays
gcgtgcgtttccgcttctggaatccagttctttgctttgcccttcctccgcccccttcctccccccgcgctgcctgccgtaggtacgggaagggaaaaaagtcggcgccaaatctccgcatccattcgcacgccgcgattcttgtgcgcgatccgccgcgcgatgatgatcccgtggggcggcgtggggtgttgcctcagcgctgcggcgctgtatctcctcgggaggagcagcggaagggatgcggaggtgctgcggtcggtggcgagggctggcagcatgaaggatttagctgctatcttggacactgcaagtaaagtcctaccacttgtagttgccgtctctgggagagttggttcagacacaccacttatatgccaacaaagcggcatgagaggtgtgatcgttgaggaaacggcagaacaacacttcttgaagcacaacgatgctggatcctggattcaagattctgcagttatgctttctgttagcaaagaggttccatggtatctggctattaaagatgatgttggaactattagaattcagcgaccgcataaaggacccttctatgtatcaccaaaaagcatcgatcaacttattatgaatcttggaaaatgggccaagttataccgccttgcttcaatgggctttgcaacatttggtgccttccttcttgcaaagcgtgcaatacaacattttctagaaagaaagcgccggcatgaactgcaaaaaagggttcttaatgcagcagcacaaaggcaagctagagaagctgaagggagcattggttcatcggacacagagcctaacagtaaaaaagaccaattagtgttggacatatgtgtcatatgccttgagcaagagtacaatgctgtttttgtgccgtgcggtcacatgtgttgctgtatggcatgctcttcacatttgacaaactgcccgctttgccggagaagaattgaccaagctgtcagaacattccgccattgacggtgataccacgtgcactgcttttgaaaccagttggctattggaagtgctggctcctgtcaaccaacgatatgaactgcaaaactgggtcgtagcagcttcttcatggagtttgcttttcgaacagaacagcgagtgatgcaagttgcaagctcatgattggcagttaagaaagataccctactgagatagtgccaatgggtgctcttgcatgtaatgtactactactacaactgtgtacaggacacttgtgtaaatgcacataggttagcagcttgcttcttgactaacacctaatgggcatttatgttgtgctaaccgaatgacaaaattagctcgtttagttgtgataatcgttttttctagtgagtggggaatgatacggatatctccgttcttttgtgctcacaggatcataagaaacagaaaagatttgtaacatgttctatattttactgctcattttgtaacctgaatgtgaggacaacatgttggcgcatta

SEQ ID NO: 22898 - DNA, 1246 bp, Zea Mays
gtgcgtttccgcttctggaatccagttctttgctttgcccttcctccgcccccttcctccccccgcgctgcctgccgtaggtacgggaagggaaaaaagtcggcgccaaatctccgcatccattcgcacgccgcgattcttgtgcgcgatccgccgcgcgatgatgatcccgtggggcggcgtggggtgttgcctcagcgctgcggcgctgtatctcctcgggaggagcagcggaagggatgcggaggtgctgcggtcggtggcgagggctggcagcatgaaggatttagctgctatcttggacactgcaagtaaagtcctaccacttgtagttgccgtctctgggagagttggttcagacacaccacttatatgccaacaaagcggcatgagaggtgtgatcgttgaggaaacggcagaacaacacttcttgaagcacaacgatgctggatcctggattcaagattctgcagttatgctttctgttagcaaagaggttccatggtatctggatgatggaactggacgtgtatatatggttggtgctcgttctgcagctggtttaattttaactgttgccagtgaggtttttgaggagtcagggaggacacttgtacgtggaactctagattatttacaagggttgaagatgctgggagtaaaacgaactgaaagggttcttccaactggaatctcattgacagttgttggtgaggctattaaagatgatgttggaactattagaattcagcgaccgcataaaggacccttctatgtatcaccaaaaagcatcgatcaacttattatgaatcttggaaaatgggccaagttataccgccttgcttcaatgggctttgcaacatttggtgccttccttcttgcaaagcgtgcaatacaacattttctagaaagaaagcgccggcatgaactgcaaaaaagggttcttaatgcagcagcacaaaggcaagctagagaagctgaagggagcattggttcatcggacacagagcctaacagtaaaaaagaccaattagtgttggacatatgtgtcatatgccttgagcaagagtacaatgctgtttttgtgccggtctaaaagggttaaaaaactggataagcattgttttgcatcatacttcaccaagaagcccgaggaaatagtcgaactgcagatatgtgaaattcgttcataatttgtccttgctatcactgttgtcacccctgaaagtttctgtttggactttaa

SEQ ID NO: 22899 - DNA, 1681 bp, Zea Mays
ccgcttctggaatccagttctttgctttgcccttcctccgcccccttcctccccccgcgctgcctgccgtaggtacgggaagggaaaaaagtcggcgccaaatctccgcatccattcgcacgccgcgattcttgtgcgcgatccgccgcgcgatgatgatcccgtggggcggcgtggggtgttgcctcagcgctgcggcgctgtatctcctcgggaggagcagcggaagggatgcggaggtgctgcggtcggtggcgagggctggcagcatgaaggatttagctgctatcttggacactgcaagtaaagtcctaccacttgtagttgccgtctctgggagagttggttcagacacaccacttatatgccaacaaagcggcatgagaggtgtgatcgttgaggaaacggcagaacaacacttcttgaagcacaacgatgctggatcctggattcaagattctgcagttatgctttctgttagcaaagaggttccatggtatctggatgatggaactggacgtgtatatatggttggtgctcgttctgcagctggtttaattttaactgttgccagtgaggtttttgaggagtcagggaggacacttgtacgtggaactctagattatttacaagggttgaagatgctgggagtaaaacgaactgaaagggttcttccaactggaatctcattgacagttgttggctattaaagatgatgttggaactattagaattcagcgaccgcataaaggacccttctatgtatcaccaaaaagcatcgatcaacttattatgaatcttggaaaatgggccaagttataccgccttgcttcaatgggctttgcaacatttggtgccttccttcttgcaaagcgtgcaatacaacattttctagaaagaaagcgccggcatgaactgcaaaaaagggttcttaatgcagcagcacaaaggcaagctagagaagctgaagggagcattggttcatcggacacagagcctaacagtaaaaaagaccaattagtgttggacatatgtgtcatatgccttgagcaagagtacaatgctgtttttgtgccgtgcggtcacatgtgttgctgtatggcatgctcttcacatttgacaaactgcccgctttgccggagaagaattgaccaagctgtcagaacattccgccattgacggtgataccacgtgcactgcttttgaaaccagttggctattggaagtgctggctcctgtcaaccaacgatatgaactgcaaaactgggtcgtagcagcttcttcatggagtttgcttttcgaacagaacagcgagtgatgcaagttgcaagctcatgattggcagttaagaaagataccctactgagatagtgccaatgggtgctcttgcatgtaatgtactactactacaactgtgtacaggacacttgtgtaaatgcacataggttagcagcttgcttcttgactaacacctaatgggcatttatgttgtgctaaccgaatgacaaaattagctcgtttagttgtgataatcgttttttctagtgagtggggaatgatacggatatctccgttcttttgtgctcacaggatcataagaaacagaaaagatttgtaacatgttctatattttactgctcattttgtaacctgaatgtgaggacaacatgttggcgcatta

SEQ ID NO: 22900 - DNA, 1611 bp, Zea Mays
gttggttttagtgtggtggtctctaagatctcctaatgggtcgatactaatctatgtttgcgctgaaagtgcaaacatgataagattcttaactcgggttcatatttagcaattaaaggttttgcagattttctcagtatctgatcaacataaagaactgtaaccttgttgtgttttcagtgcttaagaatataaaagaacttcagtttagctgctatcttggacactgcaagtaaagtcctaccacttgtagttgccgtctctgggagagttggttcagacacaccacttatatgccaacaaagcggcatgagaggtgtgatcgttgaggaaacgaacaacacttcttgaagcacaacgatgctggatcctggattcaagattctgcagttatgctttctgttagcaaagaggttccatggtatctggatgatggaactggacgtgtatatatggttggtgctcgttctgcagctggtttaattttaactgttgccagtgaggtttttgaggagtcagggaggacacttgtacgtggaactctagattatttacaagggttgaagatgctgggagtaaaacgaactgaaagggttcttccaactggaatctcattgacagttgttggtgaggctattaaagatgatgttggaactattagaattcagcgaccgcataaaggacccttctatgtatcaccaaaaagcatcgatcaacttattatgaatcttggaaaatgggccaagttataccgccttgcttcaatgggctttgcaacatttggtgccttccttcttgcaaagcgtgcaatacaacattttctagaaagaaagcgccggcatgaactgcaaaaaagggttcttaatgcagcagcacaaaggcaagctagagaagctgaagggagcattggttcatcggacacagagcctaacagtaaaaaagaccaattagtgttggacatatgtgtcatatgccttgagcaagagtacaatgctgtttttgtgccgtgcggtcacatgtgttgctgtatggcatgctcttcacatttgacaaactgcccgctttgccggagaagaattgaccaagctgtcagaacattccgccattgacggtgataccacgtgcactgcttttgaaaccagttggctattggaagtgctggctcctgtcaaccaacgatatgaactgcaaaactgggtcgtagcagcttcttcatggagtttgcttttcgaacagaacagcgagtgatgcaagttgcaagctcatgattggcagttaagaaagataccctactgagatagtgccaatgggtgctcttgcatgtaatgtactactactacaactgtgtacaggacacttgtgtaaatgcacataggttagcagcttgcttcttgactaacacctaatgggcatttatgttgtgctaaccgaatgacaaaattagctcgtttagttgtgataatcgttttttctagtgagtggggaatgatacggatatctccgttcttttgtgctcacaggatcataagaaacagaaaagatttgtaacatgttctatattttactgctcattttgtaacctgaatgtgaggacaacatgttggcgcatta

SEQ ID NO: 22901 - DNA, 3096 bp, Zea Mays
gtccctgtcccaccgtcttgtgtcccactatcgcgttgatgcctcccaccgaaatgcatgtcctaaaccctaacgtagctcctacactgcaccgccaacttcaccgcacgagccaaaacggcggccatgtccgtccgccccagtcctacccggcttatgcacgcggcgaagagtggtgccgtcgtcacccttcgcaggtgcagcctcacctccaggagcgccttcttcctcgaccaatttgcctccgtccaggcttcgaccgagctcgtgaacctcctcctgggcgaccatcgcattgaatgtgacgctcgtgaacctcctcccgagttcgtgaacctcctctcacacgccaatccccttactctgttgtgcctccgccccctcccagcatctagcgcgcactgccatcctctgcgccccatcgtctaccgtgaggcatccatccctccttctcccacacactcggatcctccgaacacgccaccaagctcaacgcgatggccgcaccccgcctccctgccccaccgccggcgaggtgcaccgtcgccaccagaggacgagcacgagcaacagaagaccttgaggagaagcccaccatcgaggatatgtccgtcttctccgctgccactgtgccgcctcgcccagccacgcagatacgtggatttgatccaccaccagctcgagtttttgcttggcattgccctggagttggatgcattcaagtattgtaagatccttcttttttggttatttccttgcataaatatcattttgcgatgatgttttgttaaaatactactgattgccattacaccgataagcccaactaggggatgacttgataaccttgcttaccaatattgttattatttgattagtgcaaatagttgcttcatatggaggatgcacaggtgcaaacaatcttgataagaatggtaaactagactggtatgccagacatgtctactatttttcacatgtttttagtcacctgtttgagtgatggtgaaccttacaatgacacctgacagaactatctcaatcccgcgtttattttagaggagatttcgagtgggtgagcgcggcaacgacatgttgacaggagacggcgggaagcgctcgacaagctaattaacttgaaaggaagtgtcggggtcttctgtcgggtctgaccgcttttgaacactgagtcaccggttactgtcgagcaggagaggatcacggtcaagtcagtcgggattaagaaagagttcgatgctgatagggtctttgggcaggagtatgcacaagccaggaaaacatgcttcctgctgagtttgaaattaccgattgttgccatccttgtgattcggacaaggaaaatgttcttgctattcaagttatgagatggagtgatggctcttatcttgaagatcaggatcactggcggttgtctggtattcacagggacgtgctcttagtatcaaagccacatgttacacctcatttaaacttgaattaggtgccccatgttatgggtttgtcaagattcggcataataactcattagttaattctaataggtagaaatgcacatggcatttggctatcttcataaacccaagataaatatggatccttttatgcttgcaccctaaaagaatatggagcatcagttgtgaacttttcttctattaaactaatagtatttcacatactatactaaatgagtgtgagtccactattctgttctttaacctctctctaggaagaatccatggtctgcattgttttacaggtaatttatatgtattgctttgttagtcaaacatagcctatgtccaatggttgcttcaaatgataatatacttttacttagcagatatcatttgatttgtaagagaaggtgttcctgaatgcatcttggcttttagggctaaacattttgagatgcttatggtcctttttctgcaggtagcctcagtgataacttctttgcgatcattgtgccgactgagtacgattgtttaacggccagcactaggaagaaggaaattgttgatgtcatagttaaggctttcaagagcacatgagtatgaacctgaggtggcttgctggcgtacatggagtggtgacagattgcatgctggtagttgatgaaactggtgggatatttgagaaaggtggaatttagatctactgtaagcagtgggaaaagtaggctatttcctgtagaggtgcataaaatctcaaagcgaggattataggtccttcaacttttttaagtgtcctcgatatggacctgattttctcttggagtgaaccgcctaataggtttaacgacctaaatcctcattttgagagcttatggcctaagtgagaatccaagataagtttaagatctccatgtgcattttactcctagatttatacagtgatagtaccaaatttcttgttaatcatttcacattcaccttatctattttgtgttccaggttctatttaataatgaaaatggaataggcattgaaaaaacaagagatgaagctcaagctcaagatgctgagaaaactctccaaaatttaaagaaatttggtagagaagagtcaaaatctcagccaggaaacacactcgatgatgaggatataaagctattaggtgatgatgaggatgctttagcagatgatgaatgaaggacatcgctgttggagaagtacctatgttgattgcagggttttgcaatggattgtcttatctctaaagattgtagtctaggtatctaaacgaggaactaacatgtactagattgtattgtcgtagatgtttgtttgtgagagaacatttgtgaagttacggggtgaccagttgatcacaatgccagctcttttgtgttgagttcatactgtattcttaactaaccacaactaatcatatgatgagtcataggagacttttttgacttcagtacattctttgataggggatgaatttgcatgagaggttatgaactgcaggcagagtgagtgatgggagtgtttgcatattaaagtgcactgcacgatggaggattaaggtgtttgtggatgttgagcgtttacttcagcttattcaatcttg

SEQ ID NO: 22902 - DNA, 1021 bp, Zea Mays
atgcttcctgctgagtttgaaattaccgattgttgccatccttgtgattcggacaaggaaaatgttcttgctattcaagttatgagatggagtgatggctcttatcttgaagatcaggatcactggcggttgtctggtagcctcagtgataacttctttgcgatcattgtgccgactgagtacgattgtttaacggccagcactaggaagaaggaaattgttgatgtcatagttaaggctttcaagagcacatgagtatgaacctgaggtggcttgctggcgtacatggagtggtgacagattgcatgctggtagttgatgaaactggtgggatatttgagaaaggtggaatttagatctactgtaagcagtgggaaaagtaggctatttcctgtagaggttctatttaataatgaaaatggaataggcattgaaaaaacaagagatgaagctcaagctcaagatgctgagaaaactctccaaaatttaaagaaatttggtagagaagagtcaaaatctcagccaggaaacacactcgatgatgaggatataaagctattaggtgatgatgaggatgctttagcagatgatgaatgaaggacatcgctgttggagaagtacctatgttgattgcagggttttgcaatggattgtcttatctctaaagattgtagtctaggtatctaaacgaggaactaacatgtactagattgtattgtcgtagatgtttgtttgtgagagaacatttgtgaagttacggggtgaccagttgatcacaatgccagctcttttgtgttgagttcatactgtattcttaactaaccacaactaatcatatgatgagtcataggagacttttttgacttcagtacattctttgataggggatgaatttgcatgagaggttatgaactgcaggcagagtgagtgatgggagtgtttgcatattaaagtgcactgcacgatggaggattaaggtgtttgtggatgttgagcgtttacttcagcttattcaatcttg

SEQ ID NO: 22903 - DNA, 3355 bp, Zea Mays
tataaaaatattggggaaaagcgtcggatgtaagcgacgctgtttcgtcgtagtttataaaggccgcgggcccgcggcgcaataggagcccatccttcctgatacattcgtgtctcccatcgccaggtagatccctttcctcacgccacgccgagagagaaaagatagagggagaggcaagagtcgcatcgcagacccagaccacgccgccgccacctccgccgccacttccgccggtgatcgagtcgcgtcggcgctaccttcaagctagaagacaataagcatcggcagacatgttcggctccaccaacccatttgggcagtcgtccacaagcccatttggccagacctcgtttggaactccacagggatttggccagtcttccactgctgccaacaatccttttgccccaaaaccatttggcagcccgaccacagcttttggggcacagaccggaagctcgctatttggcacaacatccactggtgcctttggccagcagcaatccactcccacatttggcacaacatcctcatctcagtttgggagctctacaccagccttcggtgcatcccccactcctgcctttggtgccacatcctctggatctttgttcggacagaagccaagttttgggggttttggatcatcttctagccagtcaagtccttttggtaacacgttccagcaaacacaaccaacatttggcagcagcacttttggttcatcaactccgccggcgtttggtgccacggctcctgcatttggcacaactacaccagcctttggcaccacaactgcaccagccttcggtgccacgactagcccagcatttggttcaacttcaacatctttatttggtgcttctagcgccccaatgtttggttcttcagcctttggcacatctgctactggttttggaacttcagggactacagcatttggtgtgagtagtactactccgggttttggatcatcaagcacaccttcatttggcacatcagctagtgcgttcagttttggttcgtcaccatcttttggacaaacagcagtttcctctggtagcactccctttggaacaactccctcaccttttggtgcaccagctcctgcgtttggctcacagacagcagcaccaacttttggacaaccacaatttgctaatcaagctggaggaaccagaataaaaccttattctcaaacaccagatgttgacagtgctactagtggtactcagcctgctgcaaaacttgattccatatcagcaatgcctgagtacaaagagaagagtcatgaagaattgaggtgggaagactaccagcgtggagacaagggtggaccgaacacttctggaactcaaacattggcacctagctttccatcaccaatacaacataacacttttgcttcgacaagtaatccgttctcaacgaacccattttcaacaaacaacccgtttgctcctaagcccactacaactactagttcaccattcaacacctcatttaacaatgcatcagttgcaagttcgagtctattcacatcatcccctggtaccacaatgtttgggcaaccaggtgtttctacacttccagctccagcaagtaattcaccatcattatttggaaatatcaatcctgctcctgctacatcgtcaatatttgccacgtcagtgacgaataatccaagtccattcggcactggcacatcattggctaacactcaatcagccccactattttcctcagcatttgctcaaccgacatcaagtacaccggctttctcctctgggagcctatttggctcaactaatcctggcagtctgtttaccagcagcggtccttcacttttttcaacaccaacatttcaaccatctgcccctgctcagagttcgaacatgttctccttccaacccccaattcaaccagcttctaccggtggactcccttttttccccaacacaaatcaggccttgacgggacagccaacttctagcctgtccagtatggtcatgcagtctgctcttgtttcaaatccatttgggatgcttccagcaatgcctcagatgtccatcgggaatggtggatcttcaccttcagttcaatatggaatatcaagtttgccggttgcggagaagcctcttccaagtagatcattgtccatggcggttcctaggcatttgtcacagagaaggataaaactgctgccaagaaaatataatccaatatctgatggcaaggttccattctttgctgatgatgaagaatctccagcaacaccaaaggcagatgcttttttcatccctagagagaacccaaggaacctggtaattcgtccaattgagcagtggtcttcacggagagaaactggccggcaatatactgcaaagaatgttactgattcgaacaaatatgaagatgcttccattgaaagtgagcgtggtaagtctgccatgtcaccaagcagcaggccacctgcagtggaaaatgacaaacagcatgaggccagggccatggctcaacatgcgaatggaaatggtacttcagttgagaggctgttgcctaagcttccacgtgcagattacttcacagagcctagtatagaggagcttgcggccaaagaacgtgcggagccaggctactgcggtcgagtgagggacttcgttgtgggtcgacatgactacggcagcatcaaatttttcggggagacggacgtgaggtgcctcgatctggagtcaattgtggagtttaacgaccgggaggttattgtgtacaaggacgatagcaagaagccccctgtgggcgaggggctgaacaaggctgcagaggtgactctactgaacatcaagtgcgtaaacaagaagaccggggagccgtgccagggggcaagagtggagaggtacagggagatgctggtgaagaaggcggaggagcagggcgcagagtttgtgtccttcgacgctgtcaagggagagtggaagttcagggtgaagcacttcagcgcctacgggctttggtgaaatcctggggagttaagtagtttgtttgttctgatggaacaacgctttacgctcttgtcaattaccatgcttggatctgttgtgctgcttctgtacaatgttgctgctgttaaaatgcttgcaaattgcactgctctgctgctgaaaacaggagcagcagtagaaactaccgcaacaggagggcgtgctacctgctactgttatgtattattattattatactatattctaagtataataagacttagttttttaaatacatgaatattactttatgcacttagatatatgctatgtatggagagaaaataattatatataatagtatataaaat

SEQ ID NO: 22904 - DNA, 3407 bp, Zea Mays
cgacgctgtttcgtcgtagtttataaaggccgcgggcccgcggcgcaataggagcccatccttcctgatacattcgtgtctcccatcgccaggtagatccctttcctcacgccacgccgagagagaaaagatagagggagaggcaagagtcgcatcgcagacccagaccacgccgccgccacctccgccgccacttccgccggtgatcgagtcgcgtcggcgctaccttcaagctagaagacaataagcatcggcagacatgttcggctccaccaacccatttgggcagtcgtccacaagcccatttggccagacctcgtttggaactccacagggatttggccagtcttccactgctgccaacaatccttttgccccaaaaccatttggcagcccgaccacagcttttggggcacagaccggaagctcgctatttggcacaacatccactggtgcctttggccagcagcaatccactcccacatttggcacaacatcctcatctcagtttgggagctctacaccagccttcggtgcatcccccactcctgcctttggtgccacatcctctggatctttgttcggacagaagccaagttttgggggttttggatcatcttctagccagtcaagtccttttggtaacacgttccagcaaacacaaccaacatttggcagcagcacttttggttcatcaactccgccggcgtttggtgccacggctcctgcatttggcacaactacaccagcctttggcaccacaactgcaccagccttcggtgccacgactagcccagcatttggttcaacttcaacatctttatttggtgcttctagcgccccaatgtttggttcttcagcctttggcacatctgctactggttttggaacttcagggactacagcatttggtgtgagtagtactactccgggttttggatcatcaagcacaccttcatttggcacatcagctagtgcgttcagttttggttcgtcaccatcttttggacaaacagcagtttcctctggtagcactccctttggaacaactccctcaccttttggtgcaccagctcctgcgtttggctcacagacagcagcaccaacttttggacaaccacaatttgctaatcaagctggaggaaccagaataaaaccttattctcaaacaccagatgttgacagtgctactagtggtactcagcctgctgcaaaacttgattccatatcagcaatgcctgagtacaaagagaagagtcatgaagaattgaggtgggaagactaccagcgtggagacaagggtggaccgaacacttctggaactcaaacattggcacctagctttccatcaccaatacaacataacacttttgcttcgacaagtgtttctacacttccagctccagcaagtaattcaccatcattatttggaaatatcaatcctgctcctgctacatcgtcaatatttgccaccatttgctcaaccgacatcaagtacaccggctttctcctctgggagcctatttggctcaactaatcctggcagtctgtttaccagcagcggtccttcacttttttcaacaccaacatttcaaccatctgcccctgctcagagttcgaacatgttctccttccaacccccaattcaaccagcagcttctaccggtggactcccttttttccccaacacaaatcaggccttgacgggacagccgtatgatctgctgctacttttcaaatacacatcattattcctttcctatttagcaatttccttttgatggattaaaacaccgattagttataacaaggtgaaggaaaaatattatgatcagtctaatgtgtagaatggtgtaggcacagaagggaaaaacttgatggttcatggagactactttatatttgatgacatgagactgctggattgtaattttatatctgtagagcatggttttggcatagatcataattcacgagtgaattttggcaatggtcccccccctgttaacatggtatatcctgttgcattttttacacagaacttctagcctgtccagtatggtcatgcagtctgctcttgtttcaaatccatttgggatgcttccagcaatgcctcagatgtccatcgggaatggtggatcttcaccttcagttcaatatggaatatcaagtttgccggttgcggagaagcctcttccaagtagatcattgtccatggcggttcctaggcatttgtcacagagaaggataaaactgctgccaagaaaatataatccaatatctgatggcaaggttccattctttgctgatgatgaagaatctccagcaacaccaaaggcagatgcttttttcatccctagagagaacccaaggaacctggtaattcgtccaattgagcagtggtcttcacggagagaaactggccggcaatatactgcaaagaatgttactgattcgaacaaatatgaagatgcttccattgaaagtgagcgtggtaagtctgccatgtcaccaagcagcaggccacctgcagtggaaaatgacaaacagcatgaggccagggccatggctcaacatgcgaatggaaatggtacttcagttgagaggctgttgcctaagcttccacgtgcagattacttcacagagcctagtatagaggagcttgcggccaaagaacgtgcggagccaggctactgcggtcgagtgagggacttcgttgtgggtcgacatgactacggcagcatcaaatttttcggggagacggacgtgaggtgcctcgatctggagtcaattgtggagtttaacgaccgggaggttattgtgtacaaggacgatagcaagaagccccctgtgggcgaggggctgaacaaggctgcagaggtgactctactgaacatcaagtgcgtaaacaagaagaccggggagccgtgccagggggcaagagtggagaggtacagggagatgctggtgaagaaggcggaggagcagggcgcagagtttgtgtccttcgacgctgtcaagggagagtggaagttcagggtgaagcacttcagcgcctacgggctttggtgaaatcctggggagttaagtagtttgtttgttctgatggaacaacgctttacgctcttgtcaattaccatgcttggatctgttgtgctgcttctgtacaatgttgctgctgttaaaatgcttgcaaattgcactgctctgctgctgaaaacaggagcagcagtagaaactaccgcaacaggagggcgtgctacctgctactgttatgtattattattattatactatattctaagtataataagacttagttttttaaatacatgaatattactttatgcacttagatatatgctatgtatggagagaaaataattatatataatagtatataaaat

SEQ ID NO: 22905 - DNA, 2804 bp, Zea Mays
tccttcctgatacattcgtgtctcccatcgccaggtagatccctttcctcacgccacgccgagagagaaaagatagagggagaggcaagagtcgcatcgcagacccagaccacgccgccgccacctccgccgccacttccgccggtgatcgagtcgcgtcggcgctaccttcaagctagaagacaataagcatcggcagacatgttcggctccaccaacccatttgggcagtcgtccacaagcccatttggccagacctcgtttggaactccacagggatttggccagtcttccactgctgccaacaatccttttgccccaaaaccatttggcagcccgaccacagcttttggggcacagaccggaagctcgctctttgcaactacatccactggtgcctttggccagcagcaatccactcccgcatttggcacaacatccactggtgcctttggccagcagcaatccactcccacatttggcacaacatcctcatctcagtttgggagctctacaccagccttcggtgcatcccccactcctgcctttggtgccacatcctctggctcacagacagcagcaccaacttttggacaaccacaatttgctaatcaagctggaggaaccagaataaaaccttattctcaaacaccagatgttgacagtgctactagtggtactcagcctgctgcaaaacttgattccatatcagcaatgcctgagtacaaagagaagagtcatgaagaattgaggtgggaagactaccagcgtggagacaagggtggaccgaacacttctggaactcaaacattggcacctagctttccatcaccaatacaacataacacttttgcttcgacaagtaatccgttctcaacgaacccattttcaacaaacaacccgtttgctcctaagcccactacaactactagttcaccattcaacacctcatttaacaatgcatcagttgcaagttcgagtctattcacatcatcccctggtaccacaatgtttgggcaaccaggtgtttctacacttccagctccagcaagtaattcaccatcattatttggaaatatcaatcctgctcctgctacatcgtcaatatttgccacgtcagtgacgaataatccaagtccattcggcactggcacatcattggctaacactcaatcagccccactattttcctcagcatttgctcaaccgacatcaagtacaccggctttctcctctgggagcctatttggctcaactaatcctggcagtctgtttaccagcagcggtccttcacttttttcaacaccaacatttcaaccatctgcccctgctcagagttcgaacatgttctccttccaacccccaattcaaccagcagcttctaccggtggactcccttttttccccaacacaaatcaggccttgacgggacagccaacttctagcctgtccagtatggtcatgcagtctgctcttgtttcaaatccatttgggatgcttccagcaatgcctcagatgtccatcgggaatggtggatcttcaccttcagttcaatatggaatatcaagtttgccggttgcggagaagcctcttccaagtagatcattgtccatggcggttcctaggcatttgtcacagagaaggataaaactgctgccaagaaaatataatccaatatctgatggcaaggttccattctttgctgatgatgaagaatctccagcaacaccaaaggcagatgcttttttcatccctagagagaacccaaggaacctggtaattcgtccaattgagcagtggtcttcacggagagaaactggccggcaatatactgcaaagaatgttactgattcgaacaaatatgaagatgcttccattgaaagtgagcgtggtaagtctgccatgtcaccaagcagcaggccacctgcagtggaaaatgacaaacagcatgaggccagggccatggctcaacatgcgaatggaaatggtacttcagttgagaggctgttgcctaagcttccacgtgcagattacttcacagagcctagtatagaggagcttgcggccaaagaacgtgcggagccaggctactgcggtcgagtgagggacttcgttgtgggtcgacatgactacggcagcatcaaatttttcggggagacggacgtgaggtgcctcgatctggagtcaattgtggagtttaacgaccgggaggttattgtgtacaaggacgatagcaagaagccccctgtgggcgaggggctgaacaaggctgcagaggtgactctactgaacatcaagtgcgtaaacaagaagaccggggagccgtgccagggggcaagagtggagaggtacagggagatgctggtgaagaaggcggaggagcagggcgcagagtttgtgtccttcgacgctgtcaagggagagtggaagttcagggtgaagcacttcagcgcctacgggctttggtgaaatcctggggagttaagtagtttgtttgttctgatggaacaacgctttacgctcttgtcaattaccatgcttggatctgttgtgctgcttctgtacaatgttgctgctgttaaaatgcttgcaaattgcactgctctgctgctgaaaacaggagcagcagtagaaactaccgcaacaggagggcgtgctacctgctactgttatgtattattattattatactatattctaagtataataagacttagttttttaaatacatgaatattactttatgcacttagatatatgctatgtatggagagaaaataattatatataatagtatataaaat

SEQ ID NO: 22906 - DNA, 2972 bp, Zea Mays
tccttcctgatacattcgtgtctcccatcgccaggtagatccctttcctcacgccacgccgagagagaaaagatagagggagaggcaagagtcgcatcgcagacccagaccacgccgccgccacctccgccgccacttccgccggtgatcgagtcgcgtcggcgctaccttcaagctagaagacaataagcatcggcagacatgttcggctccaccaaccgatctttgttcggacagaagccaagttttgggggttttggatcatcttctagccagtcaagtccttttggtaacacgttccagcaaacacaaccaacatttggcagcagcacttttggttcatcaactccgccggcgtttggtgccacggctcctgcatttggcacaactacaccagcctttggcaccacaactgcaccagccttcggtgccacgactagcccagcatttggttcaacttcaacatctttatttggtgcttctagcgccccaatgtttggttcttcagcctttggcacatctgctactggttttggaacttcagggactacagcatttggtgtgagtagtactactccgggttttggatcatcaagcacaccttcatttggcacatcagctagtgcgttcagttttggttcgtcaccatcttttggacaaacagcagtttcctctggtagcactccctttggaacaactccctcaccttttggtgcaccagctcctgcgtttggctcacagacagcagcaccaacttttggacaaccacaatttgctaatcaagctggaggaaccagaataaaaccttattctcaaacaccagatgttgacagtgctactagtggtactcagcctgctgcaaaacttgattccatatcagcaatgcctgagtacaaagagaagagtcatgaagaattgaggtgggaagactaccagcgtggagacaagggtggaccgaacacttctggaactcaaacattggcacctagctttccatcaccaatacaacataacacttttgcttcgacaagtaatccgttctcaacgaacccattttcaacaaacaacccgtttgctcctaagcccactacaactactagttcaccattcaacacctcatttaacaatgcatcagttgcaagttcgagtctattcacatcatcccctggtaccacaatgtttgggcaaccaggtgtttctacacttccagctccagcaagtaattcaccatcattatttggaaatatcaatcctgctcctgctacatcgtcaatatttgccacgtcagtgacgaataatccaagtccattcggcactggcacatcattggctaacactcaatcagccccactattttcctcagcatttgctcaaccgacatcaagtacaccggctttctcctctgggagcctatttggctcaactaatcctggcagtctgtttaccagcagcggtccttcacttttttcaacaccaacatttcaaccatctgcccctgctcagagttcgaacatgttctccttccaacccccaattcaaccagcagcttctaccggtggactcccttttttccccaacacaaatcaggccttgacgggacagccaacttctagcctgtccagtatggtcatgcagtctgctcttgtttcaaatccatttgggatgcttccagcaatgcctcagatgtccatcgggaatggtggatcttcaccttcagttcaatatggaatatcaagtttgccggttgcggagaagcctcttccaagtagatcattgtccatggcggttcctaggcatttgtcacagagaaggataaaactgctgccaagaaaatataatccaatatctgatggcaaggttccattctttgctgatgatgaagaatctccagcaacaccaaaggcagatgcttttttcatccctagagagaacccaaggaacctggtaattcgtccaattgagcagtggtcttcacggagagaaactggccggcaatatactgcaaagaatgttactgattcgaacaaatatgaagatgcttccattgaaagtgagcgtggtaagtctgccatgtcaccaagcagcaggccacctgcagtggaaaatgacaaacagcatgaggccagggccatggctcaacatgcgaatggaaatggtacttcagttgagaggctgttgcctaagcttccacgtgcagattacttcacagagcctagtatagaggagcttgcggccaaagaacgtgcggagccaggctactgcggtcgagtgagggacttcgttgtgggtcgacatgactacggcagcatcaaatttttcggggagacggacgtgaggtgcctcgatctggagtcaattgtggagtttaacgaccgggaggttattgtgtacaaggacgatagcaagaagccccctgtgggcgaggggctgaacaaggctgcagaggtgactctactgaacatcaagtgcgtaaacaagaagaccggggagccgtgccagggggcaagagtggagaggtacagggagatgctggtgaagaaggcggaggagcagggcgcagagtttgtgtccttcgacgctgtcaagggagagtggaagttcagggtgaagcacttcagcgcctacgggctttggtgaaatcctggggagttaagtagtttgtttgttctgatggaacaacgctttacgctcttgtcaattaccatgcttggatctgttgtgctgcttctgtacaatgttgctgctgttaaaatgcttgcaaattgcactgctctgctgctgaaaacaggagcagcagtagaaactaccgcaacaggagggcgtgctacctgctactgttatgtattattattattatactatattctaagtataataagacttagttttttaaatacatgaatattactttatgcacttagatatatgctatgtatggagagaaaataattatatataatagtatataaaat

SEQ ID NO: 22907 - DNA, 3403 bp, Zea Mays
tccttcctgatacattcgtgtctcccatcgccaggtagatccctttcctcacgccacgccgagagagaaaagatagagggagaggcaagagtcgcatcgcagacccagaccacgccgccgccacctccgccgccacttccgccggtgatcgagtcgcgtcggcgctaccttcaagctagaagacaataagcatcggcagacatgttcggctccaccaacccatttgggcagtcgtccacaagcccatttggccagacctcgtttggaactccacagggatttggccagtcttccactgctgccaacaatccttttgccccaaaaccatttggcagcccgaccacagcttttggggcacagaccggaagctcgctctttgcaactacatccactggtgcctttggccagcagcaatccactcccgcatttggcacaacatccactggtgcctttggccagcagcaatccactcccacatttggcacaacatcctcatctcagtttgggagctctacaccagccttcggtgcatcccccactcctgcctttggtgccacatcctctggatctttgttcggacagaagccaagttttgggggttttggatcatcttctagccagtcaagtccttttggtaacacgttccagcaaacacaaccaacatttggcagcagcacttttggttcatcaactccgccggcgtttggtgccacggctcctgcatttggcacaactacaccagcctttggcaccacaactgcaccagccttcggtgccacgactagcccagcatttggttcaacttcaacatctttatttggtgcttctagcgccccaatgtttggttcttcagcctttggcacatctgctactggttttggaacttcagggactacagcatttggtgtgagtagtactactccgggttttggatcatcaagcacaccttcatttggcacatcagctagtgcgttcagttttggttcgtcaccatcttttggacaaacagcagtttcctctggtagcactccctttggaacaactccctcaccttttggtgcaccagctcctgcgtttggctcacagacagcagcaccaacttttggacaaccacaatttgctaatcaagctggaggaaccagaataaaaccttattctcaaacaccagatgttgacagtgctactagtggtactcagcctgctgcaaaacttgattccatatcagcaatgcctgagtacaaagagaagagtcatgaagaattgaggtgggaagactaccagcgtggagacaagggtggaccgaacacttctggaactcaaacattggcacctagctttccatcaccaatacaacataacacttttgcttcgacaagtaatccgttctcaacgaacccattttcaacaaacaacccgtttgctcctaagcccactacaactactagttcaccattcaacacctcatttaacaatgcatcagttgcaagttcgagtctattcacatcatcccctggtaccacaatgtttgggcaaccaggtgtttctacacttccagctccagcaacatttgctcaaccgacatcaagtacaccggctttctcctctgggagcctatttggctcaactaatcctggcagtctgtttaccagcagcggtccttcacttttttcaacaccaacatttcaaccatctgcccctgctcagagttcgaacatgttctccttccaacccccaattcaaccagcagcttctaccggtggactcccttttttccccaacacaaatcaggccttgacgggacagccgtatgatctgctgctacttttcaaatacacatcattattcctttcctatttagcaatttccttttgatggattaaaacaccgattagttataacaaggtgaaggaaaaatattatgatcagtctaatgtgtagaatggtgtaggcacagaagggaaaaacttgatggttcatggagactactttatatttgatgacatgagactgctggattgtaattttatatctgtagagcatggttttggcatagatcataattcacgagtgaattttggcaatggtcccccccctgttaacatgcaatgcctcagatgtccatcgggaatggtggatcttcaccttcagttcaatatggaatatcaagtttgccggttgcggagaagcctcttccaagtagatcattgtccatggcggttcctaggcatttgtcacagagaaggataaaactgctgccaagaaaatataatccaatatctgatggcaaggttccattctttgctgatgatgaagaatctccagcaacaccaaaggcagatgcttttttcatccctagagagaacccaaggaacctggtaattcgtccaattgagcagtggtcttcacggagagaaactggccggcaatatactgcaaagaatgttactgattcgaacaaatatgaagatgcttccattgaaagtgagcgtggtaagtctgccatgtcaccaagcagcaggccacctgcagtggaaaatgacaaacagcatgaggccagggccatggctcaacatgcgaatggaaatggtacttcagttgagaggctgttgcctaagcttccacgtgcagattacttcacagagcctagtatagaggagcttgcggccaaagaacgtgcggagccaggctactgcggtcgagtgagggacttcgttgtgggtcgacatgactacggcagcatcaaatttttcggggagacggacgtgaggtgcctcgatctggagtcaattgtggagtttaacgaccgggaggttattgtgtacaaggacgatagcaagaagccccctgtgggcgaggggctgaacaaggctgcagaggtgactctactgaacatcaagtgcgtaaacaagaagaccggggagccgtgccagggggcaagagtggagaggtacagggagatgctggtgaagaaggcggaggagcagggcgcagagtttgtgtccttcgacgctgtcaagggagagtggaagttcagggtgaagcacttcagcgcctacgggctttggtgaaatcctggggagttaagtagtttgtttgttctgatggaacaacgctttacgctcttgtcaattaccatgcttggatctgttgtgctgcttctgtacaatgttgctgctgttaaaatgcttgcaaattgcactgctctgctgctgaaaacaggagcagcagtagaaactaccgcaacaggagggcgtgctacctgctactgttatgtattattattattatactatattctaagtataataagacttagttttttaaatacatgaatattactttatgcacttagatatatgctatgtatggagagaaaataattatatataatagtatataaaat

SEQ ID NO: 22908 - DNA, 3544 bp, Zea Mays
tccttcctgatacattcgtgtctcccatcgccaggtagatccctttcctcacgccacgccgagagagaaaagatagagggagaggcaagagtcgcatcgcagacccagaccacgccgccgccacctccgccgccacttccgccggtgatcgagtcgcgtcggcgctaccttcaagctagaagacaataagcatcggcagacatgttcggctccaccaacccatttgggcagtcgtccacaagcccatttggccagacctcgtttggaactccacagggatttggccagtcttccactgctgccaacaatccttttgccccaaaaccatttggcagcccgaccacagcttttggggcacagaccggaagctcgctctttgcaactacatccactggtgcctttggccagcagcaatccactcccgcatttggcacaacatccactggtgcctttggccagcagcaatccactcccacatttggcacaacatcctcatctcagtttgggagctctacaccagccttcggtgcatcccccactcctgcctttggtgccacatcctctggatctttgttcggacagaagccaagttttgggggttttggatcatcttctagccagtcaagtccttttggtaacacgttccagcaaacacaaccaacatttggcagcagcacttttggttcatcaactccgccggcgtttggtgccacggctcctgcatttggcacaactacaccagcctttggcaccacaactgcaccagccttcggtgccacgactagcccagcatttggttcaacttcaacatctttatttggtgcttctagcgccccaatgtttggttcttcagcctttggcacatctgctactggttttggaacttcagggactacagcatttggtgtgagtagtactactccgggttttggatcatcaagcacaccttcatttggcacatcagctagtgcgttcagttttggttcgtcaccatcttttggacaaacagcagtttcctctggtagcactccctttggaacaactccctcaccttttggtgcaccagctcctgcgtttggctcacagacagcagcaccaacttttggacaaccacaatttgctaatcaagctggaggaaccagaataaaaccttattctcaaacaccagatgttgacagtgctactagtggtactcagcctgctgcaaaacttgattccatatcagcaatgcctgagtacaaagagaagagtcatgaagaattgaggtgggaagactaccagcgtggagacaagggtggaccgaacacttctggaactcaaacattggcacctagctttccatcaccaatacaacataacacttttgcttcgacaagtaatccgttctcaacgaacccattttcaacaaacaacccgtttgctcctaagcccactacaactactagttcaccattcaacacctcatttaacaatgcatcagttgcaagttcgagtctattcacatcatcccctggtaccacaatgtttgggcaaccaggtgtttctacacttccagctccagcaagtaattcaccatcattatttggaaatatcaatcctgctcctgctacatcgtcaatatttgccacgtcagtgacgaataatccaagtccattcggcactggcacatcattggctaacactcaatcagccccactattttcctcagcatttgctcaaccgacatcaagtacaccggctttctcctctgggagcctatttggctcaactaatcctggcagtctgtttaccagcagcggtccttcacttttttcaacaccaacatttcaaccatctgcccctgctcagagttcgaacatgttctccttccaacccccaattcaaccagcttctaccggtggactcccttttttccccaacacaaatcaggccttgacgggacagccgtatgatctgctgctacttttcaaatacacatcattattcctttcctatttagcaatttccttttgatggattaaaacaccgattagttataacaaggtgaaggaaaaatattatgatcagtctaatgtgtagaatggtgtaggcacagaagggaaaaacttgatggttcatggagactactttatatttgatgacatgagactgctggattgtaattttatatctgtagagcatggttttggcatagatcataattcacgagtgaattttggcaatggtcccccccctgttaacatgcaatgcctcagatgtccatcgggaatggtggatcttcaccttcagttcaatatggaatatcaagtttgccggttgcggagaagcctcttccaagtagatcattgtccatggcggttcctaggcatttgtcacagagaaggataaaactgctgccaagaaaatataatccaatatctgatggcaaggttccattctttgctgatgatgaagaatctccagcaacaccaaaggcagatgcttttttcatccctagagagaacccaaggaacctggtaattcgtccaattgagcagtggtcttcacggagagaaactggccggcaatatactgcaaagaatgttactgattcgaacaaatatgaagatgcttccattgaaagtgagcgtggtaagtctgccatgtcaccaagcagcaggccacctgcagtggaaaatgacaaacagcatgaggccagggccatggctcaacatgcgaatggaaatggtacttcagttgagaggctgttgcctaagcttccacgtgcagattacttcacagagcctagtatagaggagcttgcggccaaagaacgtgcggagccaggctactgcggtcgagtgagggacttcgttgtgggtcgacatgactacggcagcatcaaatttttcggggagacggacgtgaggtgcctcgatctggagtcaattgtggagtttaacgaccgggaggttattgtgtacaaggacgatagcaagaagccccctgtgggcgaggggctgaacaaggctgcagaggtgactctactgaacatcaagtgcgtaaacaagaagaccggggagccgtgccagggggcaagagtggagaggtacagggagatgctggtgaagaaggcggaggagcagggcgcagagtttgtgtccttcgacgctgtcaagggagagtggaagttcagggtgaagcacttcagcgcctacgggctttggtgaaatcctggggagttaagtagtttgtttgttctgatggaacaacgctttacgctcttgtcaattaccatgcttggatctgttgtgctgcttctgtacaatgttgctgctgttaaaatgcttgcaaattgcactgctctgctgctgaaaacaggagcagcagtagaaactaccgcaacaggagggcgtgctacctgctactgttatgtattattattattatactatattctaagtataataagacttagttttttaaatacatgaatattactttatgcacttagatatatgctatgtatggagagaaaataattatatataatagtatataaaat

SEQ ID NO: 22909 - DNA, 3075 bp, Zea Mays
ctagctcatacaatcaatgcctgattatgattcatttgggcagtcgtccacaagcccatttggccagacctcgtttggaactccacagggatttggccagtcttccactgctgccaacaatccttttgccccaaaaccatttggcagcccgaccacagcttttggggcacagaccggaagctcgctatttggcacaacatccactggtgcctttggccagcagcaatccactcccacatttggcacaacatcctcatctcagtttgggagctctacaccagccttcggtgcatcccccactcctgcctttggtgccacatcctctggatctttgttcggacagaagccaagttttgggggttttggatcatcttctagccagtcaagtccttttggtaacacgttccagcaaacacaaccaacatttggcagcagcacttttggttcatcaactccgccggcgtttggtgccacggctcctgcatttggcacaactacaccagcctttggcaccacaactgcaccagccttcggtgccacgactagcccagcatttggttcaacttcaacatctttatttggtgcttctagcgccccaatgtttggttcttcagcctttggcacatctgctactggttttggaacttcagggactacagcatttggtgtgagtagtactactccgggttttggatcatcaagcacaccttcatttggcacatcagctagtgcgttcagttttggttcgtcaccatcttttggacaaacagcagtttcctctggtagcactccctttggaacaactccctcaccttttggtgcaccagctcctgcgtttggctcacagacagcagcaccaacttttggacaaccacaatttgctaatcaagctggaggaaccagaataaaaccttattctcaaacaccagatgttgacagtgctactagtggtactcagcctgctgcaaaacttgattccatatcagcaatgcctgagtacaaagagaagagtcatgaagaattgaggtgggaagactaccagcgtggagacaagggtggaccgaacacttctggaactcaaacattggcacctagctttccatcaccaatacaacataacacttttgcttcgacaagtaatccgttctcaacgaacccattttcaacaaacaacccgtttgctcctaagcccactacaactactagttcaccattcaacacctcatttaacaatgcatcagttgcaagttcgagtctattcacatcatcccctggtaccacaatgtttgggcaaccaggtgtttctacacttccagctccagcaagtaattcaccatcattatttggaaatatcaatcctgctcctgctacatcgtcaatatttgccacgtcagtgacgaataatccaagtccattcggcactggcacatcattggctaacactcaatcagccccactattttcctcagcatttgctcaaccgacatcaagtacaccggctttctcctctgggagcctatttggctcaactaatcctggcagtctgtttaccagcagcggtccttcacttttttcaacaccaacatttcaaccatctgcccctgctcagagttcgaacatgttctccttccaacccccaattcaaccagcttctaccggtggactcccttttttccccaacacaaatcaggccttgacgggacagccaacttctagcctgtccagtatggtcatgcagtctgctcttgtttcaaatccatttgggatgcttccagcaatgcctcagatgtccatcgggaatggtggatcttcaccttcagttcaatatggaatatcaagtttgccggttgcggagaagcctcttccaagtagatcattgtccatggcggttcctaggcatttgtcacagagaaggataaaactgctgccaagaaaatataatccaatatctgatggcaaggttccattctttgctgatgatgaagaatctccagcaacaccaaaggcagatgcttttttcatccctagagagaacccaaggaacctggtaattcgtccaattgagcagtggtcttcacggagagaaactggccggcaatatactgcaaagaatgttactgattcgaacaaatatgaagatgcttccattgaaagtgagcgtggtaagtctgccatgtcaccaagcagcaggccacctgcagtggaaaatgacaaacagcatgaggccagggccatggctcaacatgcgaatggaaatggtacttcagttgagaggctgttgcctaagcttccacgtgcagattacttcacagagcctagtatagaggagcttgcggccaaagaacgtgcggagccaggctactgcggtcgagtgagggacttcgttgtgggtcgacatgactacggcagcatcaaatttttcggggagacggacgtgaggtgcctcgatctggagtcaattgtggagtttaacgaccgggaggttattgtgtacaaggacgatagcaagaagccccctgtgggcgaggggctgaacaaggctgcagaggtgactctactgaacatcaagtgcgtaaacaagaagaccggggagccgtgccagggggcaagagtggagaggtacagggagatgctggtgaagaaggcggaggagcagggcgcagagtttgtgtccttcgacgctgtcaagggagagtggaagttcagggtgaagcacttcagcgcctacgggctttggtgaaatcctggggagttaagtagtttgtttgttctgatggaacaacgctttacgctcttgtcaattaccatgcttggatctgttgtgctgcttctgtacaatgttgctgctgttaaaatgcttgcaaattgcactgctctgctgctgaaaacaggagcagcagtagaaactaccgcaacaggagggcgtgctacctgctactgttatgtattattattattatactatattctaagtataataagacttagttttttaaatacatgaatattactttatgcacttagatatatgctatgtatggagagaaaataattatatataatagtatataaaat

SEQ ID NO: 22910 - DNA, 303 bp, Zea Mays
ggaaaatgggcgcgcagtgcttcattagttggttcccgatgatgattaggatgagaaaccataaaaaaaatgaagcactcggcggtgaggctggggctggtgaaatcacatagaaacgaattgccaggaaatcacaaactgcaccgcacagctcgttgttcgttgcatagaagactcaaactttgtcagcggcatccagtgatgtgccgccctctgaactcctgactgcagccagcttctcagctaatctttgctccagtgcccgttgacccctctctctacaatgagataaaaagcattatg

SEQ ID NO: 22911 - DNA, 2217 bp, Zea Mays
gcctgtcatttgtctctcgcccgccccactgcgcgtcggattcagcaaagccatccttctccttcagtgacaaaggatccagctcgtagtcgcagcccatccatgccccatgcggccatgcctatatatactatactggacgcactccggcccggcgtgctcgtgctcgtcctctcccagcaccgtaaccaccgacagagcacgcaccatgacgaggaccaccaccagcagcacgctgctgacagcggcgctgctctgcctcgcgctgccgctgctccccggggccacggccaataaggcggcgcggcggcggcagggcgacaacctggcgcgcctgcgcgggtcgccgtggccggccgagtcgtcggtgtcgctggcggtcgcggcgacggatgacagagcgtcccggcacgcggcgtcgccgcccgcggggcgcagcaaggaggacgaccgcgtggacaagctgcccgggcagccgtcgggcgtggacttcgagcagtacgccgggtacgtgacggtggacgccgcggccgggcgcgcgctcttctactacctgaccgaggccgtcggcggcggggcggcggccaagccactcctcctctggctcaacggaggccccgggtgctcgtcgctggggtacggcgccatggaggagctgggccctttccgggtgaagagcgacggcaagacgctgtaccgcaacccgtacgcgtggaacaacgcggcgaacgtgctgttcctggagagccccgccggcgtgggcttctcctactccaacaggacggaggactacagccggagcggcgacaacaagacggccgaggacgcgctcctgttcctgctcaactggatggagaagttccccgagtacaagggccgcgacttgtacctcgccggcgagagctacgccggccactacgtcccgcagctggcccacgccatcctccgccacgccgccgccgccgccggcaagccgtcgtcgcccatcaacctcagaggcatcatgatcgggaacgcggtgatcaacgactggacggacaccaagggcatgtacgacttcttctggacgcacgcgctcatctccgacgcgacggccgacgccatcggcaggcactgcaacttcagcgccgccgccgccgccgccgcgggctccaacgacaagtgcgacgaggcgacgtcggaggccgacgaggccctggaggacatcgacatctacaacatctacgcgcccaactgccagtccgccgacctcgtctcgccgcccatcaccccctcgatggacaactttgacccgtgctcggattattacgtggacgcctacctcaacgacccggacgtgcagcgggcgctccacgccaacgtcacccgcctcgaccacccctggtccgcctgcagcgatgtcttgagacgctggactgacagcgccgcgaccgtcctgccgattctcgcggagctcctcaagaacgacctcagggtgtgggtgtacagtggagacaccgacgggagagtgccggtgacttccagcaggtactccgtcaaccagctccagctccccgtggctgcaaaatggagggcatggttcagcagcactcagggggccggggaggtgggtggctacgtggtgcagtacaagggcaaggagaagggcagcctcagcctggtcaccgtgaggggagctgggcacgaggtgcccagctaccagccaaagcgagcgctcgtgcttgtccagggcttcctcgcgggcaaggcgctccccgactgcgaaacatgcgagtcgggttaagcgtagctagcgtttggaagcagcacgcagcacgcagcacacaagagaagagagcgctgtgcaacagcatgtacccccatgcatccatttgatccagtacgacagacaaagtctgagatagaaacatacgcacgcacccaccgtaccttgcagaaaaccatgcaaaaatgcagtcatacacagagcaatctgtacacgaatgaagatggaatcaaacggatctttaagcaaatctttacagtgatgaaatgaatgagctatcactagagaagtgtgctataaaaaagaactgattttatatagagagaaccactgttgtgtaagcaaagtttaggtgcaaatatagtactgaacaccatcagttattttctaggcttacaggaacgctgacaaggcttgtattagaagcaacaggctctaagaaggatgtagag

SEQ ID NO: 22912 - DNA, 633 bp, Zea Mays
gtcaaccgctgcctccgccaccatcgggcgactgctcctcctctgcccgcggcatgggagcggaatatcccaccttcgcggacgtctccagggcccgcgccctccttttcctcgccgactccacgcccccgccggccccgccttcgcctcctcccgctcacggcgatgagttctactgctgctctggctcctcgtcctcctattccgccgcgtcgaccaggtcgtgctctgctcgccgaggccacaagcgcgctgttccataccgaggcagagaaaaggcggaagggcgtgtggatcgagatcgacagctgcggcgacgacaaccagatcgagaggagcagcgccgtggccagcgaagggagcaccgtcacggccgcagcgtccgcgggctccacagccacgtcggggacatgccgccgggctccgcgggcgggttgtgctgctggcgggaagaagccgagggaagcagacgtgatcatgcaatggttttcgcggccgcaagctgggccggccaccgagaatgacatctgcgccgccgtcggcgacaactccggcacgagcaaggcgatacgctggctgctgaagcaggtgggcggaaatgcgggcgggcgggtaaagggattcgttggataa

SEQ ID NO: 22913 - DNA, 4164 bp, Zea Mays
cgcggccgaaggcttcctgttccaaaccatgcgtgcctgccagcacgctggcacgcagcactgcagcagcgcaaactcccgatcagatccacagcgattcggccaagtccccagcccttctcccgccgcatcaccaccaccacctcttctctgccccctcgatctccagatcgccttcgcaattcctccgtgtagcgcccctgtcctgggcgagcacgagcgcgcgtgcgcgcccagatctgcgcggtctcgccggcgatggcgtgcattaagagcgcgcatcgggcggcgctaacggcgctggcgccggacgcgccgtacctcgccgcgggcaccatgaccggcgccgtcgacttgagcttctccgcatccgccaacatcgagatcttccgcctcgacttccagtccgactccacggacttgccgatcctcgcctccgcgccctccccggaccgcttcaaccgcctctcctggtcgcgcccaggcgccgtcgagggcgactccttcgcgctcggactcctcgctgggggcctcagcgacggctccgttgccgtgtggaacccactgagcatgatcagctccgaggggaaagcggaggacgccatggtcgcgcgccttgagaagcacaccggaccggtgtgtggactggagttcagcgagctcacgccgaatcggctcgcttctggggctgagcagggggagctttgcatctgggatctcaagaatcccgttgagccaatcgtgtacccgccactcaagagtgttgggtcccatgcccaagctgaaatctcttgtttatcctggaatcccaagtttcaacatatagttgcctcaacttcgagtaatgggatgacagttgtttgggatttaaggaaccagaaaccactgactagtttttcagattcaaatagaaggaaatgctctgtgcttcaatggaatccagatatgtccacccagctgattgttgcatcagacgatgacaactctccctcactgagagtttgggatgtgaggaagaccatttcaccagtaagagaatttgttggccattcaaaaggtgtaatcgctatgtcgtggtgcccctatgatagttcattcttgcttacatgttcaaaagacaataggacaatttgttgggacactgttagtggagagattattagtgaactacccgcaagtgctaattggaactttgaccttcactggtaccggaaaataccaggtgtcattgcagcatcctcatttgatgggaaaattggcatatacaacctagagttctctggtctttatgcgactggtgatgctgttggtgccccagtgcgtccaagggctccagctccaaaatggttgaaatgccccaccggtgcatcttttggtttcggtggtaaacttgtttctttccatccggtggcacccacccaaggtgcacaaacatctacatctgaggtgcatgtgcacaatttggtgattgagcaaagtctggtgagccgatcaactgaatttgaagctgctattcagaatggtgacaaaagttcgctgcgtgctctgtgtgaaaaaaaatcacaagaatctttatctgacgaggagagagaaacctggggcttcttaagggttatgtttgaggacggggattttgcaaggacaaaattgcttgctcatcttggcttcgaaccacctcaggcaccgcctgcaagttcaactgatgaattgagccaaacattggcagatacacttaatattgatcatgctgcagtaaccgataatgcggatgcccagtttcttattgataatggggatgattttttcaacaatcctcgaccttcagaggctagcttggctgaagaatcagtttctacaaatggtcaacagatagaacaggaagtttctggagattctgtgccatcagatccatcaattgacaaaagcattcaacatgcgttggtggttggagactacaaaggggcagttaaccagtgtcttgcttctaatcgtatggctgatgctttggttatagcccatgccggtggttctgctctctgggaaagcacaagaaaccattatctcaagaacagtatctcgccctacttaaaggttgtctctgctatggtgggcaatgatttaatgagttttgtgagtacctggccactaagttcatggaaggaaactcttgctctgctttgcacatttgcacagaaagaggagtggcatattttgtgtgacacacttgcgtctaggcttctgaatgtcggtgatacactagctgcgaccctctgttatatttgtgctggaaatattgacaaagctgttgaaatatggtcccgcaccttgaaatctgaagatggtgggaagacttatgttgatcttctccaggatttgatggaaaaaaccattacgcttgcccttgctacgggccagaagagatttagcgcgtcactgtctaagcttattgagaactacgctgaattgctggctagtcaaggtcttcttaaaactgcaatggagtatttaaaactgttgggatcagatgaacactcgcatgagctggcaattttgagagatcgaattgcatgttctacagaagagaatgataatgttagttctgtttctgaaagcacgggcactccttccccctatgtcacaaatcaaccttataccaccccagaccattctcagaatgtttaccagcaggtacctcaaccatacaatgtgccaagcaatacatattcagaagcttacccacaacaaggtacaggagcctatggatacaacaatgcatatcaacctcagcaaccagccaatatgtttgttccacctagcacacctcccaacactcagccaggcccttcacatgtaccagtgcctcagcaaacagtaaagacatttactcctgcgaacccagctggtctaaaaaacccgggacaatatcagcaacctaataccttaggttcccagctttacacgggcgctacgaatcaaccgtattcttctggaccatctgctccttatccaagcggacctccaacaacatttcatcagcctgtagcacctgttcaatatcagagtgctgctccaccagtatcttcttttggtccaaccacccctgtaccaggaacagtccctaaccagatgtttccccattctgctgctactaactcgacttccaggtttatgccatcgaacaatcaaagctttgctccaaggccaggtttaagtcctgtgcagccctcaagtccaacacaggtgcaggcacagccagctcctcctgcacctcccgcgactgtgcagacagctgatacgacaaaagtgtctgctgagctgagacctgttattggtacactaaccagactattcgacgagacgaccaaagccttgggaggatcacaagctactcaagcaaaaaaacgtgaaattgaggacaattcgaggaaaataggggcattattttcaaaactaaatagtggtgacatatctccaaacgtttcatcaaaactcattcagctgtgcagtgcgattgatgctagcgattttgtcaccgcgatgcacctccaggtactcttaacgacaagcgactgggacgagtgcaacttctggcttgcggcattgaagcggatgatcaagacaaggcagaatttcagaatgtaaaccttgtgtggccttctcctgcacccagttatgtacacaccttttcccgctgcttgccagaaatgatagcgtttgcggttcagaggattctccagcacagcggttgttatcatgcagcttttgctctgggcctttgattctgcctgcgagttggtgaaatcgccctgatacttccgtgctcttatatacatttcgataatagttttggtttttctgacatctactgtaaggtgacctgttgctgggttgttggttatctgaatattaattgtaagaggccacttagtctgttatagctggtggatcgcctttatcaaacaatattttttttttttgcactgagaattctgtcagttcggacattcgaagaactctagatggttaatacgagtgacagtggcttgtttttttattggtactgtcaaaaagaaatcaataaacctgtggatttttgaggtccgtattgcctgttggacgtgccgcttgtgctcttcgcagccgttgacttccggctaggatgcc

SEQ ID NO: 22914 - DNA, 4117 bp, Zea Mays
cgcggccgaaggcttcctgttccaaaccatgcgtgcctgccagcacgctggcacgcagcactgcagcagcgcaaactcccgatcagatccacagcgattcggccaagtccccagcccttctcccgccgcatcaccaccaccacctcttctctgccccctcgatctccagatcgccttcgcaattcctccgtgtagcgcccctgtcctgggcgagcacgagcgcgcgtgcgcgcccagatctgcgcggtctcgccggcgatggcgtgcattaagagcgcgcatcgggcggcgctaacggcgctggcgccggacgcgccgtacctcgccgcgggcaccatgaccggcgccgtcgacttgagcttctccgcatccgccaacatcgagatcttccgcctcgacttccagtccgactccacggacttgccgatcctcgcctccgcgccctccccggaccgcttcaaccgcctctcctggtcgcgcccaggcgccgtcgagggcgactccttcgcgctcggactcctcgctgggggcctcagcgacggctccgttgccgtgtggaacccactgagcatgatcagctccgaggggaaagcggaggacgccatggtcgcgcgccttgagaagcacaccggaccggtgtgtggactggagttcagcgagctcacgccgaatcggctcgcttctggggctgagcagggggagctttgcatctgggatctcaagaatcccgttgagccaatcgtgtacccgccactcaagagtgttgggtcccatgcccaagctgaaatctcttgtttatcctggaatcccaagtttcaacatatagttgcctcaacttcgagtaatgggatgacagttgtttgggatttaaggaaccagaaaccactgactagtttttcagattcaaatagaaggaaatgctctgtgcttcaatggaatccagatatgtccacccagctgattgttgcatcagacgatgacaactctccctcactgagagtttgggatgtgaggaagaccatttcaccagtaagagaatttgttggccattcaaaaggtgtaatcgctatgtcgtggtgcccctatgatagttcattcttgcttacatgttcaaaagacaataggacaatttgttgggacactgttagtggagagattattagtgaactacccgcaagtgctaattggaactttgaccttcactggtaccggaaaataccaggtgtcattgcagcatcctcatttgatgggaaaattggcatatacaacctagagttctctggtctttatgcgactggtgatgctgttggtgccccagtgcgtccaagggctccagctccaaaatggttgaaatgccccaccggtgcatcttttggtttcggtggtaaacttgtttctttccatccggtggcacccacccaaggtgcacaaacatctacatctgaggtgcatgtgcacaatttggtgattgagcaaagtctggtgagccgatcaactgaatttgaagctgctattcagaatggtgacaaaagttcgctgcgtgctctgtgtgaaaaaaaatcacaagaatctttatctgacgaggagagagaaacctggggcttcttaagggttatgtttgaggacggggattttgcaaggacaaaattgcttgctcatcttggcttcgaaccacctcaggcaccgcctgcaagttcaactgatgaattgagccaaacattggcagatacacttaatattgatcatgctgcagtaaccgataatgcggatgcccagtttcttattgataatggggatgattttttcaacaatcctcgaccttcagaggctagcttggctgaagaatcagtttctacaaatggtcaacagatagaacaggaagtttctggagattctgtgccatcagatccatcaattgacaaaagcattcaacatgcgttggtggttggagactacaaaggggcagttaaccagtgtcttgcttctaatcgtatggctgatgctttggttatagcccatgccggtggttctgctctctgggaaagcacaagaaaccattatctcaagaacagtatctcgccctacttaaaggttgtctctgctatggtgggcaatgatttaatgagttttgtgagtacctggccactaagttcatggaaggaaactcttgctctgctttgcacagcttctgaatgtcggtgatacactagctgcgaccctctgttatatttgtgctggaaatattgacaaagctgttgaaatatggtcccgcaccttgaaatctgaagatggtgggaagacttatgttgatcttctccaggatttgatggaaaaaaccattacgcttgcccttgctacgggccagaagagatttagcgcgtcactgtctaagcttattgagaactacgctgaattgctggctagtcaaggtcttcttaaaactgcaatggagtatttaaaactgttgggatcagatgaacactcgcatgagctggcaattttgagagatcgaattgcatgttctacagaagagaatgataatgttagttctgtttctgaaagcacgggcactccttccccctatgtcacaaatcaaccttataccaccccagaccattctcagaatgtttaccaggtacctcaaccatacaatgtgccaagcaatacatattcagaagcttacccacaacaaggtacaggagcctatggatacaacaatgcatatcaacctcagcaaccagccaatatgtttgttccacctagcacacctcccaacactcagcaacagccaggcccttcacatgtaccagtgcctcagcaaacagtaaagacatttactcctgcgaacccagctggtctaaaaaacccgggacaatatcagcaacctaataccttaggttcccagctttacacgggcgctacgaatcaaccgtattcttctggaccatctgctccttatccaagcggacctccaacaacatttcatcagcctgtagcacctgttcaatatcagagtgctgctccaccagtatcttcttttggtccaaccacccctgtaccaggaacagtccctaaccagatgtttccccattctgctgctactaactcgacttccaggtttatgccatcgaacaatcaaagctttgctccaaggccaggtttaagtcctgtgcagccctcaagtccaacacaggtgcaggcacagccagctcctcctgcacctcccgcgactgtgcagacagctgatacgacaaaagtgtctgctgagctgagacctgttattggtacactaaccagactattcgacgagacgaccaaagccttgggaggatcacaagctactcaagcaaaaaaacgtgaaattgaggacaattcgaggaaaataggggcattattttcaaaactaaatagtggtgacatatctccaaacgtttcatcaaaactcattcagctgtgcagtgcgattgatgctagcgattttgtcaccgcgatgcacctccaggtactcttaacgacaagcgactgggacgagtgcaacttctggcttgcggcattgaagcggatgatcaagacaaggcagaatttcagaatgtaaaccttgtgtggccttctcctgcacccagttatgtacacaccttttcccgctgcttgccagaaatgatagcgtttgcggttcagaggattctccagcacagcggttgttatcatgcagcttttgctctgggcctttgattctgcctgcgagttggtgaaatcgccctgatacttccgtgctcttatatacatttcgataatagttttggtttttctgacatctactgtaaggtgacctgttgctgggttgttggttatctgaatattaattgtaagaggccacttagtctgttatagctggtggatcgcctttatcaaacaatattttttttttttgcactgagaattctgtcagttcggacattcgaagaactctagatggttaatacgagtgacagtggcttgtttttttattggtactgtcaaaaagaaatcaataaacctgtggatttttgaggtccgtattgcctgttggacgtgccgcttgtgctcttcgcagccgttgacttccggctaggatgcc

SEQ ID NO: 22915 - DNA, 4080 bp, Zea Mays
cgcggccgaaggcttcctgttccaaaccatgcgtgcctgccagcacgctggcacgcagcactgcagcagcgcaaactcccgatcagatccacagcgattcggccaagtccccagcccttctcccgccgcatcaccaccaccacctcttctctgccccctcgatctccagatcgccttcgcaattcctccgtgtagcgcccctgtcctgggcgagcacgagcgcgcgtgcgcgcccagatctgcgcggtctcgccggcgatggcgtgcattaagagcgcgcatcgggcggcgctaacggcgctggcgccggacgcgccgtacctcgccgcgggcaccatgaccggcgccgtcgacttgagcttctccgcatccgccaacatcgagatcttccgcctcgacttccagtccgactccacggacttgccgatcctcgcctccgcgccctccccggaccgcttcaaccgcctctcctggtcgcgcccaggcgccgtcgagggcgactccttcgcgctcggactcctcgctgggggcctcagcgacggctccgttgccgtgtggaacccactgagcatgatcagctccgaggggaaagcggaggacgccatggtcgcgcgccttgagaagcacaccggaccggtgtgtggactggagttcagcgagctcacgccgaatcggctcgcttctggggctgagcagggggagctttgcatctgggatctcaagaatcccgttgagccaatcgtgtacccgccactcaagagtgttgggtcccatgcccaagctgaaatctcttgtttatcctggaatcccaagtttcaacatatagttgcctcaacttcgagtaatgggatgacagttgtttgggatttaaggaaccagaaaccactgactagtttttcagattcaaatagaaggaaatgctctgtgcttcaatggaatccagatatgtccacccagctgattgttgcatcagacgatgacaactctccctcactgagagtttgggatgtgaggaagaccatttcaccagtaagagaatttgttggccattcaaaaggtgtaatcgctatgtcgtggtgcccctatgatagttcattcttgcttacatgttcaaaagacaataggacaatttgttgggacactgttagtggagagattattagtgaactacccgcaagtgctaattggaactttgaccttcactggtaccggaaaataccaggtgtcattgcagcatcctcatttgatgggaaaattggcatatacaacctagagttctctggtctttatgcgactggtgatgctgttggtgccccagtgcgtccaagggctccagctccaaaatggttgaaatgccccaccggtgcatcttttggtttcggtggtaaacttgtttctttccatccggtggcacccacccaaggtgcacaaacatctacatctgaggtgcatgtgcacaatttggtgattgagcaaagtctggtgagccgatcaactgaatttgaagctgctattcagaatggtgacaaaagttcgctgcgtgctctgtgtgaaaaaaaatcacaagaatctttatctgacgaggagagagaaacctggggcttcttaagggttatgtttgaggacggggattttgcaaggacaaaattgcttgctcatcttggcttcgaaccacctcaggcaccgcctgcaagttcaactgatgaattgagccaaacattggcagatacacttaatattgatcatgctgcagtaaccgataatgcggatgcccagtttcttattgataatggggatgattttttcaacaatcctcgaccttcagaggctagcttggctgaagaatcagtttctacaaatggtcaacagatagaacaggaagtttctggagattctgtgccatcagatccatcaattgacaaaagcattcaacatgcgttggtggttggagactacaaaggggcagttaaccagtgtcttgcttctaatcgtatggctgatgctttggttatagcccatgccggtggttctgctctctgggaaagcacaagaaaccattatctcaagaacagtatctcgccctacttaaaggttgtctctgctatggtgggcaatgatttaatgagttttgtgagtacctggccactaagttcatggaaggaaactcttgctctgctttgcacatttgcacagaaagaggagtggcatattttgtgtgacacacttgcgtctaggcttctgaatgtcgatggtgggaagacttatgttgatcttctccaggatttgatggaaaaaaccattacgcttgcccttgctacgggccagaagagatttagcgcgtcactgtctaagcttattgagaactacgctgaattgctggctagtcaaggtcttcttaaaactgcaatggagtatttaaaactgttgggatcagatgaacactcgcatgagctggcaattttgagagatcgaattgcatgttctacagaagagaatgataatgttagttctgtttctgaaagcacgggcactccttccccctatgtcacaaatcaaccttataccaccccagaccattctcagaatgtttaccagcaggtacctcaaccatacaatgtgccaagcaatacatattcagaagcttacccacaacaaggtacaggagcctatggatacaacaatgcatatcaacctcagcaaccagccaatatgtttgttccacctagcacacctcccaacactcagcaacagccaggcccttcacatgtaccagtgcctcagcaaacagtaaagacatttactcctgcgaacccagctggtctaaaaaacccgggacaatatcagcaacctaataccttaggttcccagctttacacgggcgctacgaatcaaccgtattcttctggaccatctgctccttatccaagcggacctccaacaacatttcatcagcctgtagcacctgttcaatatcagagtgctgctccaccagtatcttcttttggtccaaccacccctgtaccaggaacagtccctaaccagatgtttccccattctgctgctactaactcgacttccaggtttatgccatcgaacaatcaaagctttgctccaaggccaggtttaagtcctgtgcagccctcaagtccaacacaggtgcaggcacagccagctcctcctgcacctcccgcgactgtgcagacagctgatacgacaaaagtgtctgctgagctgagacctgttattggtacactaaccagactattcgacgagacgaccaaagccttgggaggatcacaagctactcaagcaaaaaaacgtgaaattgaggacaattcgaggaaaataggggcattattttcaaaactaaatagtggtgacatatctccaaacgtttcatcaaaactcattcagctgtgcagtgcgattgatgctagcgattttgtcaccgcgatgcacctccaggtactcttaacgacaagcgactgggacgagtgcaacttctggcttgcggcattgaagcggatgatcaagacaaggcagaatttcagaatgtaaaccttgtgtggccttctcctgcacccagttatgtacacaccttttcccgctgcttgccagaaatgatagcgtttgcggttcagaggattctccagcacagcggttgttatcatgcagcttttgctctgggcctttgattctgcctgcgagttggtgaaatcgccctgatacttccgtgctcttatatacatttcgataatagttttggtttttctgacatctactgtaaggtgacctgttgctgggttgttggttatctgaatattaattgtaagaggccacttagtctgttatagctggtggatcgcctttatcaaacaatattttttttttttgcactgagaattctgtcagttcggacattcgaagaactctagatggttaatacgagtgacagtggcttgtttttttattggtactgtcaaaaagaaatcaataaacctgtggatttttgaggtccgtattgcctgttggacgtgccgcttgtgctcttcgcagccgttgacttccggctaggatgcc

SEQ ID NO: 22916 - DNA, 4033 bp, Zea Mays
cgcggccgaaggcttcctgttccaaaccatgcgtgcctgccagcacgctggcacgcagcactgcagcagcgcaaactcccgatcagatccacagcgattcggccaagtccccagcccttctcccgccgcatcaccaccaccacctcttctctgccccctcgatctccagatcgccttcgcaattcctccgtgtagcgcccctgtcctgggcgagcacgagcgcgcgtgcgcgcccagatctgcgcggtctcgccggcgatggcgtgcattaagagcgcgcatcgggcggcgctaacggcgctggcgccggacgcgccgtacctcgccgcgggcaccatgaccggcgccgtcgacttgagcttctccgcatccgccaacatcgagatcttccgcctcgacttccagtccgactccacggacttgccgatcctcgcctccgcgccctccccggaccgcttcaaccgcctctcctggtcgcgcccaggcgccgtcgagggcgactccttcgcgctcggactcctcgctgggggcctcagcgacggctccgttgccgtgtggaacccactgagcatgatcagctccgaggggaaagcggaggacgccatggtcgcgcgccttgagaagcacaccggaccggtgtgtggactggagttcagcgagctcacgccgaatcggctcgcttctggggctgagcagggggagctttgcatctgggatctcaagaatcccgttgagccaatcgtgtacccgccactcaagtttttcagattcaaatagaaggaaatgctctgtgcttcaatggaatccagatatgtccacccagctgattgttgcatcagacgatgacaactctccctcactgagagtttgggatgtgaggaagaccatttcaccagtaagagaatttgttggccattcaaaaggtgtaatcgctatgtcgtggtgcccctatgatagttcattcttgcttacatgttcaaaagacaataggacaatttgttgggacactgttagtggagagattattagtgaactacccgcaagtgctaattggaactttgaccttcactggtaccggaaaataccaggtgtcattgcagcatcctcatttgatgggaaaattggcatatacaacctagagttctctggtctttatgcgactggtgatgctgttggtgccccagtgcgtccaagggctccagctccaaaatggttgaaatgccccaccggtgcatcttttggtttcggtggtaaacttgtttctttccatccggtggcacccacccaaggtgcacaaacatctacatctgaggtgcatgtgcacaatttggtgattgagcaaagtctggtgagccgatcaactgaatttgaagctgctattcagaatggtgacaaaagttcgctgcgtgctctgtgtgaaaaaaaatcacaagaatctttatctgacgaggagagagaaacctggggcttcttaagggttatgtttgaggacggggattttgcaaggacaaaattgcttgctcatcttggcttcgaaccacctcaggcaccgcctgcaagttcaactgatgaattgagccaaacattggcagatacacttaatattgatcatgctgcagtaaccgataatgcggatgcccagtttcttattgataatggggatgattttttcaacaatcctcgaccttcagaggctagcttggctgaagaatcagtttctacaaatggtcaacagatagaacaggaagtttctggagattctgtgccatcagatccatcaattgacaaaagcattcaacatgcgttggtggttggagactacaaaggggcagttaaccagtgtcttgcttctaatcgtatggctgatgctttggttatagcccatgccggtggttctgctctctgggaaagcacaagaaaccattatctcaagaacagtatctcgccctacttaaaggttgtctctgctatggtgggcaatgatttaatgagttttgtgagtacctggccactaagttcatggaaggaaactcttgctctgctttgcacatttgcacagaaagaggagtggcatattttgtgtgacacacttgcgtctaggcttctgaatgtcggtgatacactagctgcgaccctctgttatatttgtgctggaaatattgacaaagctgttgaaatatggtcccgcaccttgaaatctgaagatggtgggaagacttatgttgatcttctccaggatttgatggaaaaaaccattacgcttgcccttgctacgggccagaagagatttagcgcgtcactgtctaagcttattgagaactacgctgaattgctggctagtcaaggtcttcttaaaactgcaatggagtatttaaaactgttgggatcagatgaacactcgcatgagctggcaattttgagagatcgaattgcatgttctacagaagagaatgataatgttagttctgtttctgaaagcacgggcactccttccccctatgtcacaaatcaaccttataccaccccagaccattctcagaatgtttaccaggtacctcaaccatacaatgtgccaagcaatacatattcagaagcttacccacaacaaggtacaggagcctatggatacaacaatgcatatcaacctcagcaaccagccaatatgtttgttccacctagcacacctcccaacactcagcaacagccaggcccttcacatgtaccagtgcctcagcaaacagtaaagacatttactcctgcgaacccagctggtctaaaaaacccgggacaatatcagcaacctaataccttaggttcccagctttacacgggcgctacgaatcaaccgtattcttctggaccatctgctccttatccaagcggacctccaacaacatttcatcagcctgtagcacctgttcaatatcagagtgctgctccaccagtatcttcttttggtccaaccacccctgtaccaggaacagtccctaaccagatgtttccccattctgctgctactaactcgacttccaggtttatgccatcgaacaatcaaagctttgctccaaggccaggtttaagtcctgtgcagccctcaagtccaacacaggtgcaggcacagccagctcctcctgcacctcccgcgactgtgcagacagctgatacgacaaaagtgtctgctgagctgagacctgttattggtacactaaccagactattcgacgagacgaccaaagccttgggaggatcacaagctactcaagcaaaaaaacgtgaaattgaggacaattcgaggaaaataggggcattattttcaaaactaaatagtggtgacatatctccaaacgtttcatcaaaactcattcagctgtgcagtgcgattgatgctagcgattttgtcaccgcgatgcacctccaggtactcttaacgacaagcgactgggacgagtgcaacttctggcttgcggcattgaagcggatgatcaagacaaggcagaatttcagaatgtaaaccttgtgtggccttctcctgcacccagttatgtacacaccttttcccgctgcttgccagaaatgatagcgtttgcggttcagaggattctccagcacagcggttgttatcatgcagcttttgctctgggcctttgattctgcctgcgagttggtgaaatcgccctgatacttccgtgctcttatatacatttcgataatagttttggtttttctgacatctactgtaaggtgacctgttgctgggttgttggttatctgaatattaattgtaagaggccacttagtctgttatagctggtggatcgcctttatcaaacaatattttttttttttgcactgagaattctgtcagttcggacattcgaagaactctagatggttaatacgagtgacagtggcttgtttttttattggtactgtcaaaaagaaatcaataaacctgtggatttttgaggtccgtattgcctgttggacgtgccgcttgtgctcttcgcagccgttgacttccggctaggatgcc

SEQ ID NO: 22917 - DNA, 4072 bp, Zea Mays
cgcggccgaaggcttcctgttccaaaccatgcgtgcctgccagcacgctggcacgcagcactgcagcagcgcaaactcccgatcagatccacagcgattcggccaagtccccagcccttctcccgccgcatcaccaccaccacctcttctctgccccctcgatctccagatcgccttcgcaattcctccgtgtagcgcccctgtcctgggcgagcacgagcgcgcgtgcgcgcccagatctgcgcggtctcgccggcgatggcgtgcattaagagcgcgcatcgggcggcgctaacggcgctggcgccggacgcgccgtacctcgccgcgggcaccatgaccggcgccgtcgacttgagcttctccgcatccgccaacatcgagatcttccgcctcgacttccagtccgactccacggacttgccgatcctcgcctccgcgccctccccggaccgcttcaaccgcctctcctggtcgcgcccaggcgccgtcgagggcgactccttcgcgctcggactcctcgctgggggcctcagcgacggctccgttgccgtgtggaacccactgagcatgatcagctccgaggggaaagcggaggacgccatggtcgcgcgccttgagaagcacaccggaccggtgtgtggactggagttcagcgagctcacgccgaatcggctcgcttctggggctgagcagggggagctttgcatctgggatctcaagaatcccgttgagccaatcgtgtacccgccactcaagagtgttgggtcccatgcccaagctgaaatctcttgtttatcctggaatcccaagtttcaacatatagttgcctcaacttcgagtaatgggatgacagttgtttgggatttaaggaaccagaaaccactgactagtttttcagattcaaatagaaggaaatgctctgtgcttcaatggaatccagatatgtccacccagctgattgttgcatcagacgatgacaactctccctcactgagagtttgggatgtgaggaagaccatttcaccagtaagagaatttgttggccattcaaaaggtgtaatcgctatgtcgtggtgcccctatgatagttcattcttgcttacatgttcaaaagacaataggacaatttgttgggacactgttagtggagagattattagtgaactacccgcaagtgctaattggaactttgaccttcactggtaccggaaaataccaggtgtcattgcagcatcctcatttgatgggaaaattggcatatacaacctagagttctctggtctttatgcgactggtgatgctgttggtgccccagtgcgtccaagggctccagctccaaaatggttgaaatgccccaccggtgcatcttttggtttcggtggtaaacttgtttctttccatccggtggcacccacccaaggtgcacaaacatctacatctgaggtgcatgtgcacaatttggtgattgagcaaagtctggtgagccgatcaactgaatttgaagctgctattcagaatggtgacaaaagttcgctgcgtgctctgtgtgaaaaaaaatcacaagaatctttatctgacgaggagagagaaacctggggcttcttaagggttatgtttgaggacggggattttgcaaggacaaaattgcttgctcatcttggcttcgaaccacctcaggcaccgcctgcaagttcaactgatgaattgagccaaacattggcagatacacttaatattgatcatgctgcagtaaccgataatgcggatgcccagtttcttattgataatggggatgattttttcaacaatcctcgaccttcagaggctagcttggctgaagaatcagtttctacaaatggtcaacagatagaacaggaagtttctggagattctgtgccatcagatccatcaattgacaaaagcattcaacatgcgttggtggttggagactacaaaggggcagttaaccagtgtcttgcttctaatcgtatggctgatgctttggttatagcccatgccggtggttctgctctctgggaaagcacaagaaaccattatctcaagaacagtatctcgccctacttaaaggttgtctctgctatggtgggcaatgatttaatgagttttgtgagtacctggccactaagttcatggaaggaaactcttgctctgctttgcacatttgcacagaaagaggagtggcatattttgtgtgacacacttgcgtctaggcttctgaatgtcggtgatacactagctgcgaccctctgttatatttgtgctggaaatattgacaaagctgttgaaatatggtcccgcaccttgaaatctgaagatggtgggaagacttatgttgatcttctccaggatttgatggaaaaaaccattacgcttgcccttgctacgggccagaagagatttagcgcgtcactgtctaagcttattgagaactacgctgaattgctggctagtcaaggtcttcttaaaactgcaatggagtatttaaaactgttgggatcagatgaacactcgcatgagctggcaattttgagagatcgaattgcatgttctacagaagagaatgataatgttagttctgtttctgaaagcacgggcactccttccccctatgtcacaaatcaaccttataccaccccagaccattctcagaatgtttaccaggtacctcaaccatacaatgtgccaagcaatacatattcagaagcttacccacaacaaggtacaggagcctatggatacaacaatgcatatcaacctcagcaaccagccaatatgtttgttccacctagcacacctcccaacactcagccaggcccttcacatgtaccagtgcctcagcaaacagtaaagacatttactcctgcgaacccagctggtctaaaaaacccgggacaatatcagcaacctaataccttaggttcccagctttacacgggcgctacgaatcaaccgtattcttctggaccatctgctccttatccaagcggacctccaacaacatttcatcagcctgtagcacctgttcaatatcagagtgctgctccaccagtatcttcttttggtccaaccacccctgtaccaggaacagtccctaaccagatgtttccccattctgctgctactaactcgacttccaggtttatgccatcgaacaatcaaagctttgctccaaggccaggtttaagtcctgtgcagccctcaagtccaacacaggtgcaggcacagccagctcctcctgcacctcccgcgactgtgcagacagctgatacgacaaaagtgtctgctgagctgagacctgttattggtacactaaccagactattcgacgagacgaccaaagccttgggaggatcacaagctactcaagcaaaaaaacgtgaaattgaggacaattcgaggaaaataggggcattattttcaaaactaaatagtggtactcttaacgacaagcgactgggacgagtgcaacttctggcttgcggcattgaagcggatgatcaagacaaggcagaatttcagaatgtaaaccttgtgtggccttctcctgcacccagttatgtacacaccttttcccgctgcttgccagaaatgatagcgtttgcggttcagaggattctccagcacagcggttgttatcatgcagcttttgctctgggcctttgattctgcctgcgagttggtgaaatcgccctgatacttccgtgctcttatatacatttcgataatagttttggtttttctgacatctactgtaaggtgacctgttgctgggttgttggttatctgaatattaattgtaagaggccacttagtctgttatagctggtggatcgcctttatcaaacaatattttttttttttgcactgagaattctgtcagttcggacattcgaagaactctagatggttaatacgagtgacagtggcttgtttttttattggtactgtcaaaaagaaatcaataaacctgtggatttttgaggtccgtattgcctgttggacgtgccgcttgtgctcttcgcagccgttgacttccggctaggatgcc

SEQ ID NO: 22918 - DNA, 2920 bp, Zea Mays
caagcaggaagctgggaattcatgactgttctctggtctttatgcgactggtgatgctgttggtgccccagtgcgtccaagggctccagctccaaaatggttgaaatgccccaccggtgcatcttttggtttcggtggtaaacttgtttctttccatccggtggcacccacccaaggtgcacaaacatctacatctgaggtgcatgtgcacaatttggtgattgagcaaagtctggtgagccgatcaactgaatttgaagctgctattcagaatggtgacaaaagttcgctgcgtgctctgtgtgaaaaaaaatcacaagaatctttatctgacgaggagagagaaacctggggcttcttaagggttatgtttgaggacggggattttgcaaggacaaaattgcttgctcatcttggcttcgaaccacctcaggcaccgcctgcaagttcaactgatgaattgagccaaacattggcagatacacttaatattgatcatgctgcagtaaccgataatgcggatgcccagtttcttattgataatggggatgattttttcaacaatcctcgaccttcagaggctagcttggctgaagaatcagtttctacaaatggtcaacagatagaacaggaagtttctggagattctgtgccatcagatccatcaattgacaaaagcattcaacatgcgttggtggttggagactacaaaggggcagttaaccagtgtcttgcttctaatcgtatggctgatgctttggttatagcccatgccggtggttctgctctctgggaaagcacaagaaaccattatctcaagaacagtatctcgccctacttaaaggttgtctctgctatggtgggcaatgatttaatgagttttgtgagtacctggccactaagttcatggaaggaaactcttgctctgctttgcacatttgcacagaaagaggagtggcatattttgtgtgacacacttgcgtctaggcttctgaatgtcggtgatacactagctgcgaccctctgttatatttgtgctggaaatattgacaaagctgttgaaatatggtcccgcaccttgaaatctgaagatggtgggaagacttatgttgatcttctccaggatttgatggaaaaaaccattacgcttgcccttgctacgggccagaagagatttagcgcgtcactgtctaagcttattgagaactacgctgaattgctggctagtcaaggtcttcttaaaactgcaatggagtatttaaaactgttgggatcagatgaacactcgcatgagctggcaattttgagagatcgaattgcatgttctacagaagagaatgataatgttagttctgtttctgaaagcacgggcactccttccccctatgtcacaaatcaaccttataccaccccagaccattctcagaatgtttaccaggtacctcaaccatacaatgtgccaagcaatacatattcagaagcttacccacaacaaggtacaggagcctatggatacaacaatgcatatcaacctcagcaaccagccaatatgtttgttccacctagcacacctcccaacactcagcaacagccaggcccttcacatgtaccagtgcctcagcaaacagtaaagacatttactcctgcgaacccagctggtctaaaaaacccgggacaatatcagcaacctaataccttaggttcccagctttacacgggcgctacgaatcaaccgtattcttctggaccatctgctccttatccaagcggacctccaacaacatttcatcagcctgtagcacctgttcaatatcagagtgctgctccaccagtatcttcttttggtccaaccacccctgtaccaggaacagtccctaaccagatgtttccccattctgctgctactaactcgacttccaggtttatgccatcgaacaatcaaagctttgctccaaggccaggtttaagtcctgtgcagccctcaagtccaacacaggtgcaggcacagccagctcctcctgcacctcccgcgactgtgcagacagctgatacgacaaaagtgtctgctgagctgagacctgttattggtacactaaccagactattcgacgagacgaccaaagccttgggaggatcacaagctactcaagcaaaaaaacgtgaaattgaggacaattcgaggaaaataggggcattattttcaaaactaaatagtggtgacatatctccaaacgtttcatcaaaactcattcagctgtgcagtgcgattgatgctagcgattttgtcaccgcgatgcacctccaggtactcttaacgacaagcgactgggacgagtgcaacttctggcttgcggcattgaagcggatgatcaagacaaggcagaatttcagaatgtaaaccttgtgtggccttctcctgcacccagttatgtacacaccttttcccgctgcttgccagaaatgatagcgtttgcggttcagaggattctccagcacagcggttgttatcatgcagcttttgctctgggcctttgattctgcctgcgagttggtgaaatcgccctgatacttccgtgctcttatatacatttcgataatagttttggtttttctgacatctactgtaaggtgacctgttgctgggttgttggttatctgaatattaattgtaagaggccacttagtctgttatagctggtggatcgcctttatcaaacaatattttttttttttgcactgagaattctgtcagttcggacattcgaagaactctagatggttaatacgagtgacagtggcttgtttttttattggtactgtcaaaaagaaatcaataaacctgtggatttttgaggtccgtattgcctgttggacgtgccgcttgtgctcttcgcagccgttgacttccggctaggatgcc

SEQ ID NO: 22919 - DNA, 3014 bp, Zea Mays
ctaagattgactaaatgggttctcaagcctctaagctccacatgtttctctggtctttatgcgactggtgatgctgttggtgccccagtgcgtccaagggctccagctccaaaatggttgaaatgccccaccggtgcatcttttggtttcggtggtaaacttgtttctttccatccggtggcacccacccaaggtgcacaaacatctacatctgaggtgcatgtgcacaatttggtgattgagcaaagtctggtgagccgatcaactgaatttgaagctgctattcagaatggtgacaaaagttcgctgcgtgctctgtgtgaaaaaaaatcacaagaatctttgtaggtgcttctttagtagaaatactactgatatttgcatggagactaactttatgtgatgcatgtttgatcagatctgacgaggagagagaaacctggggcttcttaagggttatgtttgaggacggggattttgcaaggacaaaattgcttgctcatcttggcttcgaaccacctcaggcaccgcctgcaagttcaactgatgaattgagccaaacattggcagatacacttaatattgatcatgctgcagtaaccgataatgcggatgcccagtttcttattgataatggggatgattttttcaacaatcctcgaccttcagaggctagcttggctgaagaatcagtttctacaaatggtcaacagatagaacaggaagtttctggagattctgtgccatcagatccatcaattgacaaaagcattcaacatgcgttggtggttggagactacaaaggggcagttaaccagtgtcttgcttctaatcgtatggctgatgctttggttatagcccatgccggtggttctgctctctgggaaagcacaagaaaccattatctcaagaacagtatctcgccctacttaaaggttgtctctgctatggtgggcaatgatttaatgagttttgtgagtacctggccactaagttcatggaaggaaactcttgctctgctttgcacatttgcacagaaagaggagtggcatattttgtgtgacacacttgcgtctaggcttctgaatgtcggtgatacactagctgcgaccctctgttatatttgtgctggaaatattgacaaagctgttgaaatatggtcccgcaccttgaaatctgaagatggtgggaagacttatgttgatcttctccaggatttgatggaaaaaaccattacgcttgcccttgctacgggccagaagagatttagcgcgtcactgtctaagcttattgagaactacgctgaattgctggctagtcaaggtcttcttaaaactgcaatggagtatttaaaactgttgggatcagatgaacactcgcatgagctggcaattttgagagatcgaattgcatgttctacagaagagaatgataatgttagttctgtttctgaaagcacgggcactccttccccctatgtcacaaatcaaccttataccaccccagaccattctcagaatgtttaccagcaggtacctcaaccatacaatgtgccaagcaatacatattcagaagcttacccacaacaaggtacaggagcctatggatacaacaatgcatatcaacctcagcaaccagccaatatgtttgttccacctagcacacctcccaacactcagcaacagccaggcccttcacatgtaccagtgcctcagcaaacagtaaagacatttactcctgcgaacccagctggtctaaaaaacccgggacaatatcagcaacctaataccttaggttcccagctttacacgggcgctacgaatcaaccgtattcttctggaccatctgctccttatccaagcggacctccaacaacatttcatcagcctgtagcacctgttcaatatcagagtgctgctccaccagtatcttcttttggtccaaccacccctgtaccaggaacagtccctaaccagatgtttccccattctgctgctactaactcgacttccaggtttatgccatcgaacaatcaaagctttgctccaaggccaggtttaagtcctgtgcagccctcaagtccaacacaggtgcaggcacagccagctcctcctgcacctcccgcgactgtgcagacagctgatacgacaaaagtgtctgctgagctgagacctgttattggtacactaaccagactattcgacgagacgaccaaagccttgggaggatcacaagctactcaagcaaaaaaacgtgaaattgaggacaattcgaggaaaataggggcattattttcaaaactaaatagtggtgacatatctccaaacgtttcatcaaaactcattcagctgtgcagtgcgattgatgctagcgattttgtcaccgcgatgcacctccaggtactcttaacgacaagcgactgggacgagtgcaacttctggcttgcggcattgaagcggatgatcaagacaaggcagaatttcagaatgtaaaccttgtgtggccttctcctgcacccagttatgtacacaccttttcccgctgcttgccagaaatgatagcgtttgcggttcagaggattctccagcacagcggttgttatcatgcagcttttgctctgggcctttgattctgcctgcgagttggtgaaatcgccctgatacttccgtgctcttatatacatttcgataatagttttggtttttctgacatctactgtaaggtgacctgttgctgggttgttggttatctgaatattaattgtaagaggccacttagtctgttatagctggtggatcgcctttatcaaacaatattttttttttttgcactgagaattctgtcagttcggacattcgaagaactctagatggttaatacgagtgacagtggcttgtttttttattggtactgtcaaaaagaaatcaataaacctgtggatttttgaggtccgtattgcctgttggacgtgccgcttgtgctcttcgcagccgttgacttccggctaggatgcc

SEQ ID NO: 22920 - DNA, 1613 bp, Zea Mays
tctgttggtgcctgtgcatattgaaaaagaatgataatgttagttctgtttctgaaagcacgggcactccttccccctatgtcacaaatcaaccttataccaccccagaccattctcagaatgtttaccaggtacctcaaccatacaatgtgccaagcaatacatattcagaagcttacccacaacaaggtacaggagcctatggatacaacaatgcatatcaacctcagcaaccagccaatatgtttgttccacctagcacacctcccaacactcagcaacagccaggcccttcacatgtaccagtgcctcagcaaacagtaaagacatttactcctgcgaacccagctggtctaaaaaacccgggacaatatcagcaacctaataccttaggttcccagctttacacgggcgctacgaatcaaccgtattcttctggaccatctgctccttatccaagcggacctccaacaacatttcatcagcctgtagcacctgttcaatatcagagtgctgctccaccagtatcttcttttggtccaaccacccctgtaccaggaacagtccctaaccagatgtttccccattctgctgctactaactcgacttccaggtttatgccatcgaacaatcaaagctttgctccaaggccaggtttaagtcctgtgcagccctcaagtccaacacaggtgcaggcacagccagctcctcctgcacctcccgcgactgtgcagacagctgatacgacaaaagtgtctgctgagctgagacctgttattggtacactaaccagactattcgacgagacgaccaaagccttgggaggatcacaagctactcaagcaaaaaaacgtgaaattgaggacaattcgaggaaaataggggcattattttcaaaactaaatagtggtgacatatctccaaacgtttcatcaaaactcattcagctgtgcagtgcgattgatgctagcgattttgtcaccgcgatgcacctccaggtactcttaacgacaagcgactgggacgagtgcaacttctggcttgcggcattgaagcggatgatcaagacaaggcagaatttcagaatgtaaaccttgtgtggccttctcctgcacccagttatgtacacaccttttcccgctgcttgccagaaatgatagcgtttgcggttcagaggattctccagcacagcggttgttatcatgcagcttttgctctgggcctttgattctgcctgcgagttggtgaaatcgccctgatacttccgtgctcttatatacatttcgataatagttttggtttttctgacatctactgtaaggtgacctgttgctgggttgttggttatctgaatattaattgtaagaggccacttagtctgttatagctggtggatcgcctttatcaaacaatattttttttttttgcactgagaattctgtcagttcggacattcgaagaactctagatggttaatacgagtgacagtggcttgtttttttattggtactgtcaaaaagaaatcaataaacctgtggatttttgaggtccgtattgcctgttggacgtgccgcttgtgctcttcgcagccgttgacttccggctaggatgcc

SEQ ID NO: 22921 - DNA, 1731 bp, Zea Mays
gttgttgcttacatgtaaatgaagtattccttggtttaaatttggtgtatcgacttaactcgttctttagcatgtaatcacgtgtgctgtgaatacccacatttgaacctgcagcaactgtcttttgtttcgctttttttttgtatccagaagaatgataatgttagttctgtttctgaaagcacgggcactccttccccctatgtcacaaatcaaccttataccaccccagaccattctcagaatgtttaccaggtacctcaaccatacaatgtgccaagcaatacatattcagaagcttacccacaacaaggtacaggagcctatggatacaacaatgcatatcaacctcagcaaccagccaatatgtttgttccacctagcacacctcccaacactcagccaggcccttcacatgtaccagtgcctcagcaaacagtaaagacatttactcctgcgaacccagctggtctaaaaaacccgggacaatatcagcaacctaataccttaggttcccagctttacacgggcgctacgaatcaaccgtattcttctggaccatctgctccttatccaagcggacctccaacaacatttcatcagcctgtagcacctgttcaatatcagagtgctgctccaccagtatcttcttttggtccaaccacccctgtaccaggaacagtccctaaccagatgtttccccattctgctgctactaactcgacttccaggtttatgccatcgaacaatcaaagctttgctccaaggccaggtttaagtcctgtgcagccctcaagtccaacacaggtgcaggcacagccagctcctcctgcacctcccgcgactgtgcagacagctgatacgacaaaagtgtctgctgagctgagacctgttattggtacactaaccagactattcgacgagacgaccaaagccttgggaggatcacaagctactcaagcaaaaaaacgtgaaattgaggacaattcgaggaaaataggggcattattttcaaaactaaatagtggtgacatatctccaaacgtttcatcaaaactcattcagctgtgcagtgcgattgatgctagcgattttgtcaccgcgatgcacctccaggtactcttaacgacaagcgactgggacgagtgcaacttctggcttgcggcattgaagcggatgatcaagacaaggcagaatttcagaatgtaaaccttgtgtggccttctcctgcacccagttatgtacacaccttttcccgctgcttgccagaaatgatagcgtttgcggttcagaggattctccagcacagcggttgttatcatgcagcttttgctctgggcctttgattctgcctgcgagttggtgaaatcgccctgatacttccgtgctcttatatacatttcgataatagttttggtttttctgacatctactgtaaggtgacctgttgctgggttgttggttatctgaatattaattgtaagaggccacttagtctgttatagctggtggatcgcctttatcaaacaatattttttttttttgcactgagaattctgtcagttcggacattcgaagaactctagatggttaatacgagtgacagtggcttgtttttttattggtactgtcaaaaagaaatcaataaacctgtggatttttgaggtccgtattgcctgttggacgtgccgcttgtgctcttcgcagccgttgacttccggctaggatgcc

SEQ ID NO: 22922 - DNA, 1649 bp, Zea Mays
gtgaatacccacatttgaacctgcagcaactgtcttttgtttcgctttttttttgtatccagaagaatgataatgttagttctgtttctgaaagcacgggcactccttccccctatgtcacaaatcaaccttataccaccccagaccattctcagaatgtttaccaggtacctcaaccatacaatgtgccaagcaatacatattcagaagcttacccacaacaaggtacaggagcctatggatacaacaatgcatatcaacctcagcaaccagccaatatgtttgttccacctagcacacctcccaacactcagcaacagccaggcccttcacatgtaccagtgcctcagcaaacagtaaagacatttactcctgcgaacccagctggtctaaaaaacccgggacaatatcagcaacctaataccttaggttcccagctttacacgggcgctacgaatcaaccgtattcttctggaccatctgctccttatccaagcggacctccaacaacatttcatcagcctgtagcacctgttcaatatcagagtgctgctccaccagtatcttcttttggtccaaccacccctgtaccaggaacagtccctaaccagatgtttccccattctgctgctactaactcgacttccaggtttatgccatcgaacaatcaaagctttgctccaaggccaggtttaagtcctgtgcagccctcaagtccaacacaggtgcaggcacagccagctcctcctgcacctcccgcgactgtgcagacagctgatacgacaaaagtgtctgctgagctgagacctgttattggtacactaaccagactattcgacgagacgaccaaagccttgggaggatcacaagctactcaagcaaaaaaacgtgaaattgaggacaattcgaggaaaataggggcattattttcaaaactaaatagtggtgacatatctccaaacgtttcatcaaaactcattcagctgtgcagtgcgattgatgctagcgattttgtcaccgcgatgcacctccaggtactcttaacgacaagcgactgggacgagtgcaacttctggcttgcggcattgaagcggatgatcaagacaaggcagaatttcagaatgtaaaccttgtgtggccttctcctgcacccagttatgtacacaccttttcccgctgcttgccagaaatgatagcgtttgcggttcagaggattctccagcacagcggttgttatcatgcagcttttgctctgggcctttgattctgcctgcgagttggtgaaatcgccctgatacttccgtgctcttatatacatttcgataatagttttggtttttctgacatctactgtaaggtgacctgttgctgggttgttggttatctgaatattaattgtaagaggccacttagtctgttatagctggtggatcgcctttatcaaacaatattttttttttttgcactgagaattctgtcagttcggacattcgaagaactctagatggttaatacgagtgacagtggcttgtttttttattggtactgtcaaaaagaaatcaataaacctgtggatttttgaggtccgtattgcctgttggacgtgccgcttgtgctcttcgcagccgttgacttccggctaggatgcc

SEQ ID NO: 22923 - DNA, 1134 bp, Zea Mays
ccgacaggtaggcccgaacccgaagggtctcggctccaaaagcctattccgtttccgcctcctccagcctgtcctcctgcctcgtacgtcctctgcgcggtacccggggagtcctcttgtccgcaccatcgcctccgctccgattcgccgactcggcgcgggcgggcgagacgtggatctcgacggaggagactccgaccatcgctccatggaggccgcggactctgaatccgtcatctccaccttcacctgcccgcactgtcagcgggaggttccatcttcaaacattgcattgcacagcgcgcactgcgctcggaaccttcagaagtgcgaacattgcggagatatggttgccaggaagcttatggatgaacactacgatgaaaaccatgctccgatgaattgctcactttgcaaacacacagtagagcgcgagctatgggatcttcatacaggcatacaatgcccacaaaggatgctcgcgtgccaatactgtcagtttgaactgcctgcagttgatctttttgaacatcaggatctgtgtggaaatcggacagaatattgtcaaagttgcaggaagtatatcagacttcgtgaatggattggacatgaactccagttccatacgattttgaatgctgcatcagaactttcaaggactcgagcagcagcagagcagccagtaccaaagccagcccgacctgctactggttcgcttcacaaacaactgctcttgacggttgcagtaactggagttgcagttttgattggatcaatactgtaccaaggtaaggggaagtagttccggggatagtaatttcacgccccttgatgtgtaaattccctcataaccaaaagagtacagtttagaccccagttgagggaaacaaaaaagaagaaagaaagagagagtacagctgagattacaacatttatggaaggaccaatgaagctatgtcgttgttctatgtaaatggtaattttcccatcaaacttgtgggcgtttggtaacctatgcaaaatttgttacaactgcaaaagttgtaatatcttatggattcatggacaaactgtgatgtgcagtcagtcaaaaataacttatcctaatacatttgccacccaaaagttctcgtc

SEQ ID NO: 22924 - DNA, 3240 bp, Zea Mays
tgcgcaggcgtccgtgcgctcctccccctcgcggcctcgcgtaatcccaaaccccggcgtcgctgtcgcctcgcgtaatcccaactgagtagggacagagagggcgggcaccatcacgcggccccagatcctagccacgctcccgcacccactcttccatcgcacgcacgggcgagtgcggcagatcgctggcggatccaatgctgctgccctggtagctgctgcaccgcgcggctgctggtttggtgccctccggctgcggcgccgggtcactttcgatgtgaccatctgaggaggaaaggatggcggcttcggcggcggcagcgcctgggtcggctgagaggcaggcgcgcggcggcgcggcgtcggcgatcggcaacgcggtatttaagagtggccctctcttcatatcatcgaaaggaattggatggaaatcatggaaaaaacgttggttcatcctcacacgaacgtcactggttttcttcaagaatgatcctagtacattaccacagagaagtggtgaagtgaaccttacattgggggggattgaccttaataattctgggagtgtagtggtcagggaagacaaaaggctgctgaccgtcctttttccagatggccgtgatggtcgcgcctttaccttgaaggcagaaagttctaaagatttgttcgagtggaaaacatcactggaagaagctcttgcacaagctccaaatgcagctcttctgatggggcataatggaatatttcgcaatgacacaacagatgtgtatgaagaggctattccaaattggagagagaagagacctaccaaatcactagttgttggcaggccaatactacttgcactggaagatatagatggcagtccttcttttctggaaaaagctttgtgtttccttgagaaacatggaataaaggtggaaggaattttgcgtcaagctgcagatgtggaggaggttgacaggagattgcaagaatatgagcaaggaaggacagagtttgcaccagaagaggatgctcatgttattggtgactgtgtaaaacatgttctccgggagcttccatcttctcctgttccagcttcctgctgtacagcattattggaagctttccgtctggacatcaaggaatctcggatcaaatctatgcgtgcagcaatatctgaaacatttcctgagcctactaggcggctgctacagagaattttgaaaatgatgcataccgttgcttctcatactgccgagaatagaatgactccatcagcagttgctgcatgtatggccccactcttgttgcgtccccttctttctggtgaatgcgagctggaagatgattttgacatgagtgatgacagtgctgctcagcttattgctgctgcaaatgctgctaacagcgctcaaggcattgtaactactctattagaggaatacgagagtatattcaatgatgagcactttaggtgctccttatcacctgattctcaaacaggagatagtggaagtgaagaatcaactgatgatgaaactgtggatatcaaggataatgggtttcatgatgcagaaaatgatgtagatcaagaattagatgatgccgagcgaatactgaatggaaaattgagtgaaaccagtgcatgtgtccatgctgacctccatgactacaaggaagttaatggcaacgattcagacgctgagctctttgttgaggataacacatttgaaccaaatgtaaatttaaatgatactcccctaagtcgtttaatagaaaatggaaagaaaccatcaaatctggcgtccagtcatgaaactccattatcagtgggagaaattctttcgtctttggatgctggagttccattacctggtcgtgcagctgaatattccaaggacagactctctagcaaacccaatggaattcagcagcatgtgaagcgtactaacttatggggacggagcaatgcaagaaagggccaacgttcagagttagttgatccttcaagtgaagaagagcttgctattcaacgacttgaggtaatgaagaatgacctacaggtcaggattgcaaaggaggctagaagtaatgcaatcctacaggcaagtttagaaagaagaaaacaagcactacatgagcgccgtgtggctctggaacaaaatgtgtcaaggttgcaagagcagctacaggctgaaagggatcttagagctgcactggagattggattaagcatgtattcttcacaattttctagctcgcactccatggactcaaagacaaaggcagagcttgaggaaattgctctcgcagaagctgatgttgcaagattaaaacagaaggttgcagagctgcatctccaactcaatcaacagcgccagcaccagtatggctcttcggtagatgcaaatgattgtcctccgcaccttccaaatcatctctcacagaacactgtccaaactggatttgataggaccgttgctttttgtaatcaagagaagcaaagaaatgaggagagcttgccgtgcacatcccactggagaagcatcaaacagcatgtgctctctcaggattcttcaaggcctttctcccgaaagcattcctcagacacctccttgagtgattcaatggaggcatcaacaagtgtgcttgcagagggcgggccactgttggtgaacatcgccagaacaacagaacagggtgttgaatacgggagacctccgactgtgccgtcatctactctagttgaactaacaaccaggctagatttcttcaaagaacggcggtcacaattgatggaacagctccacagcctcgatttagggcatggatccgcgtcccatggtttcccatacaaatcttcatctccctggaacaacccaaggtagggggcttgttcagttgctgcattaccgcgcatctgtatattcttggtataggatcccttttgtttcactttatctctgtagaagctggtctcgtttttgtttcacttgttatctctgtagaagctggtagtgagaatgtatataccccttgcctgccttcacttgttttgctagtgcttccagcggacatttttcgagcgtgatttttgttttgcttttgtatttattgtgtatgtaatgactcaaggggaaatatatagatgcgtctttttttcttggggatatattccactgcaggagaggcaaatgttgccatttcgaaaacctgatctgtgtccattatgaggaaatgcgtggacttttg

SEQ ID NO: 22925 - DNA, 3237 bp, Zea Mays
tgcgcaggcgtccgtgcgctcctccccctcgcggcctcgcgtaatcccaaaccccggcgtcgctgtcgcctcgcgtaatcccaactgagtagggacagagagggcgggcaccatcacgcggccccagatcctagccacgctcccgcacccactcttccatcgcacgcacgggcgagtgcggcagatcgctggcggatccaatgctgctgccctggtagctgctgcaccgcgcggctgctggtttggtgccctccggctgcggcgccgggtcactttcgatgtgaccatctgaggaggaaaggatggcggcttcggcggcggcagcgcctgggtcggctgagaggcaggcgcgcggcggcgcggcgtcggcgatcggcaacgcggtatttaagagtggccctctcttcatatcatcgaaaggaattggatggaaatcatggaaaaaacgttggttcatcctcacacgaacgtcactggttttcttcaagaatgatcctagtacattaccacagagaagtggtgaagtgaaccttacattgggggggattgaccttaataattctgggagtgtagtggtcagggaagacaaaaggctgctgaccgtcctttttccagatggccgtgatggtcgcgcctttaccttgaaggcagaaagttctaaagatttgttcgagtggaaaacatcactggaagaagctcttgcacaagctccaaatgcagctcttctgatggggcataatggaatatttcgcaatgacacaacagatgtgtatgaagaggctattccaaattggagagagaagagacctaccaaatcactagttgttggcaggccaatactacttgcactggaagatatagatggcagtccttcttttctggaaaaagctttgtgtttccttgagaaacatggaataaaggtggaaggaattttgcgtcaagctgcagatgtggaggaggttgacaggagattgcaagaatatgagcaaggaaggacagagtttgcaccagaagaggatgctcatgttattggtgactgtgtaaaacatgttctccgggagcttccatcttctcctgttccagcttcctgctgtacagcattattggaagctttccgtctggacatcaaggaatctcggatcaaatctatgcgtgcagcaatatctgaaacatttcctgagcctactaggcggctgctacagagaattttgaaaatgatgcataccgttgcttctcatactgccgagaatagaatgactccatcagcagttgctgcatgtatggccccactcttgttgcgtccccttctttctggtgaatgcgagctggaagatgattttgacatgagtgatgacagtgctgctcagcttattgctgctgcaaatgctgctaacagcgctcaaggcattgtaactactctattagaggaatacgagagtatattcaatgatgagcactttaggtgctccttatcacctgattctcaaacaggagatagtggaagtgaagaatcaactgatgatgaaactgtggatatcaaggataatgggtttcatgatgcagaaaatgatgtagatcaagaattagatgatgccgagcgaatactgaatggaaaattgagtgaaaccagtgcatgtgtccatgctgacctccatgactacaaggaagttaatggcaacgattcagacgctgagctctttgttgaggataacacatttgaaccaaatgtaaatttaaatgatactcccctaagtcgtttaatagaaaatggaaagaaaccatcaaatctggcgtccagtcatgaaactccattatcagtgggagaaattctttcgtctttggatgctggagttccattacctggtcgtgcagctgaatattccaaggacagactctctagcaaacccaatggaattcagcagcatgtgaagcgtactaacttatggggacggagcaatgcaagaaagggccaacgttcagagttagttgatccttcaagtgaagaagagcttgctattcaacgacttgaggtaatgaagaatgacctacaggtcaggattgcaaaggaggctagaagtaatgcaatcctacaggcaagtttagaaagaagaaaacaagcactacatgagcgccgtgtggctctggaacaaaatgtgtcaaggttgcaagagcagctacaggctgaaagggatcttagagctgcactggagattggattaagcatgtattcttcacaattttctagctcgcactccatggactcaaagacaaaggcagagcttgaggaaattgctctcgcagaagctgatgttgcaagattaaaacagaaggttgcagagctgcatctccaactcaatcaacagcgccagcaccagtatggctcttcggtagatgcaaatgattgtcctccgcaccttccaaatcatctctcacagaacactgtccaaactggatttgataggaccgttgctttttgtaatcaagagaagcaaagaaatgaggagagcttgccgtgcacatcccactggagaagcatcaaacagcatgtgctctctcaggattcttcaaggcctttctcccgaaagcattcctcagacacctccttgagtgattcaatggaggcatcaacaagtgtgcttgcagagggcgggccactgttggtgaacatcgccagaacaacagaaggtgttgaatacgggagacctccgactgtgccgtcatctactctagttgaactaacaaccaggctagatttcttcaaagaacggcggtcacaattgatggaacagctccacagcctcgatttagggcatggatccgcgtcccatggtttcccatacaaatcttcatctccctggaacaacccaaggtagggggcttgttcagttgctgcattaccgcgcatctgtatattcttggtataggatcccttttgtttcactttatctctgtagaagctggtctcgtttttgtttcacttgttatctctgtagaagctggtagtgagaatgtatataccccttgcctgccttcacttgttttgctagtgcttccagcggacatttttcgagcgtgatttttgttttgcttttgtatttattgtgtatgtaatgactcaaggggaaatatatagatgcgtctttttttcttggggatatattccactgcaggagaggcaaatgttgccatttcgaaaacctgatctgtgtccattatgaggaaatgcgtggacttttg

SEQ ID NO: 22926 - DNA, 3160 bp, Zea Mays
ggcgtccgtgcgctcctccccctcgcggcctcgcgtaatcccaaaccccggcgtcgctgtcgcctcgcgtaatcccaactgagtagggacagagagggcgggcaccatcacgcggccccagatcctagccacgctcccgcacccactcttccatcgcacgcacgggcgagtgcggcagatcgctggcggatccaatgctgctgccctggtagctgctgcaccgcgcggctgctggtttggtgccctccggctgcggcgccgggtcactttcgatgtgaccatctgaggaggaaaggatggcggcttcggcggcggcagcgcctgggtcggctgagaggcaggcgcgcggcggcgcggcgtcggcgatcggcaacgcggtatttaagagtggccctctcttcatatcatcgaaaggaattggatggaaatcatggaaaaaacgttggttcatcctcacacgaacgtcactggttttcttcaagaatgatcctagtacattaccacagagaagtggtgaagtgaaccttacattgggggggattgaccttaataattctgggagtggtcagggaagacaaaaggctgctgaccgtcctttttccagatggccgtgatggtcgcgcctttaccttgaaggcagaaagttctaaagatttgttcgagtggaaaacatcactggaagaagctcttgcacaagctccaaatgcagctcttctgatggggcataatggaatatttcgcaatgacacaacagatgtggagagagaagagacctaccaaatcactagttgttggcaggccaatactacttgcactggaagatatagatggcagtccttcttttctggaaaaagctttgtgtttccttgagaaacatggaataaaggtggaaggaattttgcgtcaagctgcagatgtggaggaggttgacaggagattgcaagaatatgagcaaggaaggacagagtttgcaccagaagaggatgctcatgttattggtgactgtcatgttctccgggagcttccatcttctcctgttccagcttcctgctgtacagcattattggaagctttccgtctggacatcaaggaatctcggatcaaatctatgcgtgcagcaatatctgaaacatttcctgagcctactaggcggctgctacagagaattttgaaaatgatgcataccgttgcttctcatactgccgagaatagaatgactccatcagcagttgctgcatgtatggccccactcttgttgcgtccccttctttctggtgaatgcgagctggaagatgattttgacatgagtgatgacagtgctgctcagcttattgctgctgcaaatgctgctaacagcgctcaaggcattgtaactactctattagaggaatacgagagtatattcaatgatgagcactttaggtgctccttatcacctgattctcaaacaggagatagtggaagtgaagaatcaactgatgatgaaactgtggatatcaaggataatgggtttcatgatgcagaaaatgatgtagatcaagaattagatgatgccgagcgaatactgaatggaaaattgagtgaaaccagtgcatgtgtccatgctgacctccatgactacaaggaagttaatggcaacgattcagacgctgagctctttgttgaggataacacatttgaaccaaatgtaaatttaaatgatactcccctaagtcgtttaatagaaaatggaaagaaaccatcaaatctggcgtccagtcatgaaactccattatcagtgggagaaattctttcgtctttggatgctggagttccattacctggtcgtgcagctgaatattccaaggacagactctctagcaaacccaatggaattcagcagcatgtgaagcgtactaacttatggggacggagcaatgcaagaaagggccaacgttcagagttagttgatccttcaagtgaagaagagcttgctattcaacgacttgaggtaatgaagaatgacctacaggtcaggattgcaaaggaggctagaagtaatgcaatcctacaggcaagtttagaaagaagaaaacaagcactacatgagcgccgtgtggctctggaacaaaatgtgtcaaggttgcaagagcagctacaggctgaaagggatcttagagctgcactggagattggattaagcatgtattcttcacaattttctagctcgcactccatggactcaaagacaaaggcagagcttgaggaaattgctctcgcagaagctgatgttgcaagattaaaacagaaggttgcagagctgcatctccaactcaatcaacagcgccagcaccagtatggctcttcggtagatgcaaatgattgtcctccgcaccttccaaatcatctctcacagaacactgtccaaactggatttgataggaccgttgctttttgtaatcaagagaagcaaagaaatgaggagagcttgccgtgcacatcccactggagaagcatcaaacagcatgtgctctctcaggattcttcaaggcctttctcccgaaagcattcctcagacacctccttgagtgattcaatggaggcatcaacaagtgtgcttgcagagggcgggccactgttggtgaacatcgccagaacaacagaaggtgttgaatacgggagacctccgactgtgccgtcatctactctagttgaactaacaaccaggctagatttcttcaaagaacggcggtcacaattgatggaacagctccacagcctcgatttagggcatggatccgcgtcccatggtttcccatacaaatcttcatctccctggaacaacccaaggtagggggcttgttcagttgctgcattaccgcgcatctgtatattcttggtataggatcccttttgtttcactttatctctgtagaagctggtctcgtttttgtttcacttgttatctctgtagaagctggtagtgagaatgtatataccccttgcctgccttcacttgttttgctagtgcttccagcggacatttttcgagcgtgatttttgttttgcttttgtatttattgtgtatgtaatgactcaaggggaaatatatagatgcgtctttttttcttggggatatattccactgcaggagaggcaaatgttgccatttcgaaaacct

SEQ ID NO: 22927 - DNA, 3168 bp, Zea Mays
gtccgtgcgctcctccccctcgcggcctcgcgtaatcccaaaccccggcgtcgctgtcgcctcgcgtaatcccaactgagtagggacagagagggcgggcaccatcacgcggccccagatcctagccacgctcccgcacccactcttccatcgcacgcacgggcgagtgcggcagatcgctggcggatccaatgctgctgccctggtagctgctgcaccgcgcggctgctggtttggtgccctccggctgcggcgccgggtcactttcgatgtgaccatctgaggaggaaaggatggcggcttcggcggcggcagcgcctgggtcggctgagaggcaggcgcgcggcggcgcggcgtcggcgatcggcaacgcggtatttaagagtggccctctcttcatatcatcgaaaggaattggatggaaatcatggaaaaaacgttggttcatcctcacacgaacgtcactggttttcttcaagaatgatcctagtacattaccacagagaagtggtgaagtgaaccttacattgggggggattgaccttaataattctgggagtgtagtggtcagggaagacaaaaggctgctgaccgtcctttttccagatggccgtgatggtcgcgcctttaccttgaaggcagaaagttctaaagatttgttcgagtggaaaacatcactggaagaagctcttgcacaagctccaaatgcagctcttctgatggggcataatggaatatttcgcaatgacacaacagatgtggagagagaagagacctaccaaatcactagttgttggcaggccaatactacttgcactggaagatatagatggcagtccttcttttctggaaaaagctttgtgtttccttgagaaacatggaataaaggtggaaggaattttgcgtcaagctgcagatgtggaggaggttgacaggagattgcaagaatatgagcaaggaaggacagagtttgcaccagaagaggatgctcatgttattggtgactgtgtaaaacatgttctccgggagcttccatcttctcctgttccagcttcctgctgtacagcattattggaagctttccgtctggacatcaaggaatctcggatcaaatctatgcgtgcagcaatatctgaaacatttcctgagcctactaggcggctgctacagagaattttgaaaatgatgcataccgttgcttctcatactgccgagaatagaatgactccatcagcagttgctgcatgtatggccccactcttgttgcgtccccttctttctggtgaatgcgagctggaagatgattttgacatgagtgatgacagtgctgctcagcttattgctgctgcaaatgctgctaacagcgctcaaggcattgtaactactctattagaggaatacgagagtatattcaatgatgagcactttaggtgctccttatcacctgattctcaaacaggagatagtggaagtgaagaatcaactgatgatgaaactgtggatatcaaggataatgggtttcatgatgcagaaaatgatgtagatcaagaattagatgatgccgagcgaatactgaatggaaaattgagtgaaaccagtgcatgtgtccatgctgacctccatgactacaaggaagttaatggcaacgattcagacgctgagctctttgttgaggataacacatttgaaccaaatgtaaatttaaatgatactcccctaagtcgtttaatagaaaatggaaagaaaccatcaaatctggcgtccagtcatgaaactccattatcagtgggagaaattctttcgtctttggatgctggagttccattacctggtcgtgcagctgaatattccaaggacagactctctagcaaacccaatggaattcagcagcatgtgaagcgtactaacttatggggacggagcaatgcaagaaagggccaacgttcagagttagttgatccttcaagtgaagaagagcttgctattcaacgacttgaggtaatgaagaatgacctacaggtcaggattgcaaaggaggctagaagtaatgcaatcctacaggcaagtttagaaagaagaaaacaagcactacatgagcgccgtgtggctctggaacaaaatgtgtcaaggttgcaagagcagctacaggctgaaagggatcttagagctgcactggagattggattaagcatgtattcttcacaattttctagctcgcactccatggactcaaagacaaaggcagagcttgaggaaattgctctcgcagaagctgatgttgcaagattaaaacagaaggttgcagagctgcatctccaactcaatcaacagcgccagcaccagtatggctcttcggtagatgcaaatgattgtcctccgcaccttccaaatcatctctcacagaacactgtccaaactggatttgataggaccgttgctttttgtaatcaagagaagcaaagaaatgaggagagcttgccgtgcacatcccactggagaagcatcaaacagcatgtgctctctcaggattcttcaaggcctttctcccgaaagcattcctcagacacctccttgagtgattcaatggaggcatcaacaagtgtgcttgcagagggcgggccactgttggtgaacatcgccagaacaacagaaggtgttgaatacgggagacctccgactgtgccgtcatctactctagttgaactaacaaccaggctagatttcttcaaagaacggcggtcacaattgatggaacagctccacagcctcgatttagggcatggatccgcgtcccatggtttcccatacaaatcttcatctccctggaacaacccaaggtagggggcttgttcagttgctgcattaccgcgcatctgtatattcttggtataggatcccttttgtttcactttatctctgtagaagctggtctcgtttttgtttcacttgttatctctgtagaagctggtagtgagaatgtatataccccttgcctgccttcacttgttttgctagtgcttccagcggacatttttcgagcgtgatttttgttttgcttttgtatttattgtgtatgtaatgactcaaggggaaatatatagatgcgtctttttttcttggggatatattccactgcaggagaggcaaatgttgccatttcgaaaacct

SEQ ID NO: 22928 - DNA, 3161 bp, Zea Mays
ctccccctcgcggcctcgcgtaatcccaaaccccggcgtcgctgtcgcctcgcgtaatcccaactgagtagggacagagagggcgggcaccatcacgcggccccagatcctagccacgctcccgcacccactcttccatcgcacgcacgggcgagtgcggcagatcgctggcggatccaatgctgctgccctggtagctgctgcaccgcgcggctgctggtttggtgccctccggctgcggcgccgggtcactttcgatgtgaccatctgaggaggaaaggatggcggcttcggcggcggcagcgcctgggtcggctgagaggcaggcgcgcggcggcgcggcgtcggcgatcggcaacgcggtatttaagagtggccctctcttcatatcatcgaaaggaattggatggaaatcatggaaaaaacgttggttcatcctcacacgaacgtcactggttttcttcaagaatgatcctagtacattaccacagagaagtggtgaagtgaaccttacattgggggggattgaccttaataattctgggagtgtagtggtcagggaagacaaaaggctgctgaccgtcctttttccagatggccgtgatggtcgcgcctttaccttgaaggcagaaagttctaaagatttgttcgagtggaaaacatcactggaagaagctcttgcacaagctccaaatgcagctcttctgatggggcataatggaatatttcgcaatgacacaacagatgtgtatgaagaggctattccaaattggagagagaagagacctaccaaatcactagttgttggcaggccaatactacttgcactggaagatatagatggcagtccttcttttctggaaaaagctttgtgtttccttgagaaacatggaataaaggtggaaggaattttgcgtcaagctgcagatgtggaggaggttgacaggagattgcaagaatatgagcaaggaaggacagagtttgcaccagaagaggatgctcatgttattggtgactgtgtaaaacatgttctccgggagcttccatcttctcctgttccagcttcctgctgtacagcattattggaagctttccgtctggacatcaaggaatctcggatcaaatctatgcgtgcagcaatatctgaaacatttcctgagcctactaggcggctgctacagagaattttgaaaatgatgcataccgttgcttctcatactgccgagaatagaatgactccatcagcagttgctgcatgtatggccccactcttgttgcgtccccttctttctggtgaatgcgagctggaagatgattttgacatgagtgatgacagtgctgctcagcttattgctgctgcaaatgctgctaacagcgctcaaggcattgtaactactctattagaggaatacgagagtatattcaatgatgagcactttaggtgctccttatcacctgattctcaaacaggagatagtggaagtgaagaatcaactgatgatgaaactgtggatatcaaggataatgggtttcatgatgcagaaaatgatgtagatcaagaattagatgatgccgagcgaatactgaatggaaaattgagtgaaaccagtgcatgtgtccatgctgacctccatgactacaaggaagttaatggcaacgattcagacgctgagctctttgttgaggataacacatttgaaccaaatgtaaatttaaatgatactcccctaagtcgtttaatagaaaatggaaagaaaccatcaaatctggcgtccagtcatgaaactccattatcagtgggagaaattctttcgtctttggatgctggagttccattacctggtcgtgcagctgaatattccaaggacagactctctagcaaacccaatggaattcagcagcatgtgaagcgtactaacttatggggacggagcaatgcaagaaagggccaacgttcagagttagttgatccttcaagtgaagaagagcttgctattcaacgacttgaggtaatgaagaatgacctacaggctagaagtaatgcaatcctacaggcaagtttagaaagaagaaaacaagcactacatgagcgccgtgtggctctggaacaaaatgtgtcaaggttgcaagagcagctacaggctgaaagggatcttagagctgcactggagattggattaagcatgtattcttcacaattttctagctcgcactccatggactcaaagacaaaggcagagcttgaggaaattgctctcgcagaagctgatgttgcaagattaaaacagaaggttgcagagctgcatctccaactcaatcaacagcgccagcaccagtatggctcttcggtagatgcaaatgattgtcctccgcaccttccaaatcatctctcacagaacactgtccaaactggatttgataggaccgttgctttttgtaatcaagagaagcaaagaaatgaggagagcttgccgtgcacatcccactggagaagcatcaaacagcatgtgctctctcaggattcttcaaggcctttctcccgaaagcattcctcagacacctccttgagtgattcaatggaggcatcaacaagtgtgcttgcagagggcgggccactgttggtgaacatcgccagaacaacagaaggtgttgaatacgggagacctccgactgtgccgtcatctactctagttgaactaacaaccaggctagatttcttcaaagaacggcggtcacaattgatggaacagctccacagcctcgatttagggcatggatccgcgtcccatggtttcccatacaaatcttcatctccctggaacaacccaaggtagggggcttgttcagttgctgcattaccgcgcatctgtatattcttggtataggatcccttttgtttcactttatctctgtagaagctggtctcgtttttgtttcacttgttatctctgtagaagctggtagtgagaatgtatataccccttgcctgccttcacttgttttgctagtgcttccagcggacatttttcgagcgtgatttttgttttgcttttgtatttattgtgtatgtaatgactcaaggggaaatatatagatgcgtctttttttcttggggatatattccactgcaggagaggcaaatgttgccatttcgaaaacct

SEQ ID NO: 22929 - DNA, 2880 bp, Zea Mays
tccccctcgcggcctcgcgtaatcccaaaccccggcgtcgctgtcgcctcgcgtaatcccaactgagtagggacagagagggcgggcaccatcacgcggccccagatcctagccacgctcccgcacccactcttccatcgcacgcacgggcgagtgcggcagatcgctggcggatccaatgctgctgccctggtagctgctgcaccgcgcggctgctggtttggtgccctccggctgcggcgccgggtcactttcgatgtgaccatctgaggaggaaaggatggcggcttcggcggcggcagcgcctgggtcggctgagaggcaggcgcgcggcggcgcggcgtcggcgatcggcaacgcggtatttaagagtggccctctcttcatatcatcgaaaggaattggatggaaatcatggaaaaaacgttggttcatcctcacacgaacgtcactggttttcttcaagaatgatcctagtacattaccacagagaagtggtgaagtgaaccttacattgggggggattgaccttaataattctgggagtgtagtggtcagggaagacaaaaggctgctgaccgtcctttttccagatggccgtgatggtcgcgcctttaccttgaaggcagaaagttctaaagatttgttcgagtggaaaacatcactggaagaagctcttgcacaagctccaaatgcagctcttctgatggggcataatggaatatttcgcaatgacacaacagatgtgtatgaagaggctattccaaattggagagagaagagacctaccaaatcactagttgttggcaggccaatactacttgcactggaagatatagatggcagtccttcttttctggaaaaagctttgtgtttccttgagaaacatggaataaaggtggaaggaattttgcgtcaagctgcagatgtggaggaggttgacaggagattgcaagaatatgagcaaggaaggacagagtttgcaccagaagaggatgctcatgttattggtgactgtgtaaaacatgttctccgggagcttccatcttctcctgttccagcttcctgctgtacagcattattggaagctttccgtctggacatcaaggaatctcggatcaaatctatgcgtgcagcaatatctgaaacatttcctgagcctactaggcggctgctacagagaattttgaaaatgatgcataccgttgcttctcatactgccgagaatagaatgactccatcagcagttgctgcatgtatggccccactcttgttgcgtccccttctttctggtgaatgcgagctggaagatgattttgacatgagtgatgacagtgctgctcagcttattgctgctgcaaatgctgctaacagcgctcaaggcattgtaactactctattagaggaatacgagagtatattcaatgatgagcactttaggtgctccttatcacctgattctcaaacaggagatagtggaagtgaagaatcaactgatgatgaaactgtggatatcaaggataatgggtttcatgatgcagaaaatgatgtagatcaagaattagatgatgccgagcgaatactgaatggaaaattgagtgaaaccagtgcatgtgtccatgctgacctccatgactacaagcaggaagttaatggcaacgattcagacgctgagctctttgttgaggataacacatttgaaccaaatgtaaatttaaatgatactcccctaagtcgtttaatagaaaatggaaagaaaccatcaaatctggcgtccagtcatgaaactccattatcagtgggagaaattctttcgtctttggatgctggagttccattacctggtcgtgcagctgaatattccaaggacagactctctagcaaacccaatggaattcagcagcatgtgaagcgtactaacttatggggacggagcaatgcaagaaagggccaacgttcagagttagttgatccttcaagtgaagaagagcttgctattcaacgacttgaggtaatgaagaatgacctacaggtcaggattgcaaaggaggctagaagtaatgcaatcctacaggcaagtttagaaagaagaaaacaagcactacatgagcgccgtgtggctctggaacaaaatgtgtcaaggttgcaagagcagctacaggctgaaagggatcttagagctgcactggagattggattaagcatgtattcttcacaattttctagctcgcactccatggactcaaagacaaaggcagagcttgaggaaattgctctcgcagaagctgatgttgcaagattaaaacagaaggttgcagagctgcatctccaactcaatcaacagcgccagcaccagtatggctcttcggtagatgcaaatgattgtcctccgcaccttccaaatcatctctcacagaacactgtccaaactggatttgataggaccgttgctttttgtaatcaagagaagcaaagaaatgaggagagcttgccgtgcacatcccactggagaagcatcaaacagcatgtgctctctcaggattcttcaaggcctttctcccgaaagcattcctcagacacctccttgagtgattcaatggaggcatcaacaagtgtgcttgcagagggcgggccactgttggtgaacatcgccagaacaacagaaggtgttgaatacgggagacctccgactgtgccgtcatctactctagttgaactaacaaccaggctagatttcttcaaagaacggcggtcacaattgatggaacagctccacagcctcgatttagggcatggatccgcgtcccatggtttcccatacaaatcttcatctccctggaacaacccaaggagaggcaaatgttgccatttcgaaaacct

SEQ ID NO: 22930 - DNA, 3088 bp, Zea Mays
cccaaaccccggcgtcgctgtcgcctcgcgtaatcccaactgagtagggacagagagggcgggcaccatcacgcggccccagatcctagccacgctcccgcacccactcttccatcgcacgcacgggcgagtgcggcagatcgctggcggatccaatgctgctgccctggtagctgctgcaccgcgcggctgctggtttggtgccctccggctgcggcgccgggtcactttcgatgtgaccatctgaggaggaaaggatggcggcttcggcggcggcagcgcctgggtcggctgagaggcaggcgcgcggcggcgcggcgtcggcgatcggcaacgcggtatttaagagtggccctctcttcatatcatcgaaaggaattggatggaaatcatggaaaaaacgttggttcatcctcacacgaacgtcactggttttcttcaagaatgatcctagtacattaccacagagaagtggtgaagtgaaccttacattgggggggattgaccttaataattctgggagatggccgtgatggtcgcgcctttaccttgaaggcagaaagttctaaagatttgttcgagtggaaaacatcactggaagaagctcttgcacaagctccaaatgcagctcttctgatggggcataatggaatatttcgcaatgacacaacagatgtggagagagaagagacctaccaaatcactagttgttggcaggccaatactacttgcactggaagatatagatggcagtccttcttttctggaaaaagctttgtgtttccttgagaaacatggaataaaggtggaaggaattttgcgtcaagctgcagatgtggaggaggttgacaggagattgcaagaatatgagcaaggaaggacagagtttgcaccagaagaggatgctcatgttattggtgactgtgtaaaacatgttctccgggagcttccatcttctcctgttccagcttcctgctgtacagcattattggaagctttccgtctggacatcaaggaatctcggatcaaatctatgcgtgcagcaatatctgaaacatttcctgagcctactaggcggctgctacagagaattttgaaaatgatgcataccgttgcttctcatactgccgagaatagaatgactccatcagcagttgctgcatgtatggccccactcttgttgcgtccccttctttctggtgaatgcgagctggaagatgattttgacatgagtgatgacagtgctgctcagcttattgctgctgcaaatgctgctaacagcgctcaaggcattgtaactactctattagaggaatacgagagtatattcaatgatgagcactttaggtgctccttatcacctgattctcaaacaggagatagtggaagtgaagaatcaactgatgatgaaactgtggatatcaaggataatgggtttcatgatgcagaaaatgatgtagatcaagaattagatgatgccgagcgaatactgaatggaaaattgagtgaaaccagtgcatgtgtccatgctgacctccatgactacaagcaggaagttaatggcaacgattcagacgctgagctctttgttgaggataacacatttgaaccaaatgtaaatttaaatgatactcccctaagtcgtttaatagaaaatggaaagaaaccatcaaatctggcgtccagtcatgaaactccattatcagtgggagaaattctttcgtctttggatgctggagttccattacctggtcgtgcagctgaatattccaaggacagactctctagcaaacccaatggaattcagcagcatgtgaagcgtactaacttatggggacggagcaatgcaagaaagggccaacgttcagagttagttgatccttcaagtgaagaagagcttgctattcaacgacttgaggtaatgaagaatgacctacaggtcaggattgcaaaggaggctagaagtaatgcaatcctacaggcaagtttagaaagaagaaaacaagcactacatgagcgccgtgtggctctggaacaaaatgtgtcaaggttgcaagagcagctacaggctgaaagggatcttagagctgcactggagattggattaagcatgtattcttcacaattttctagctcgcactccatggactcaaagacaaaggcagagcttgaggaaattgctctcgcagaagctgatgttgcaagattaaaacagaaggttgcagagctgcatctccaactcaatcaacagcgccagcaccagtatggctcttcggtagatgcaaatgattgtcctccgcaccttccaaatcatctctcacagaacactgtccaaactggatttgataggaccgttgctttttgtaatcaagagaagcaaagaaatgaggagagcttgccgtgcacatcccactggagaagcatcaaacagcatgtgctctctcaggattcttcaaggcctttctcccgaaagcattcctcagacacctccttgagtgattcaatggaggcatcaacaagtgtgcttgcagagggcgggccactgttggtgaacatcgccagaacaacagaaggtgttgaatacgggagacctccgactgtgccgtcatctactctagttgaactaacaaccaggctagatttcttcaaagaacggcggtcacaattgatggaacagctccacagcctcgatttagggcatggatccgcgtcccatggtttcccatacaaatcttcatctccctggaacaacccaaggtagggggcttgttcagttgctgcattaccgcgcatctgtatattcttggtataggatcccttttgtttcactttatctctgtagaagctggtctcgtttttgtttcacttgttatctctgtagaagctggtagtgagaatgtatataccccttgcctgccttcacttgttttgctagtgcttccagcggacatttttcgagcgtgatttttgttttgcttttgtatttattgtgtatgtaatgactcaaggggaaatatatagatgcgtctttttttcttggggatatattccactgcaggagaggcaaatgttgccatttcgaaaacct

SEQ ID NO: 22931 - DNA, 3188 bp, Zea Mays
caaaccccggcgtcgctgtcgcctcgcgtaatcccaactgagtagggacagagagggcgggcaccatcacgcggccccagatcctagccacgctcccgcacccactcttccatcgcacgcacgggcgagtgcggcagatcgctggcggatccaatgctgctgccctggtagctgctgcaccgcgcggctgctggtttggtgccctccggctgcggcgccgggtcactttcgatgtgaccatctgaggaggaaaggatggcggcttcggcggcggcagcgcctgggtcggctgagaggcaggcgcgcggcggcgcggcgtcggcgatcggcaacgcggtatttaagagtggccctctcttcatatcatcgaaaggaattggatggaaatcatggaaaaaacgttggttcatcctcacacgaacgtcactggttttcttcaagaatgatcctagtacattaccacagagaagtggtgaagtgaaccttacattgggggggattgaccttaataattctgggagtgtagtggtcagggaagacaaaaggctgctgaccgtcctttttccagatggccgtgatggtcgcgcctttaccttgaagtacacatgcttacctttctcctaaacagtttggtgcactcgagtgagcccaaaaggcagaaagttctaaagatttgttcgagtggaaaacatcactggaagaagctcttgcacaagctccaaatgcagctcttctgatggggcataatggaatatttcgcaatgacacaacagatgtggagagagaagagacctaccaaatcactagttgttggcaggccaatactacttgcactggaagatatagatggcagtccttcttttctggaaaaagctttgtgtttccttgagaaacatggaataaaggtggaaggaattttgcgtcaagctgcagatgtggaggaggttgacaggagattgcaagaatatgagcaaggaaggacagagtttgcaccagaagaggatgctcatgttattggtgactgtgtaaaacatgttctccgggagcttccatcttctcctgttccagcttcctgctgtacagcattattggaagctttccgtctggacatcaaggaatctcggatcaaatctatgcgtgcagcaatatctgaaacatttcctgagcctactaggcggctgctacagagaattttgaaaatgatgcataccgttgcttctcatactgccgagaatagaatgactccatcagcagttgctgcatgtatggccccactcttgttgcgtccccttctttctggtgaatgcgagctggaagatgattttgacatgagtgatgacagtgctgctcagcttattgctgctgcaaatgctgctaacagcgctcaaggcattgtaactactctattagaggaatacgagagtatattcaatgatgagcactttaggtgctccttatcacctgattctcaaacaggagatagtggaagtgaagaatcaactgatgatgaaactgtggatatcaaggataatgggtttcatgatgcagaaaatgatgtagatcaagaattagatgatgccgagcgaatactgaatggaaaattgagtgaaaccagtgcatgtgtccatgctgacctccatgactacaagcaggaagttaatggcaacgattcagacgctgagctctttgttgaggataacacatttgaaccaaatgtaaatttaaatgatactcccctaagtcgtttaatagaaaatggaaagaaaccatcaaatctggcgtccagtcatgaaactccattatcagtgggagaaattctttcgtctttggatgctggagttccattacctggtcgtgcagctgaatattccaaggacagactctctagcaaacccaatggaattcagcagcatgtgaagcgtactaacttatggggacggagcaatgcaagaaagggccaacgttcagagttagttgatccttcaagtgaagaagagcttgctattcaacgacttgaggtaatgaagaatgacctacaggtcaggattgcaaaggaggctagaagtaatgcaatcctacaggcaagtttagaaagaagaaaacaagcactacatgagcgccgtgtggctctggaacaaaatgtgtcaaggttgcaagagcagctacaggctgaaagggatcttagagctgcactggagattggattaagcatgtattcttcacaattttctagctcgcactccatggactcaaagacaaaggcagagcttgaggaaattgctctcgcagaagctgatgttgcaagattaaaacagaaggttgcagagctgcatctccaactcaatcaacagcgccagcaccagtatggctcttcggtagatgcaaatgattgtcctccgcaccttccaaatcatctctcacagaacactgtccaaactggatttgataggaccgttgctttttgtaatcaagagaagcaaagaaatgaggagagcttgccgtgcacatcccactggagaagcatcaaacagcatgtgctctctcaggattcttcaaggcctttctcccgaaagcattcctcagacacctccttgagtgattcaatggaggcatcaacaagtgtgcttgcagagggcgggccactgttggtgaacatcgccagaacaacagaaggtgttgaatacgggagacctccgactgtgccgtcatctactctagttgaactaacaaccaggctagatttcttcaaagaacggcggtcacaattgatggaacagctccacagcctcgatttagggcatggatccgcgtcccatggtttcccatacaaatcttcatctccctggaacaacccaaggtagggggcttgttcagttgctgcattaccgcgcatctgtatattcttggtataggatcccttttgtttcactttatctctgtagaagctggtctcgtttttgtttcacttgttatctctgtagaagctggtagtgagaatgtatataccccttgcctgccttcacttgttttgctagtgcttccagcggacatttttcgagcgtgatttttgttttgcttttgtatttattgtgtatgtaatgactcaaggggaaatatatagatgcgtctttttttcttggggatatattccactgcaggagaggcaaatgttgccatttcgaaaacct

SEQ ID NO: 22932 - DNA, 3211 bp, Zea Mays
caaaccccggcgtcgctgtcgcctcgcgtaatcccaactgagtagggacagagagggcgggcaccatcacgcggccccagatcctagccacgctcccgcacccactcttccatcgcacgcacgggcgagtgcggcagatcgctggcggatccaatgctgctgccctggtagctgctgcaccgcgcggctgctggtttggtgccctccggctgcggcgccgggtcactttcgatgtgaccatctgaggaggaaaggatggcggcttcggcggcggcagcgcctgggtcggctgagaggcaggcgcgcggcggcgcggcgtcggcgatcggcaacgcggtatttaagagtggccctctcttcatatcatcgaaaggaattggatggaaatcatggaaaaaacgttggttcatcctcacacgaacgtcactggttttcttcaagaatgatcctagtacattaccacagagaagtggtgaagtgaaccttacattgggggggattgaccttaataattctgggagtgtagtggtcagggaagacaaaaggctgctgaccgtcctttttccagatggccgtgatggtcgcgcctttaccttgaagtacacatgcttacctttctcctaaacagtttggtgcactcgagtgagcccaaaaggcagaaagttctaaagatttgttcgagtggaaaacatcactggaagaagctcttgcacaagctccaaatgcagctcttctgatggggcataatggaatatttcgcaatgacacaacagatgtgtatgaagaggctattccaaattggagagagaagagacctaccaaatcactagttgttggcaggccaatactacttgcactggaagatatagatggcagtccttcttttctggaaaaagctttgtgtttccttgagaaacatggaataaaggtggaaggaattttgcgtcaagctgcagatgtggaggaggttgacaggagattgcaagaatatgagcaaggaaggacagagtttgcaccagaagaggatgctcatgttattggtgactgtgtaaaacatgttctccgggagcttccatcttctcctgttccagcttcctgctgtacagcattattggaagctttccgtctggacatcaaggaatctcggatcaaatctatgcgtgcagcaatatctgaaacatttcctgagcctactaggcggctgctacagagaattttgaaaatgatgcataccgttgcttctcatactgccgagaatagaatgactccatcagcagttgctgcatgtatggccccactcttgttgcgtccccttctttctggtgaatgcgagctggaagatgattttgacatgagtgatgacagtgctgctcagcttattgctgctgcaaatgctgctaacagcgctcaaggcattgtaactactctattagaggaatacgagagtatattcaatgatgagcactttaggtgctccttatcacctgattctcaaacaggagatagtggaagtgaagaatcaactgatgatgaaactgtggatatcaaggataatgggtttcatgatgcagaaaatgatgtagatcaagaattagatgatgccgagcgaatactgaatggaaaattgagtgaaaccagtgcatgtgtccatgctgacctccatgactacaagcaggaagttaatggcaacgattcagacgctgagctctttgttgaggataacacatttgaaccaaatgtaaatttaaatgatactcccctaagtcgtttaatagaaaatggaaagaaaccatcaaatctggcgtccagtcatgaaactccattatcagtgggagaaattctttcgtctttggatgctggagttccattacctggtcgtgcagctgaatattccaaggacagactctctagcaaacccaatggaattcagcagcatgtgaagcgtactaacttatggggacggagcaatgcaagaaagggccaacgttcagagttagttgatccttcaagtgaagaagagcttgctattcaacgacttgaggtaatgaagaatgacctacaggtcaggattgcaaaggaggctagaagtaatgcaatcctacaggcaagtttagaaagaagaaaacaagcactacatgagcgccgtgtggctctggaacaaaatgtgtcaaggttgcaagagcagctacaggctgaaagggatcttagagctgcactggagattggattaagcatgtattcttcacaattttctagctcgcactccatggactcaaagacaaaggcagagcttgaggaaattgctctcgcagaagctgatgttgcaagattaaaacagaaggttgcagagctgcatctccaactcaatcaacagcgccagcaccagtatggctcttcggtagatgcaaatgattgtcctccgcaccttccaaatcatctctcacagaacactgtccaaactggatttgataggaccgttgctttttgtaatcaagagaagcaaagaaatgaggagagcttgccgtgcacatcccactggagaagcatcaaacagcatgtgctctctcaggattcttcaaggcctttctcccgaaagcattcctcagacacctccttgagtgattcaatggaggcatcaacaagtgtgcttgcagagggcgggccactgttggtgaacatcgccagaacaacagaaggtgttgaatacgggagacctccgactgtgccgtcatctactctagttgaactaacaaccaggctagatttcttcaaagaacggcggtcacaattgatggaacagctccacagcctcgatttagggcatggatccgcgtcccatggtttcccatacaaatcttcatctccctggaacaacccaaggtagggggcttgttcagttgctgcattaccgcgcatctgtatattcttggtataggatcccttttgtttcactttatctctgtagaagctggtctcgtttttgtttcacttgttatctctgtagaagctggtagtgagaatgtatataccccttgcctgccttcacttgttttgctagtgcttccagcggacatttttcgagcgtgatttttgttttgcttttgtatttattgtgtatgtaatgactcaaggggaaatatatagatgcgtctttttttcttggggatatattccactgcaggagaggcaaatgttgccatttcgaaaacct

SEQ ID NO: 22933 - DNA, 2822 bp, Zea Mays
ccaactgagtagggacagagagggcgggcaccatcacgcggccccagatcctagccacgctcccgcacccactcttccatcgcacgcacgggcgagtgcggcagatcgctggcggatccaatgctgctgccctggtagctgctgcaccgcgcggctgctggtttggtgccctccggctgcggcgccgggtcactttcgatgtgaccatctgaggaggaaaggatggcggcttcggcggcggcagcgcctgggtcggctgagaggcaggcgcgcggcggcgcggcgtcggcgatcggcaacgcggtatttaagagtggccctctcttcatatcatcgaaaggaattggatggaaatcatggaaaaaacgttggttcatcctcacacgaacgtcactggttttcttcaagaatgatcctagtacattaccacagagaagtggtgaagtgaaccttacattgggggggattgaccttaataattctgggagtgtagtggtcagggaagacaaaaggctgctgaccgtcctttttccagatggccgtgatggtcgcgcctttaccttgaaggcagaaagttctaaagatttgttcgagtggaaaacatcactggaagaagctcttgcacaagctccaaatgcagctcttctgatggggcataatggaatatttcgcaatgacacaacagatgtgtatgaagaggctattccaaattggagagagaagagacctaccaaatcactagttgttggcaggccaatactacttgcactggaagatatagatggcagtccttcttttctggaaaaagctttgtgtttccttgagaaacatggaataaaggtggaaggaattttgcgtcaagctgcagatgtggaggaggttgacaggagattgcaagaatatgagcaaggaaggacagagtttgcaccagaagaggatgctcatgttattggtgactgtgtaaaacatgttctccgggagcttccatcttctcctgttccagcttcctgctgtacagcattattggaagctttccgtctggacatcaaggaatctcggatcaaatctatgcgtgcagcaatatctgaaacatttcctgagcctactaggcggctgctacagagaattttgaaaatgatgcataccgttgcttctcatactgccgagaatagaatgactccatcagcagttgctgcatgtatggccccactcttgttgcgtccccttctttctggtgaatgcgagctggaagatgattttgacatgagtgatgacagtgctgctcagcttattgctgctgcaaatgctgctaacagcgctcaaggcattgtaactactctattagaggaatacgagagtatattcaatgatgagcactttaggtgctccttatcacctgattctcaaacaggagatagtggaagtgaagaatcaactgatgatgaaactgtggatatcaaggataatgggtttcatgatgcagaaaatgatgtagatcaagaattagatgatgccgagcgaatactgaatggaaaattgagtgaaaccagtgcatgtgtccatgctgacctccatgactacaaggaagttaatggcaacgattcagacgctgagctctttgttgaggataacacatttgaaccaaatgtaaatttaaatgatactcccctaagtcgtttaatagaaaatggaaagaaaccatcaaatctggcgtccagtcatgaaactccattatcagtgggagaaattctttcgtctttggatgctggagttccattacctggtcgtgcagctgaatattccaaggacagactctctagcaaacccaatggaattcagcagcatgtgaagcgtactaacttatggggacggagcaatgcaagaaagggccaacgttcagagttagttgatccttcaagtgaagaagagcttgctattcaacgacttgaggtaatgaagaatgacctacaggtcaggattgcaaaggaggctagaagtaatgcaatcctacaggcaagtttagaaagaagaaaacaagcactacatgagcgccgtgtggctctggaacaaaatgtgtcaaggttgcaagagcagctacaggctgaaagggatcttagagctgcactggagattggattaagcatgtattcttcacaattttctagctcgcactccatggactcaaagacaaaggcagagcttgaggaaattgctctcgcagaagctgatgttgcaagattaaaacagaaggttgcagagctgcatctccaactcaatcaacagcgccagcaccagtatggctcttcggtagatgcaaatgattgtcctccgcaccttccaaatcatctctcacagaacactgtccaaactggatttgataggaccgttgctttttgtaatcaagagaagcaaagaaatgaggagagcttgccgtgcacatcccactggagaagcatcaaacagcatgtgctctctcaggattcttcaaggcctttctcccgaaagcattcctcagacacctccttgagtgattcaatggaggcatcaacaagtgtgcttgcagagggcgggccactgttggtgaacatcgccagaacaacagaacagggtgttgaatacgggagacctccgactgtgccgtcatctactctagttgaactaacaaccaggctagatttcttcaaagaacggcggtcacaattgatggaacagctccacagcctcgatttagggcatggatccgcgtcccatggtttcccatacaaatcttcatctccctggaacaacccaaggagaggcaaatgttgccatttcgaaaacct

SEQ ID NO: 22934 - DNA, 3301 bp, Zea Mays
ccaactgagtagggacagagagggcgggcaccatcacgcggccccagatcctagccacgctcccgcacccactcttccatcgcacgcacgggcgagtgcggcagatcgctggcggatccaatgctgctgccctggtagctgctgcaccgcgcggctgctggtttggtgccctccggctgcggcgccgggtcactttcgatgtgaccatctgaggaggaaaggatggcggcttcggcggcggcagcgcctgggtcggctgagaggcaggcgcgcggcggcgcggcgtcggcgatcggcaacgcggtatttaagagtggccctctcttcatatcatcgaaaggaattggatggaaatcatggaaaaaacgttggttcatcctcacacgaacgtcactggttttcttcaagaatgatcctagtacattaccacagagaagtggtgaagtgaaccttacattgggggggattgaccttaataattctgggagtgtagtggtcagggaagacaaaaggctgctgaccgtcctttttccagatggccgtgatggtcgcgcctttaccttgaaggcagaaagttctaaagatttgttcgagtggaaaacatcactggaagaagctcttgcacaagctccaaatgcagctcttctgatggggcataatggaatatttcgcaatgacacaacagatgtggagagagaagagacctaccaaatcactagttgttggcaggccaatactacttgcactggaagatatagatggcagtccttcttttctggaaaaagctttgtgtttccttgagaaacatggaataaaggtggaaggaattttgcgtcaagctgcagatgtggaggaggttgacaggagattgcaagaatatgagcaaggaaggacagagtttgcaccagaagaggatgctcatgttattggtgactgtgtaaaacatgttctccgggagcttccatcttctcctgttccagcttcctgctgtacagcattattggaagctttccgtctggacatcaaggaatctcggatcaaatctatgcgtgcagcaatatctgaaacatttcctgagcctactaggcggctgctacagagaattttgaaaatgatgcataccgttgcttctcatactgccgagaatagaatgactccatcagcagttgctgcatgtatggccccactcttgttgcgtccccttctttctggtgaatgcgagctggaagatgattttgacatgagtgatgacagtgctgctcagcttattgctgctgcaaatgctgctaacagcgctcaaggcattgtaactactctattagaggaatacgagagtatattcaatgatgagcactttaggtgctccttatcacctgattctcaaacaggagatagtggaagtgaagaatcaactgatgatgaaactgtggatatcaaggataatgggtttcatgatgcagaaaatgatgtagatcaagaattagatgatgccgagcgaatactgaatggaaaattgagtgaaaccagtgcatgtgtccatgctgacctccatgactacaagcaggaagttaatggcaacgattcagacgctgagctctttgttgaggataacacatttgaaccaaatgtaaatttaaatgatactcccctaagtcgtttaatagaaaatggaaagaaaccatcaaatctggcgtccagtcatgaaactccattatcagtgggagaaattctttcgtctttggatgctggagttccattacctggtcgtgcagctgaatattccaaggacagactctctagcaaacccaatggaattcagcagcatgtgaagcgtactaacttatggggacggagcaatgcaagaaagggccaacgttcagagttagttgatccttcaagtgaagaagagcttgctattcaacgacttgaggtaatgaagaatgacctacaggtcaggattgcaaaggaggctagaagtaatgcaatcctacaggcaagtttagaaagaagaaaacaagcactacatgagcgccgtgtggctctggaacaaaatgtgtcaaggttgcaagagcagctacaggctgaaagggatcttagagctgcactggagattggattaagcatgtattcttcacaattttctagctcgcactccatggactcaaagacaaaggcagagcttgaggaaattgctctcgcagaagctgatgttgcaagattaaaacagaaggttgcagagctgcatctccaactcaatcaacagcgccagcaccagtatggctcttcgctgtcattagattatgtacccacaaagtccaaatatttgggagacacatattttagtaacaaatgcagaatgttcgtcagctcattggttgtatcatattccctacaagttgcagtttgttgaacatgcaatattttactgctaccaggaacactgtccaaactggatttgataggaccgttgctttttgtaatcaagagaagcaaagaaatgaggagagcttgccgtgcacatcccactggagaagcatcaaacagcatgtgctctctcaggattcttcaaggcctttctcccgaaagcattcctcagacacctccttgagtgattcaatggaggcatcaacaagtgtgcttgcagagggcgggccactgttggtgaacatcgccagaacaacagaagtaagagaaaccccttgtggttattatgctgcaataacgttttcagaaaaaaaaaacgctttggtttgagttttcaatctcttgttgtggtttgcagcagggtgttgaatacgggagacctccgactgtgccgtcatctactctagttgaactaacaaccaggctagatttcttcaaagaacggcggtcacaattgatggaacagctccacagcctcgatttagggcatggatccgcgtcccatggtttcccatacaaatcttcatctccctggaacaacccaaggtagggggcttgttcagttgctgcattaccgcgcatctgtatattcttggtataggatcccttttgtttcactttatctctgtagaagctggtctcgtttttgtttcacttgttatctctgtagaagctggtagtgagaatgtatataccccttgcctgccttcacttgttttgctagtgcttccagcggacatttttcgagcgtgatttttgttttgcttttgtatttattgtgtatgtaatgactcaaggggaaatatatagatgcgtctttttttcttggggatatattccactgcaggagaggcaaatgttgccatttcgaaaacct

SEQ ID NO: 22935 - DNA, 3898 bp, Zea Mays
gaacatattcattaagtcttggtcagaataaatttgtacgttggacttgctatcagcacagaaataggacaacttcagtacagtaccatacccacaaggaaactagtccacaatttcatcaagaaggtctttaaaatttatgtctgaaccaacaacttgcataccatggtcctcagttcctcacaattgggagtaattatactgatttttagattgaaactggtctcaatgtcatttctacatatgaaccatatagagtttactcacatatacacatttcaatccaatcctaacgacacatggcactactgttatgcattcgaagaaagaaaacaagaagcgctcacgccgtcacgcgtccggaagccaagctggtcgcccgtccgccatcctttccaaatctgcaccaaatcggcctcctgcctgaaacacacgcgaggggccttctcccgcggcctccccgctcgcgtagccccggcgcccgctctctgctgctctagggtttgccttcaatggggaaccagaaaaggcggggattgatgagttagagacattcatgggcaaaagggtcatttcgcgtctagttggcaccaagagccgtagcgggctagtggcgactgactggggtcggggtcgggcgaggcattcctccctctgcgctttgctggcaacgacgacgaatagggttctgtagggaccgagattctggatacctcactcccttgattcagaatgactccactgagtcattgctccgttggcaatgtcagcctgtttcacatcggaagctacaggaccacccgagaaatccagataagaaggttccagggctcggcgaggtattcgagagtagcatcgccgtcgcctcggagactgctgcagccgcaaacagcgttccacctgatcagtatctacaagagaagaagctggtcctctccccagaggccaagaaccttgtccgcggcgaccgtggggactgatgtcactgtggaggatctgaatccgtctccctcggaggaagcctccgatgggaactctgaggctgcacctgacgccgttgatgcgagcgagcaggccgaggctagcacgggacaagcctcttctgctcgcaaattgggacgcaacatacggaagagcgagatgcctcctctgaatgaggaggatctagtgcctggcgcatcttttactgggaaggtgatgtctatcaagccattcggagttttcgttgacattggggcattcacagaaggccttgtccatatctccagagtaagtgatgggttcgtgaaagatatatcttctctcttcactgttggacaagaggtgtcagtgagattgcttgaagcaaataaggaaacaaagcgtatctctctgacgatgagggaaggcgatgactatgtcaagcctcaaaaagaaatgccgaaggctgcaaatggtgggcggagtgccaccgcaactcctaaaagctcgccaaggcaaacaagggaaaggcaggaactcaaggagacacttgagtcaaaatatgtaccagggcaatctctgaatggcactgtgaaaagcacaacgagagcagggacatttgtgacgttgcctgatgggagtgaaggattccttcccagagaagaggaagcattggcgttatttacccttatcggacaatctgcaatggaaattggtaaacagataagggttaaagtactgaatgttgcacagggtcaggccactttgacgatgaaaggggtggaagatgatgaagacgatctgaagacgctaaatatggagcttaagcgggactggtccagagggactaatgcgttcgagttggctttccgtaggaacaaagagatatctgcattcttggatcagagggaaaggaccaaagtgccggctgatacttcagtttctgctccggaagctgaaagctatcaggaggaagctgctccagaagatgaggaaagtagtgaagaattgagctctgtgtcagaagtagcaactgatgtttctcctcctgtatctgatgcctcctctcaggtgggaattcagtattctacttctgtggcaaatgctgctgaggaccaaactgtaggatctgaaagttcacctacaattagtgttgaactgtcctccaacgggaccccagatagctctattgtgtcttcagtttcagaaactgcagataaacctactgaacctgaagaatcttcagcggtagaagaggttcttgtaactgcaagcagcgaggcagggaaagaaccagctgctgacactgaggctgtaccagccttgaatgagaaaactggtgccgaggttgctgctgctgctggagttgcacaagcaagcaccacgacagccactatttctcctacccttgtcaagcaattgcgtgaggcaactggagcaggcatgatggactgcaaaaaggctcttgctgaaacagggggtgacatagataaagctcaagaattcctacggaagaaagggttggcggctgctgacaagagggctggcagagcaacagctgagggaagagttggctcttacatacatgacagcagaatcggggtccttattgaagtgaattgtgagactgactttgtgtctcgaggtgacattttcaaagagttagttgacgatcttgccatgcaaattgctgcttgccctcaagtgcagtacatctctattgacgacgtccctgaggagcttgtgaagaaggagaccgagctggagatgcagagggaggaccttttgtcgaagcctgagcagatccgggctaagattgtcgaagggcgtgtaaagaagaggcttggagaattcgcgttgttcgaacagccattcatcaagaatgacaaggtcacaataagtgagtggctgaagcaaactatagctacaactggagagaatatgaaggtcaggagatttgcccggtacaacctaggtgaagggctggagaagaaaagccaggattttgctgctgaagttgcagcccagacagcagcgaagccgccaccatctgctcctcccaaggaggacaagcctgctgaaacaacagaatccgccgagaagaagccggctgttgcagtttcagcctcgttggtgaagcaactccgagacgaaaccggcgctggcatgatggactgcaagaaagctctggccgagtctgacggcgaccttcagaaggctcaggagttcctgaggaagaagggcctctcatccgcagacaagaaatcctctcggctagccgccgaaggactggtcggctcctacatccacgacagccgcatcgggtgcatgatcgaggtggtagcgtgtccgcaggtcgactacgtctcggtggacgacatcccggagagcgtcgtcggcaaggagaaggagatcgagatgcagagggaggacctgcagtcgaagcccgagagcatcagggagaagatcgtggaagggcggatcgcgaagaggctcggcgtgatggccctcctggagcagccctacatcaaggacgacagcaagacggtgaaggatctcgtgaaggagacggtcgcctcactcggggagaacattaaggtgcggaggtttgtccggtacaccctgggcgaggactgatcggtgtgaggtcgggcagcgatccctccgtcgcagcgcagcgcagccctggcatgagaagtcgggcacgtttttggcatgagaaggtctgtgactcggttccatctgtaattccgtatcacctgttactgctgttcgtggttcagaagagtaagaggggttggttagtatatccatcaaagcatatatatatatacaacattaaggcaaattgaattttgtatcttttatctgtgcttcgtttcaaaacatgatcgaattgtagcatggacgtatggtcttggccaatgtaattgtcttg

SEQ ID NO: 22936 - DNA, 1631 bp, Zea Mays
acgacgaatagccactatttctcctacccttgtcaagcaattgcgtgaggcaactggagcaggcatgatggactgcaaaaaggctcttgctgaaacagggggtgacatagataaagctcaagaattcctacggaagaaagggttggcggctgctgacaagagggctggcagagcaacagctgagggaagagttggctcttacatacatgacagcagaatcggggtccttattgaagtgaattgtgagactgactttgtgtctcgaggtgacattttcaaagagttagttgacgatcttgccatgcaaattgctgcttgccctcaagtgcagtacatctctattgacgacgtccctgaggagcttgtgaagaaggagaccgagctggagatgcagagggaggaccttttgtcgaagcctgagcagatccgggctaagattgtcgaagggcgtgtaaagaagaggcttggagaattcgcgttgttcgaacagccattcatcaagaatgacaaggtcacaataagtgagtggctgaagcaaactatagctacaactggagagaatatgaaggtcaggagatttgcccggtacaacctaggtgaagggctggagaagaaaagccaggattttgctgctgaagttgcagcccagacagcagcgaagccgccaccatctgctcctcccaaggaggacaagcctgctgaaacaacagaatccgccgagaagaagccggctgttgcagtttcagcctcgttggtgaagcaactccgagacgaaaccggcgctggcatgatggactgcaagaaagctctggccgagtctgacggcgaccttcagaaggctcaggagttcctgaggaagaagggcctctcatccgcagacaagaaatcctctcggctagccgccgaaggactggtcggctcctacatccacgacagccgcatcgggtgcatgatcgaggtcaactccgagaccgacttcgtggcccgcaacgacaagttcagggagctggtgaacgacctcgcgatgcaggtggtagcgtgtccgcaggtcgactacgtctcggtggacgacatcccggagagcgtcgtcggcaaggagaaggagatcgagatgcagagggaggacctgcagtcgaagcccgagagcatcagggagaagatcgtggaagggcggatcgcgaagaggctcggcgtgatggccctcctggagcagccctacatcaaggacgacagcaagacggtgaaggatctcgtgaaggagacggtcgcctcactcggggagaacattaaggtgcggaggtttgtccggtacaccctgggcgaggactgatcggtgtgaggtcgggcagcgatccctccgtcgcagcgcagcgcagccctggcatgagaagtcgggcacgtttttggcatgagaaggtctgtgactcggttccatctgtaattccgtatcacctgttactgctgttcgtggttcagaagagtaagaggggttggttagtatatccatcaaagcatatatatatatacaacattaaggcaaattgaattttgtatcttttatctgtgcttcgtttcaaaacatgatcgaattgtagcatggacgtatggtcttggccaatgtaattgtcttg

SEQ ID NO: 22937 - DNA, 1734 bp, Zea Mays
ctagtatgtgccagcaagtgtaggggatgacacctgggcccgtgtgtgtttgatatggagagagagaggccgtagcaggggtactttggggcatacgaaaatacggatacccgcaatgatatctagagcgtacaaagtggcgtctgcacgtagaattacaatagcaccgtttcgaatatgataaatattataaatccgtacaagttgcaatggtacggtttcacttcattcttatttaaatgtgtcccaaccgagagtgtggtgaaaaaaatagaataaaacctgagtttgtgccgcactaccgcgagcaaaaaaaaatgtcaaaattcttctctttaaaaaatggtctaattcatcacctcaaattcaatctggaacaatgatttggattggatcaatttctatgcaaaaacacagttatcgccctgagcccctgacgctggctgaaccgacaaacaacagcaataattcatagttgaagacaggcacagggcgagaccgccgtcatggacactgagaccgaggggaaggcggcggcggtcgaggagatgagggagtggtgcgtcgctctccccaaggtggagctccacgcccacctcaacggctccgtccgcaactccaccctcctagaacttgcaaaacatctaggcgacaaaggagtcattgtttttgaagatgttaaggatgtgatcatgaagagtgatagatctcttccagagtgtttcaagctttttgatctgtttcatatacttacaactgatcatgatacagtaacaaggattgctaaggaggttgaaaagatcttgctgcagacaatgttgcatatttggaaataagaacacacctaagaacaatgaggcaaaggggatgaccaagaggtcttacatggatgctgttattaaaggtctgaaagcagttgaagatgttgatgtcgaattatttggttctaatttcagaacaaatgaaacactaagttctaagcttttggatggtgtcacaaagaaaaagaagatatatgttaggctccttcttagtattgatcgccgcgagacaacttcggctgcattggataccgttaatctagccgtggaaatgatggaccaaggtgtcataggcattgacctttctggcaatccagtcgtgggggaatgggaaacatacctgcctgccctacaacatgctaaaaatatgggaatccccgttacaatccactgtggagaggtggcgaaccggaaggaaatccaagcagtgctggacttttgccctcagaggctgggtcatgtatgctgtctgaatgatgtagaatggaagaagctcaagtctctgatgattccggtagagatatgtttaacctcgaatgttatgacaggaggtgctccttccctagagcttcaccactttgctgacctctacaatgcgaagcaccctttgtccctgtgcacggatgattccggcctgttttcgacaagcctctcaaatgagtattacctcgttgcaacaactttcggcctcagcaagttcgagctgttccagctggcccaggatgcagtgcagtttgtttttgctgatgatgtggtgaagaagtctctgaaggaggtgttcaagcatgctgaaaagaggctgctcatgtgggatgaacttgctgcaccaagctagtgtacgtacccgttatgagatcatagaaggtcccgctcgcgcaaccattggacacacaacccagttgttgatatctac

SEQ ID NO: 22938 - DNA, 1722 bp, Zea Mays
ctagtatgtgccagcaagtgtaggggatgacacctgggcccgtgtgtgtttgatatggagagagagaggccgtagcaggggtactttggggcatacgaaaatacggatacccgcaatgatatctagagcgtacaaagtggcgtctgcacgtagaattacaatagcaccgtttcgaatatgataaatattataaatccgtacaagttgcaatggtacggtttcacttcattcttatttaaatgtgtcccaaccgagagtgtggtgaaaaaaatagaataaaacctgagtttgtgccgcactaccgcgagcaaaaaaaaatgtcaaaattcttctctttaaaaaatggtctaattcatcacctcaaattcaatctggaacaatgatttggattggatcaatttctatgcaaaaacacagttatcgccctgagcccctgacgctggctgaaccgacaaacaacagcaataattcatagttgaagacaggcacagggcgagaccgccgtcatggacactgagaccgaggggaaggcggcggcggtcgaggagatgagggagtggtgcgtcgctctccccaaggtggagctccacgcccacctcaacggctccgtccgcaactccaccctcctagaacttgcaaaacatctaggcgacaaaggagtcattgtttttgaagatgttaaggatgtgatcatgaagagtgatagatctcttccagagtgtttcaagctttttgatctgtttcatatacttacaactgatcatgatacagtaacaaggattgctaaggaggttgaaaagatcttgctgcagacaatgttgcatatttggaaataagaacacacctaagaacaatgaggcaaaggggatgaccaagaggtcttacatggatgctgttattaaaggtctgaaagcagttgaagatgttgatgtcgaattatttggttctaatttcagaacaaatgaaacactaagttctaagcttttggatggtgtcacaaagaaaaagaagatatatgttaggctccttcttagtattgatcgccgcgagacaacttcggctgcattggataccgttaatctagccgtggaaatgatggaccaaggtgtcataggcattgacctttctggcaatccagtcgtgggggaatgggaaacatacctgcctgccctacaacatgctaaaaatatgggaatccccgttacaatccactgtggagaggtggcgaaccggaaggaaatccaagcagtgctggacttttgccctcagaggctgggtcatgtatgctgtctgaatgatgtagaatggaagaagctcaagtctctgatgattccggaggtgctccttccctagagcttcaccactttgctgacctctacaatgcgaagcaccctttgtccctgtgcacggatgattccggcctgttttcgacaagcctctcaaatgagtattacctcgttgcaacaactttcggcctcagcaagttcgagctgttccagctggcccaggatgcagtgcagtttgtttttgctgatgatgtggtgaagaagtctctgaaggaggtgttcaagcatgctgaaaagaggctgctcatgtgggatgaacttgctgcaccaagctagtgtacgtacccgttatgagatcagaatccttggagttatatgaatatcatctgtttgggaaaaatattcacgcagccctgggagtaagtgtagattagag

SEQ ID NO: 22939 - DNA, 1756 bp, Zea Mays
ctagtatgtgccagcaagtgtaggggatgacacctgggcccgtgtgtgtttgatatggagagagagaggccgtagcaggggtactttggggcatacgaaaatacggatacccgcaatgatatctagagcgtacaaagtggcgtctgcacgtagaattacaatagcaccgtttcgaatatgataaatattataaatccgtacaagttgcaatggtacggtttcacttcattcttatttaaatgtgtcccaaccgagagtgtggtgaaaaaaatagaataaaacctgagtttgtgccgcactaccgcgagcaaaaaaaaatgtcaaaattcttctctttaaaaaatggtctaattcatcacctcaaattcaatctggaacaatgatttggattggatcaatttctatgcaaaaacacagttatcgccctgagcccctgacgctggctgaaccgacaaacaacagcaataattcatagttgaagacaggcacagggcgagaccgccgtcatggacactgagaccgaggggaaggcggcggcggtcgaggagatgagggagtggtgcgtcgctctccccaaggtggagctccacgcccacctcaacggctccgtccgcaactccaccctcctagaacttgcaaaacatctaggcgacaaaggagtcattgtttttgaagatgttaaggatgtgatcatgaagagtgatagatctcttccagagtgtttcaagctttttgatctgtttcatatacttacaactgatcatgatacagtaacaaggattgctaaggaggttgaaaagatcttgctgcagacaatgttgcatatttggaaataagaacacacctaagaacaatgaggcaaaggggatgaccaagaggtcttacatggatgctgttattaaaggtctgaaagcagttgaagatgttgatgtcgaattatttggttctaatttcagaacaaatgaaacactaagttctaagcttttggatggtgtcacaaagaaaaagaagatatatgttaggctccttcttagtattgatcgccgcgagacaacttcggctgcattggataccgttaatctagccgtggaaatgatggaccaaggtgtcataggcattgacctttctggcaatccagtcgtgggggaatgggaaacatacctgcctgccctacaacatgctaaaaatatgggaatccccgttacaatccactgtggagaggtggcgaaccggaaggaaatccaagcagtgctggacttttgccctcagaggctgggtcatgtatgctgtctgaatgatgtagaatggaagaagctcaagtctctgatgattccggtagagatatgtttaacctcgaatgttatgacaggaggtgctccttccctagagcttcaccactttgctgacctctacaatgcgaagcaccctttgtccctgtgcacggatgattccggcctgttttcgacaagcctctcaaatgagtattacctcgttgcaacaactttcggcctcagcaagttcgagctgttccagctggcccaggatgcagtgcagtttgtttttgctgatgatgtggtgaagaagtctctgaaggaggtgttcaagcatgctgaaaagaggctgctcatgtgggatgaacttgctgcaccaagctagtgtacgtacccgttatgagatcagaatccttggagttatatgaatatcatctgtttgggaaaaatattcacgcagccctgggagtaagtgtagattagag

SEQ ID NO: 22940 - DNA, 2255 bp, Zea Mays
attgataaaataaatattacactttatcttagccaaaagctcgaaaatgtatgtgttaaaaacgagtccgaccctctttttttacagctcaattgattgttcgtcctctttagctaacaaggtgatattatataggagcgttatgctacatgtggtttggtgtcgtatagaaattatgtggtttatcacggtccatatttggtttaacggcctatatatagtataacggcatattagtagatgagaagtagggaaaatgaacagactatacgttttgcatgtggtgtatgatttcgcatatggtgtatctctactactccttaagaaaggagcgtaggcgtgcacaccaacccgttctgcctccgcttcgatcatggggtggtcgcgctttcgtcgccgccatcaacggtgtcgctatctcctccctatccggcgtccgcgatgctcgccacccctcctcccccacgcgtcggacgctcgccatgctcgcctccctcccctccggtccgcctcgctccccttccgcccttccgtcgcgtgcgcttggaaaaaggtccagcagccccaaactccccagcggggccatctcgcccacctctccctgcacgccggatccccgccgtccccaccatcgcctgtgttgggtccgacccagtccgctcatgcctcgacgcgcagttctcgcacaccgtccgcggcggcgtccgcctcgcgccggtctcgcacaccgtcccgcagcggatccaatcacgcctcctcaccctccgctgcctcctcccatcccctctcccatcgaatccgcgattccgcgtccacagtggataccgtgagctcgcccccgcctccatggctccatcctccgctcgcgattcccccgtgcccgttggaagggggtcacggatcctcacacggttcctgctgcactacctccgcgctgccacgcgcaggccgccgacgcttgagcgggagggcaccgcgctcgctggcctcgcggacacggccgtccacggcatggcgctcgtcgagggcacgacgttctcgtgccggggcctcttctgagtgctccggatcgtgtcggcggtggggctgagcagggagtgccgtcacaagctggagcggctcatggggctgatgctggtccaggccacgctcgacgacctccttgtctccagcgacgacggcggcgacgtgtacattgtcaacctggtcatgaggctggtcagggtgttcgtggcctccaaagaggaggcagacgcgccgtcggagaggatgcggaaggtggggcgcctggtcgacaagtacctcgacgaaatctcgcaggaccaggggctgaaggtgtccaagttcctcaccgtctccgagagcctgccggactcggccagggactgctacgacggcgtgtaccgggtgctggacatctacctcaagatggcatatcccaaaaccgctctacttacaaggatggcaaacatgctcatccaaatgagtcttcagaacccccttactttggctcatccgtgagcattttacagaagcaaccagccaaggaaccccatatggatggggacaatccgaatggctctgctaacagagatgattagcggcaaggtatcattgcatcaatttgtgtattatcttgagtatacatggatgtgcatagcctgtgtggattttgttcgccaaagctttggccccaggattacaccaatcctgacctttttgtcaaccaaataataattgaggggattgtgcaggtatgcttcgtatgttcatatctcatgatgtttcacccccaaccccaaccccaaccccaccctccccctttttaatttttgttgatctaactcaaagaaaaatttgcagcccacgataggccggagcctaagagcagcgtgcttttaggattagttgagatttgagaacatgcaatatgctgtgacggtggatgttctgcaaactgtgttttctgtttttggcgctgttaaaaaaatcaccatgtttgagaagaacagtggattgcaggctctaatataatattcagcttgagaaggacctcaaggaacaacaagttgtgcaaggtgcagtggaaaacactttaggggctggttctatcaatttgctattagagaatccaataccaaaggcaaattctctttccaacacaccaaatccatatgaacaaggcatctcgattattgggcgaacactatcgaaattcgatgaagatgatctgattccatgtttcggatttggag

SEQ ID NO: 22941 - DNA, 2762 bp, Zea Mays
attgataaaataaatattacactttatcttagccaaaagctcgaaaatgtatgtgttaaaaacgagtccgaccctctttttttacagctcaattgattgttcgtcctctttagctaacaaggtgatattatataggagcgttatgctacatgtggtttggtgtcgtatagaaattatgtggtttatcacggtccatatttggtttaacggcctatatatagtataacggcatattagtagatgagaagtagggaaaatgaacagactatacgttttgcatgtggtgtatgatttcgcatatggtgtatctctactactccttaagaaaggagcgtaggcgtgcacaccaacccgttctgcctccgcttcgatcatggggtggtcgcgctttcgtcgccgccatcaacggtgtcgctatctcctccctatccggcgtccgcgatgctcgccacccctcctcccccacgcgtcggacgctcgccatgctcgcctccctcccctccggtccgcctcgctccccttccgcccttccgtcgcgtgcgcttggaaaaaggtccagcagccccaaactccccagcggggccatctcgcccacctctccctgcacgccggatccccgccgtccccaccatcgcctgtgttgggtccgacccagtccgctcatgcctcgacgcgcagttctcgcacaccgtccgcggcggcgtccgcctcgcgccggtctcgcacaccgtcccgcagcggatccaatcacgcctcctcaccctccgctgcctcctcccatcccctctcccatcgaatccgcgattccgcgtccacagtggataccgtgagctcgcccccgcctccatggctccatcctccgctcgcgattcccccgtgcccgttggaagggggtcacggatcctcacacggttcctgctgcactacctccgcgctgccacgcgcaggccgccgacgcttgagcgggagggcaccgcgctcgctggcctcgcggacacggccgtccacggcatggcgctcgtcgagggcacgacgttctcgtgccggggcctcttctgagtgctccggatcgtgtcggcggtggggctgagcagggagtgccgtcacaagctggagcggctcatggggctgatgctggtccaggccacgctcgacgacctccttgtctccagcgacgacggcggcgacgtgtacattgtcaacctggtcatgaggctggtcagggtgttcgtggcctccaaagaggaggcagacgcgccgtcggagaggatgcggaaggtggggcgcctggtcgacaagtacctcgacgaaatctcgcaggaccaggggctgaaggtgtccaagttcctcaccgtctccgagagcctgccggactcggccagggactgctacgacggcgtgtaccgggtgctggacatctacctcaagatggcatatcccaaaaccgctctacttacaaggatggcaaacatgctcatccaaatgagtcttcagaacccccttactttggctcatccgtgagcattttacagaagcaaccagccaaggaaccccatatggatggggacaatccgaatggctctgctaacagagatgattagcggcaaggtatcattgcatcaatttgtgtattatcttgagtatacatggatgtgcatagcctgtgtggattttgttcgccaaagctttggccccagtacgtgtttgttacctccaccaatattctgtatgcattcatcatattgaagctaaaaagtcattgtgcttttgtagacctgtgtttttgtagaacacttctctattttatccattcagaacattgttttatatttatccattcagaacttgtgtttttgccaaacacttttctattttgcagtgagcttaactgtcagacttttgatagacacttatccaatatactaatgccccaactactcttgaagttaaaaagtcattggatggagtaagcatccccaagtaatgcattttacgaatttactaattgctattgtggattatcaagcctgtgatatgaaattacttatgcgacttactctccttcatatatttccttcccgaacataacgacgcctgccacatgtccatagcctttttgcacataaagatttgaatatcaaattttagtcgcaccacaacaggtactagaaagtggtataggcagagtcttaccacttcatgttgataagtgtcatatgctacattttgcggcttcctattgataatgcttcgaagataatattaactaagtatcccttgtgaattgtgacactgttttgttgctttaaaagggattacaccaatcctgacctttttgtcaaccaaataataattgaggggattgtgcagcccacgataggccggagcctaagagcagcgtgcttttaggattagttgagatttgagaacatgcaatatgctgtgacggtggatgttctgcaaactgtgttttctgtttttggcgctgttaaaaaaatcaccatgtttgagaagaacagtggattgcaggctctaatataatattcagcttgagaaggacctcaaggaacaacaagttgtgcaaggtgcagtggaaaacactttaggggctggttctatcaatttgctattagagaatccaataccaaaggcaaattctctttccaacacaccaaatccatatgaacaaggcatctcgattattgggcgaacactatcgaaattcgatgaagatgatctgattccatgtttcggatttggag

SEQ ID NO: 22942 - DNA, 2035 bp, Zea Mays
attgataaaataaatattacactttatcttagccaaaagctcgaaaatgtatgtgttaaaaacgagtccgaccctctttttttacagctcaattgattgttcgtcctctttagctaacaaggtgatattatataggagcgttatgctacatgtggtttggtgtcgtatagaaattatgtggtttatcacggtccatatttggtttaacggcctatatatagtataacggcatattagtagatgagaagtagggaaaatgaacagactatacgttttgcatgtggtgtatgatttcgcatatggtgtatctctactactccttaagaaaggagcgtaggcgtgcacaccaacccgttctgcctccgcttcgatcatggggtggtcgcgctttcgtcgccgccatcaacggtgtcgctatctcctccctatccggcgtccgcgatgctcgccacccctcctcccccacgcgtcggacgctcgccatgctcgcctccctcccctccggtccgcctcgctccccttccgcccttccgtcgcgtgcgcttggaaaaaggtccagcagccccaaactccccagcggggccatctcgcccacctctccctgcacgccggatccccgccgtccccaccatcgcctgtgttgggtccgacccagtccgctcatgcctcgacgcgcagttctcgcacaccgtccgcggcggcgtccgcctcgcgccggtctcgcacaccgtcccgcagcggatccaatcacgcctcctcaccctccgctgcctcctcccatcccctctcccatcgaatccgcgattccgcgtccacagtggataccgtgagctcgcccccgcctccatggctccatcctccgctcgcgattcccccgtgcccgttggaagggggtcacggatcctcacacggttcctgctgcactacctccgcgctgccacgcgcaggccgccgacgcttgagcgggagggcaccgcgctcgctggcctcgcggacacggccgtccacggcatggcgctcgtcgagggcacgacgttctcgtgccggggcctcttctgagtgctccggatcgtgtcggcggtggggctgagcagggagtgccgtcacaagctggagcggctcatggggctgatgctggtccaggccacgctcgacgacctccttgtctccagcgacgacggcggcgacgtgtacattgtcaacctggtcatgaggctggtcagggtgttcgtggcctccaaagaggaggcagacgcgccgtcggagaggatgcggaaggtggggcgcctggtcgacaagtacctcgacgaaatctcgcaggaccaggggctgaaggtgtccaagttcctcaccgtctccgagagcctgccggactcggccagggactgctacgacggcgtgtaccgggtgctggacatctacctcaagatggcatatcccaaaaccgctctacttacaaggatggcaaacatgctcatccaaatgagtcttcagaacccccttactttggctcatccgtgagcattttacagaagcaaccagccaaggaaccccatatggatggggacaatccgaatggctctgctaacagagatgattagcggcaaggtatcattgcatcaatttgtgtattatcttgagtatacatggatgtgcatagcctgtgtggattttgttcgccaaagctttggccccacccacgataggccggagcctaagagcagcgtgcttttaggattagttgagatttgagaacatgcaatatgctgtgacggtggatgttctgcaaacttggattgcaggctctaatataatattcagcttgagaaggacctcaaggaacaacaagttgtgcaaggtgcagtggaaaacactttaggggctggttctatcaatttgctattagagaatccaataccaaaggcaaattctctttccaacacaccaaatccatatgaacaaggcatctcgattattgggcgaacactatcgaaattcgatgaagatgatctgattccatgtttcggatttggag

SEQ ID NO: 22943 - DNA, 2088 bp, Zea Mays
attgataaaataaatattacactttatcttagccaaaagctcgaaaatgtatgtgttaaaaacgagtccgaccctctttttttacagctcaattgattgttcgtcctctttagctaacaaggtgatattatataggagcgttatgctacatgtggtttggtgtcgtatagaaattatgtggtttatcacggtccatatttggtttaacggcctatatatagtataacggcatattagtagatgagaagtagggaaaatgaacagactatacgttttgcatgtggtgtatgatttcgcatatggtgtatctctactactccttaagaaaggagcgtaggcgtgcacaccaacccgttctgcctccgcttcgatcatggggtggtcgcgctttcgtcgccgccatcaacggtgtcgctatctcctccctatccggcgtccgcgatgctcgccacccctcctcccccacgcgtcggacgctcgccatgctcgcctccctcccctccggtccgcctcgctccccttccgcccttccgtcgcgtgcgcttggaaaaaggtccagcagccccaaactccccagcggggccatctcgcccacctctccctgcacgccggatccccgccgtccccaccatcgcctgtgttgggtccgacccagtccgctcatgcctcgacgcgcagttctcgcacaccgtccgcggcggcgtccgcctcgcgccggtctcgcacaccgtcccgcagcggatccaatcacgcctcctcaccctccgctgcctcctcccatcccctctcccatcgaatccgcgattccgcgtccacagtggataccgtgagctcgcccccgcctccatggctccatcctccgctcgcgattcccccgtgcccgttggaagggggtcacggatcctcacacggttcctgctgcactacctccgcgctgccacgcgcaggccgccgacgcttgagcgggagggcaccgcgctcgctggcctcgcggacacggccgtccacggcatggcgctcgtcgagggcacgacgttctcgtgccggggcctcttctgagtgctccggatcgtgtcggcggtggggctgagcagggagtgccgtcacaagctggagcggctcatggggctgatgctggtccaggccacgctcgacgacctccttgtctccagcgacgacggcggcgacgtgtacattgtcaacctggtcatgaggctggtcagggtgttcgtggcctccaaagaggaggcagacgcgccgtcggagaggatgcggaaggtggggcgcctggtcgacaagtacctcgacgaaatctcgcaggaccaggggctgaaggtgtccaagttcctcaccgtctccgagagcctgccggactcggccagggactgctacgacggcgtgtaccgggtgctggacatctacctcaagatggcatatcccaaaaccgctctacttacaaggatggcaaacatgctcatccaaatgagtcttcagaacccccttactttggctcatccgtgagcattttacagaagcaaccagccaaggaaccccatatggatggggacaatccgaatggctctgctaacagagatgattagcggcaaggtatcattgcatcaatttgtgtattatcttgagtatacatggatgtgcatagcctgtgtggattttgttcgccaaagctttggccccacccacgataggccggagcctaagagcagcgtgcttttaggattagttgagatttgagaacatgcaatatgctgtgacggtggatgttctgcaaactgtgttttctgtttttggcgctgttaaaaaaatcaccatgtttgagaagaacagtggattgcaggctctaatataatattcagcttgagaaggacctcaaggaacaacaagttgtgcaaggtgcagtggaaaacactttaggggctggttctatcaatttgctattagagaatccaataccaaaggcaaattctctttccaacacaccaaatccatatgaacaaggcatctcgattattgggcgaacactatcgaaattcgatgaagatgatctgattccatgtttcggatttggag

SEQ ID NO: 22944 - DNA, 1820 bp, Zea Mays
attgataaaataaatattacactttatcttagccaaaagctcgaaaatgtatgtgttaaaaacgagtccgaccctctttttttacagctcaattgattgttcgtcctctttagctaacaaggtgatattatataggagcgttatgctacatgtggtttggtgtcgtatagaaattatgtggtttatcacggtccatatttggtttaacggcctatatatagtataacggcatattagtagatgagaagtagggaaaatgaacagactatacgttttgcatgtggtgtatgatttcgcatatggtgtatctctactactccttaagaaaggagcgtaggcgtgcacaccaacccgttctgcctccgcttcgatcatggggtggtcgcgctttcgtcgccgccatcaacggtgtcgctatctcctccctatccggcgtccgcgatgctcgccacccctcctcccccacgcgtcggacgctcgccatgctcgcctccctcccctccggtccgcctcgctccccttccgcccttccgtcgcgtgcgcttggaaaaaggtccagcagccccaaactccccagcggggccatctcgcccacctctccctgcacgccggatccccgccgtccccaccatcgcctgtgttgggtccgacccagtccgctcatgcctcgacgcgcagttctcgcacaccgtccgcggcggcgtccgcctcgcgccggtctcgcacaccgtcccgcagcggatccaatcacgcctcctcaccctccgctgcctcctcccatcccctctcccatcgaatccgcgattccgcgtccacagtggataccgtgagctcgcccccgcctccatggctccatcctccgctcgcgattcccccgtgcccgttggaagggggtcacggatcctcacacggttcctgctgcactacctccgcgctgccacgcgcaggccgccgacgcttgagcgggagggcaccgcgctcgctggcctcgcggacacggccgtccacggcatggcgctcgtcgagggcacgacgttctcgtgccggggcctcttctgagtgctccggatcgtgtcggcggtggggctgagcagggagtgccgtcacaagctggagcggctcatggggctgatgctggtccaggccacgctcgacgacctccttgtctccagcgacgacggcggcgacgtgtacattgtcaacctggtcatgaggctggtcagggtgttcgtggcctccaaagaggaggcagacgcgccgtcggagaggatgcggaaggtggggcgcctggtcgacaagtacctcgacgaaatctcgcaggaccaggggctgaaggtgtccaagttcctcaccgtctccgagagcctgccggactcggccagggactgctacgacggcgtgtaccgggtgctggacatctacctcaagcccacgataggccggagcctaagagcagcgtgcttttaggattagttgagatttgagaacatgcaatatgctgtgacggtggatgttctgcaaactgtgttttctgtttttggcgctgttaaaaaaatcaccatgtttgagaagaacagtggattgcaggctctaatataatattcagcttgagaaggacctcaaggaacaacaagttgtgcaaggtgcagtggaaaacactttaggggctggttctatcaatttgctattagagaatccaataccaaaggcaaattctctttccaacacaccaaatccatatgaacaaggcatctcgattattgggcgaacactatcgaaattcgatgaagatgatctgattccatgtttcggatttggag

SEQ ID NO: 22945 - DNA, 2863 bp, Zea Mays
ataccagcaacccaagcaactccccacgttctctgtccttccaagacccaggctttcagttccagccccacctcgcctagcttctcccctccccttcccaaaccctacaccccgggccttcgccgtccccgactcaccgccgggcgccggccacccccatagcgcagcgccggcgccgaactgaactcttccgtgcggtcggccgcgcgtacggccacccccctcggcgccgcccgccgcctttgatgtctcccacctgcgacctcggcttcctctggccccggtcgcagaagagcccccaagaggtctcccgagcggccgcttccggagcccagcgattggcctccccacggcagccgaaatgagcggcggcgagaagatgttgctgtttgggtcctttacagaggacgagactaagttgttccagggtcagcctctcaaaagtccaaataaaagcgtcagcaaagaatgtgaacggacggagatccagtttggcaccctgaacttttcagtgctgagtttagagaaggtatctacttccagtgttgttcttcctgcaaaatcagcaaacagcgagaccagtgccatcacaaaggagaatacatgcagtaatgaaaagaaagctgcaggatcaagccttccaaatggcagagccattctggctaatggatgcccccctgttaatgttcctgccaacaatgatttatttgagaatgtgaagaagacagaagctgttgtcccaccagttgtgcctgtaaaaagcatcagcaatccaacaccacaaatgacattggaggtgcataacgatggcaccgaacccactcaaagcagaaagttagacaaggaaagggaaattactgaaaatggtagcccaattgtcgatacacccattgctgcagctccagcagaagaggcagtcacaaacctaaataagaaaacctcacagaacatgcccttgattccacaaggcttgaggaacacaggaaatatctgctttctgaatgcaactttgcaggcattgctttcatgctcgccttttgtccaccttttacaggatctgaggaaccgtagtatacctaagtttggctacccaactctgcgtgcatttgttgagttgatctctcaattcgatgtgcttgacgagtcagttaacaagaaaaaagagaaggctactactgttgctgcaaagccacttaatcctgccatgtttgatgatgttctcagaaactttacaccagatgtgccggctggaataactgctcggccaaggcaggaagatgctcaagagtttttaagttttgccatggatagagtgcatgatgaactgctgaagcttaatggtaatggtttggattcaaaggagggtatggttgtttcttcttctgctgatgatgcttgggagacagttggaagaaagaacaaatctgcaatagttagaacacatagttttgttccctctgagctaagtgctatttttggagggcagctacagagcgttgtgaaagctgcagacacttaatgatgcacttcgtctgttctctacccctgaatctttggaaggatacagaaccactgctggaaaggctggtttggtgacagctagaaagtcattcaagatacacgcccttccaaagataatgatcctgcacttaaagaggttcagttatggaaataatgggagcactaaaatctacaagccactcggcttcacatctgaactggttcttagtcgtgatctgctgagctcaccatcacaagagggtagaaaatatgagcttgttgcaaccatcactcatcatgggagggacccttacagaggtcactacactgctcatgcaaagcatgccgacgggcaatggcttcgctttgacgatgacgctgttgtgcccgttggcgagaacgatgtcttgcatgaccaagcatatgttctcttctacaaacaagtctgaaagcactacgtagttgattagttgctctttcgtatcgccgttgcttaaacagccagatataccgtctaactatcgtcctattaatgtagtcaccgagtaacagcagcagagtattatgtgaagcaccctggtgctgcacgtgtttattatcatatgcttggtcatgatgtggcgagaggggggatttgtcttcagcccattttgaggttctgtaaaaattcaactgtcatcattgcaatgagcagcgaagtaatcatggtcagccctgtcgctggcagctgccgaaatgggttgtgtgcatgtggcatgccgtggttggcaattggttgttgagaagacattgccattagcttagccatgtgccgtgtctctgggagtgtcaagaggtgcagggcaatgttagctggtgtatgtgccttgcaagcatgactagcatgttataaaaagcttcgaattattcgttttgaaggtgtcatgtccctgtcaaggagtcgtcctgacgtctgtaaggaaggtgtgcggccgacatggacttctctttgtggctttctgaggaatggactgaagtggctgcgacttaggaaatctggtatagcgcaaatgttctggagcaaactgagctagtctggttgcaatctgttgctaaactaccatcggttatacctgctgacagacagtgcaactggcgtaggttgctttatgttacacctgttgtttggtggtaaaatcagtggtccatcagtgcttcctacggccttcgtttcaaggaccgattcttcttcagtggatgctgacagctagacatcccgaaagtcatctggagagtagctcggcacatgtagcatcctggagtcgttgacaactcagttccatctgaatcataggacaactgaagcaaagcgaggtagtaatgg

SEQ ID NO: 22946 - DNA, 2929 bp, Zea Mays
ataccagcaacccaagcaactccccacgttctctgtccttccaagacccaggctttcagttccagccccacctcgcctagcttctcccctccccttcccaaaccctacaccccgggccttcgccgtccccgactcaccgccgggcgccggccacccccatagcgcagcgccggcgccgaactgaactcttccgtgcggtcggccgcgcgtacggccacccccctcggcgccgcccgccgcctttgatgtctcccacctgcgacctcggcttcctctggccccggtcgcagaagagcccccaagaggtctcccgagcggccgcttccggagcccagcgattggcctccccacggcagccgaaatgagcggcggcgagaagatgttgctgtttgggtcctttacagaggacgagactaagttgttccagggtcagcctctcaaaagtccaaataaaagcgtcagcaaagaatgtgaacggacggagatccagtttggcaccctgaacttttcagtgctgagtttagagaaggtatctacttccagtgttgttcttcctgcaaaatcagcaaacagcgagaccagtgccatcacaaaggagaatacatgcagtaatgaaaagaaagctgcaggatcaagccttccaaatggcagagccattctggctaatggatgcccccctgttaatgttcctgccaacaatgatttatttgagaatgtgaagaagacagaagctgttgtcccaccagttgtgcctgtaaaaagcatcagcaatccaacaccacaaatgacattggaggtgcataacgatggcaccgaacccactcaaagcagaaagttagacaaggaaagggaaattactgaaaatggtagcccaattgtcgatacacccattgctgcagctccagcagaagaggcagtcacaaacctaaataagaaaacctcacagaacatgcccttgattccacaaggcttgaggaacacaggaaatatctgctttctgaatgcaactttgcaggcattgctttcatgctcgccttttgtccaccttttacaggatctgaggaaccgtagtatacctaagtttggctacccaactctgcgtgcatttgttgagttgatctctcaattcgatgtgcttgacgagtcagttaacaagaaaaaagagaaggctactactgttgctgcaaagccacttaatcctgccatgtttgatgatgttctcagaaactttacaccagatgtgccggctggaataactgctcggccaaggcaggaagatgctcaagagtttttaagttttgccatggatagagtgcatgatgaactgctgaagcttaatggtaatggtttggattcaaaggagggtatggttgtttcttcttctgctgatgatgcttgggagacagttggaagaaagaacaaatctgcaatagttagaacacatagttttgttccctctgagctaagtgctatttttggagggcagctacagagcgttgtgaaagctgcaggtaacaaagcatcagctactgttcaaccctttctactgcttcatcttgatatattcccagatgctgttcagacacttaatgatgcacttcgtctgttctctacccctgaatctttggaaggatacagaaccactgctggaaaggctggtttggtgacagctagaaagtcattcaagatacacgcccttccaaagataatgatcctgcacttaaagaggttcagttatggaaataatgggagcactaaaatctacaagccactcggcttcacatctgaactggttcttagtcgtgatctgctgagctcaccatcacaagagaaaatatgagcttgttgcaaccatcactcatcatgggagggacccttacagaggtcactacactgctcatgcaaagcatgccgacgggcaatggcttcgctttgacgatgacgctgttgtgcccgttggcgagaacgatgtcttgcatgaccaagcatatgttctcttctacaaacaagtctgaaagcactacgtagttgattagttgctctttcgtatcgccgttgcttaaacagccagatataccgtctaactatcgtcctattaatgtagtcaccgagtaacagcagcagagtattatgtgaagcaccctggtgctgcacgtgtttattatcatatgcttggtcatgatgtggcgagaggggggatttgtcttcagcccattttgaggttctgtaaaaattcaactgtcatcattgcaatgagcagcgaagtaatcatggtcagccctgtcgctggcagctgccgaaatgggttgtgtgcatgtggcatgccgtggttggcaattggttgttgagaagacattgccattagcttagccatgtgccgtgtctctgggagtgtcaagaggtgcagggcaatgttagctggtgtatgtgccttgcaagcatgactagcatgttataaaaagcttcgaattattcgttttgaaggtgtcatgtccctgtcaaggagtcgtcctgacgtctgtaaggaaggtgtgcggccgacatggacttctctttgtggctttctgaggaatggactgaagtggctgcgacttaggaaatctggtatagcgcaaatgttctggagcaaactgagctagtctggttgcaatctgttgctaaactaccatcggttatacctgctgacagacagtgcaactggcgtaggttgctttatgttacacctgttgtttggtggtaaaatcagtggtccatcagtgcttcctacggccttcgtttcaaggaccgattcttcttcagtggatgctgacagctagacatcccgaaagtcatctggagagtagctcggcacatgtagcatcctggagtcgttgacaactcagttccatctgaatcataggacaactgaagcaaagcgaggtagtaatgg

SEQ ID NO: 22947 - DNA, 1618 bp, Zea Mays
cagggaatgagggaaggaaaccgcccctttctctgggtccaggcccacacggcccaactacttatccccgtcgtcgtcctctattgtacccgagctgctcccctctccgcccgcccgccgcccactgccgcctcgctcgcctagggagacaacttctactagcttcctcccctaccgcctgccgcccaatcagccatggcggatcccactgagagggaccagttcacggacgacgaggaggaagaagactacctggaggacggcgagcaaggccttggaagcgaggacgaggaaggaggaggagcggggggcaagaggaagcggctgggaaataccctgggtgggatcggcaagcgtggggtgtgctacctcagccgcgtcccgccgcacatgaacccgtcgcacatccgccagatgctttccaagtacggcgaggtgctcaggatttacctcgtgcccgaaggtcaaggtcatcacaagcatactagtgttaaagcgaaggcttactcggaagggtatgtttgcacatgagggacacacacaaactgatgcactgctttggagaactttgccttcctcatctgaaatgttactctagaagtggattgaatttgcaaagaagagtgttgccaagagagtggctaatctgcttaatggtgaacaaataggcggtaagaagagatctccattttattatgacatttggaacattaaatacctcaggaagtttaaatgggatgatctggttggtgaaatggctgagaaaactcatatcagagagcagaaattaaccttggagatagcagcagcaaagaaacaacgcgatcactacctgtccaacattgaaaaatctcgcgcgttgaaacacattcaagagcgcaggaaaaagaggcagaagacagaaggagcagaagccagtaatgtcccagaaacaaaaactgcccgttcaattcctcaaaagaaaccagttgtggagacagatgccaaaactaaatccacgctttcaaaagacattttggctggcgttttcgggggttcatcatgaccacctcctatctttcggcatggattggtgcatgccaaactgaatggagtgctgcaagatcatcgagttcatattctacttcgaatttttgtagatgaagtcagtttttttttcttgggggaatctttgtaaaactgaaacacatgttctcttctagttgaacaaatatcacgaggaactgccattggcgttatctcttccttggctgggattttcagtgcttcagcttgcagctatgctgtggcctgtgggtgctggatgatggtaggaagacacaagggaacacgagcgattgggatggatatgcagccatgcagtgtggggtgatctgttcttgcccgaggaatggaacatgatgctgtgatcatgacatcgagattggtgagagataaggttgtgcaagctgaccaccatgaccaccgtttcagaacttgtttcgataacgagtattattatacttgtgttgtagtggaatttaaactaattttgatcctaaccctcttcaacccatatgtattaaggataatacatctacatccaaacaagactctcacgtgatgacgtgagtctttc

SEQ ID NO: 22948 - DNA, 1641 bp, Zea Mays
cagggaatgagggaaggaaaccgcccctttctctgggtccaggcccacacggcccaactacttatccccgtcgtcgtcctctattgtacccgagctgctcccctctccgcccgcccgccgcccactgccgcctcgctcgcctagggagacaacttctactagcttcctcccctaccgcctgccgcccaatcagccatggcggatcccactgagagggaccagttcacggacgacgaggaggaagaagactacctggaggacggcgagcaaggccttggaagcgaggacgaggaaggaggaggagcggggggcaagaggaagcggctgggaaataccctgggtgggatcggcaagcgtggggtgtgctacctcagccgcgtcccgccgcacatgaacccgtcgcacatccgccagatgctttccaagtacggcgaggtgctcaggatttacctcgtgcccgaaggtcaaggtcatcacaagcatactagtgttaaagcgaaggcttactcggaagggtggattgaatttgcaaagaagagtgttgccaagagagtggctaatctgcttaatggtgaacaaataggcggtaagaagagatctccattttattatgacatttggaacattaaatacctcaggaagtttaaatgggatgatctggttggtgaaatggctgagaaaactcatatcagagagcagaaattaaccttggagatagcagcagcaaagaaacaacgcgatcactacctgtccaacattgaaaaatctcgcgcgttgaaacacattcaagagcgcaggaaaaagaagacagaaggagcagaagccagtaatgtcccagaaacaaaaactgcccgttcaattcctcaaaagaaaccagttgtggagacagatgccaaaactaaatccacgctttcaaaagacattttggctggcgttttcgggggttcatcatgaccacctcctatctttcggcatggattggtgcatgccaaactgaatggagtgctgcaagatcatcgagttcatattctacttcgaatttttgtagatgaagtcagtttttttttcttgggggtaagtaggaactttcagaaacattttgttctgctgacattgccccggaagattttctgggacctgaccattttgatgtgaaaggactgttgattgccagcgctgtttgaacaggaatctttgtaaaactgaaacacatgttctcttctagttgaacaaatatcacgaggaactgccattggcgttatctcttccttggctgggattttcagtgcttcagcttgcagctatgctgtggcctgtgggtgctggatgatggtaggaagacacaagggaacacgagcgattgggatggatatgcagccatgcagtgtggggtgatctgttcttgcccgaggaatggaacatgatgctgtgatcatgacatcgagattggtgagagataaggttgtgcaagctgaccaccatgaccaccgtttcagaacttgtttcgataacgagtattattatacttgtgttgtagtggaatttaaactaattttgatcctaaccctcttcaacccatatgtattaaggataatacatctacatccaaacaagactctcacgtgatgacgtgagtctttc

SEQ ID NO: 22949 - DNA, 1523 bp, Zea Mays
attgtttagtatatttttcacccatctccatcttctacaatatattattaaatatcgaatatagtcttgtagcaagtcttctattgttatctctggtttcaaactttcaaagaacttgtttgtattcaaaaacaaagttgctctatacagattggtatccatctgactgtcccacctcttatcaacaaaagaaattacttcatccattattcgtttcttgtgctccaaagcttttttgatgctcttttttgcatggtccatggtagcccacatttcagccattgctggtctctcatcaccatcagctatcctcaagaatattagaataggtcaaggtcatcacaagcatactagtgttaaagcgaaggcttactcggaagggtatgtttgcacatgagggacacacacaaactgatgcactgctttggagaactttgccttcctcatctgaaatgttactctagaagtaaagcatgtgcaaatattcataccagcaccagcagctgtggattgaatttgcaaagaagagtgttgccaagagagtggctaatctgcttaatggtgaacaaataggcggtaagaagagatctccattttattatgacatttggaacattaaatacctcaggaagtttaaatgggatgatctggttggtgaaatggctgagaaaactcatatcagagagcagaaattaaccttggagatagcagcagcaaagaaacaacgcgatcactacctgtccaacattgaaaaatctcgcgcgttgaaacacattcaagagcgcaggaaaaagaggcagaagacagaaggagcagaagccagtaatgtcccagaaacaaaaactgcccgttcaattcctcaaaagaaaccagttgtggagacagatgccaaaactaaatccacgctttcaaaagacattttggctggcgttttcgggggttcatcatgaccacctcctatctttcggcatggattggtgcatgccaaactgaatggagtgctgcaagatcatcgagttcatattctacttcgaatttttgtagatgaagtcagtttttttttcttgggggaatctttgtaaaactgaaacacatgttctcttctagttgaacaaatatcacgaggaactgccattggcgttatctcttccttggctgggattttcagtgcttcagcttgcagctatgctgtggcctgtgggtgctggatgatggtaggaagacacaagggaacacgagcgattgggatggatatgcagccatgcagtgtggggtgatctgttcttgcccgaggaatggaacatgatgctgtgatcatgacatcgagattggtgagagataaggttgtgcaagctgaccaccatgaccaccgtttcagaacttgtttcgataacgagtattattatacttgtgttgtagtggaatttaaactaattttgatcctaaccctcttcaacccatatgtattaaggataatacatctacatccaaacaagactctcacgtgatgacgtgagtctttc

SEQ ID NO: 22950 - DNA, 4594 bp, Zea Mays
acacccaagatgccaagacccaatccccatggagtcatggacaaggcaggctccacgtcctttgtccctgtccacgccgaggacaaagtcacgacaccaaatccctcccaggcatcacagaccccattctccccccacatcagcacagctcaggaagcttcccatcctccatggcctaaatcatgtctgacacttgacagttcacaaaaaggtcccgtttcgtggaccaatgtcttgcttcggttgaaaggcgcggtatctgctgctgcttctgtggagttattaggcttcgatttgggggtgggggccggtggtttcagcgtgggaggaccgcgaaaggcgatgctttcagcagcatgatccaggagatgaagggcgagatcggcgccatctcgtcgcgcggcgtgctacggctccggccggggagccacgccggggccgggcgagcgccggcagccgagccggacgaggcgccgcgggagggctgctgggcgcagttgcctctcgagcttctgcgtatggtgctggtcagggtcgaggaccaggagccgcggtggccgggccgcagcgccgtcgtggcgtgcgcctgcgtctgccgctgctggagggccgccgtcaaggagatcgtgcgcgtgctggaggcgtctgggaaactcaccttccccatctctctcaagcagggatgcccctctcaaatgtttcatcaggaggaaccgggctgctcagtcgtattctttgtgccttggagtcactgatgggttagctgatgatgggaaattttctacttgctgcacgcaaatgccgtaggcctgcatgcactgaatacctgatctcgcttgatgcgaagaacacatcagctggttcctacattggcaagctaagatcaaacttcttgggaacaaagtttaccgtctatgatgcccatccaccttgtgccagagctgcggtttcaaaggggtacatgatcggctcagcccatgtttctcctggggtacctgctgggaattatccggtttctcacatttcttactatgcgactttgggttctagggtgccaagaaagatgaagtgtgtcatggacagcatccccgtctcagcgattaaaggaggagggactgctcccacgcagaccgagttcccatccatgagctccagctccttcgcatcggttccattcttcactaggaaaccaggccaccgtccggacagttgtccaggtgttccgccgggtacccagaacgaaaccaagacggtgctgaagaacaagtcccccaggtggcaccagccgctgcagtgctggtgcctcaacttccacgggcgggtcacggtcgcgtctgtgaaagaacttccagctggtggtggcttcgggcgagagtaagcctaaccaggacgacgacgtgatactccagttcgggaaggacctgttcaccatgacttccggtatccgatctccgcgttccaggcattcgccatctgcctgagcagctttgacaccaaaatcactcgcgagtgagtttgtctcccagagagacacgctctagcaccctgctttgacacagaatgtccgtattggcactgatgatctgcgctgtttaccactgtcctccactagtacttttcaggggtatccaagtcatttattacttttgatcctatagtgtcttgtcttttattcgtgggagtgtgttcaagctgcaccatttttgtttacttccacgtctcatttctcagcaggtgaaccagctagcagatacagcaaggaattaatagcctaatatagacttacctgagctttatgccggagagtttggtgatcaagtatacttttgttcagtacaatcgtgatgtaaatagcaatctagctggaccagatcatacttgtatctatctatgcaaccctacagttgtatcctaaagcatttattttgtacagttctttcttaaaatgacccttctgaggcgccagacgagtatatacatacatttgcaagtattttggcactctaaaaaaaatactgagacggctggctaaggtggcatggtggtgatgagttcaaagttgaagcttcaaacggcctcctggcctggctgcagatgattgtgatatagagtaatgaattttgctaacaagtatataatattatttttagggtagaaatttagagtaatatgagtgaggatagtctaagtatcctagatttattatcttcctatttgactacagtcagttatgcacaaatttgaaatcgagatgaaacttggtggtggatcggagctgaatgtgcaagagtagacgacgacaacataggtcagggccagccagccaaggaagccgaatgtactcaacgcagactagtaagtagtacagtgcactacagtacgtcgtggatttatttctgctgcacagagagaggaggacagtgaagtatcgccgtcctcgcgagcgaccggccggcggcaacaacacgtgcgagcagcgaccgacctgcaacaccaaaccaaccaagcaacccacgagacgagacgagaagcacatgctgcgctgtcgccctggtagagcgagcgaggcacgggccacgccacggtccccctactcctccggatcgatcgggggagtagtgtctcagacctcgccggacttggcgaaccgccccttgatccgcatccggccgtcagcgcgggccttgcgcgactcgtaccggatctgcttgccgaacctgtgcgcaagcaagagcagcgagagctagcgacgtgagagcgactgtggtgtcgatcggagctaccactactccggctcgcccgctcacctcctgttcttccgcttctccttgtagcgcgagatcaccgtgccgcggtcggggtgggccacgtcgtagccgcccttcttttccgtcaccggcaccagcgccgtcgtggccaacagctgcggtcgcggggccgtttcctcgtctggcttgttgccgctattgtccacgtcgccgccgctgctgagcgtgacgctggcggggaagatctccgacatgtccacgaacgaggacaggcacggctcgtccggcgccggagcagcctgctcgcgcgcctcctccacctccacctccgcccggcgcgcgtcgacgtcacaggcgcagagaagtgactgaacactgaaccaaacctcgtgggaaggcactgctgcgaaagccatggtcgctgcatcatgccaggcggcgtcagcgtcagcagcgtcgagagccccgaagtctgcggcggctccaatgtcgagctccggcgacgcccatggaggcagctgctcgccgtcacccggctccagctccgcgtaagacgccgccacggccgccgcctccgacttggcgagctcctccagctgccggattaccacgtcagccagctcaccgccggagctccggttctaggtcgccatatcaagacaaccattagagaagaggaaaaagaatcccgttttttttttgtttggtttcatttaacaatggctcttgtagcagggcagcagccgaagcagcaccgtacctttggggacggcggtgcgaggagcggatggaggccatgacaagatgtggtaggaacgaccacgtcctccaagcacaccacctggggctcctcccaggtggaccaccaaccgacgtccccgcccgccgccgccgccttctcgtcgtacccggcgacgccgaggatggccgcgagctcggcgatcgaagggcacccggcgtactcttccaccgcgtcatggtcgtggtggagcggccgcgggtcccggtgctcctcccccttctcctcgtcctccttctccaagcagtagcagtcggcgcagacgaagccgccgccgccgccgcggggggacgcgacggcggtggcggcggctgcgcggcacctggcgcagagcggcgcccgggcgtggcgggtggacaccgtgttggcgccgtgcacgtggcggtcgcacggcaggcacagcctcgcggagtcggcccggcagtacaccacggccggcaggcccatgcagtagtcgcatctcggcgcctccttgctgccggccgcgtccgcgtcggacatggcttccgccacctgcggcggatcacggcagcggacaagacccccgggggatctggttgggacgagcgcgatttgttgcagtgaggacggaggaggcacaggattgatggcgcgaaagggagaggggacgatagaggcctacaactcgcacggtcgtcaccctcactcgtcgctactgtcttgtagttgttgtaggtcgatggtgggtgccagtacaaagacactctgtagtctgtagatggccatgcagcagcagcagcacgccgccccgtagttgagcgcgaagcccgctattttggctcagcgtttaccagagctgtatgtattctacatatatgtctactgttgatatttgattttctaaaggtgtcgaaaacaagttaagtatttggaccttcgtcctttgatttaatgcgtaggatgaaggttcttaaaggagatggaaataaaaacgataacatgccatataagccaaaaagataatatgtcatacaatttaatgaagagagatataagagagtttaac

SEQ ID NO: 22951 - DNA, 5138 bp, Zea Mays
acacccaagatgccaagacccaatccccatggagtcatggacaaggcaggctccacgtcctttgtccctgtccacgccgaggacaaagtcacgacaccaaatccctcccaggcatcacagaccccattctccccccacatcagcacagctcaggaagcttcccatcctccatggcctaaatcatgtctgacacttgacagttcacaaaaaggtcccgtttcgtggaccaatgtcttgcttcggttgaaaggcgcggtatctgctgctgcttctgtggagttattaggcttcgatttgggggtgggggccggtggtttcagcgtgggaggaccgcgaaaggcgatgctttcagcagcatgatccaggagatgaagggcgagatcggcgccatctcgtcgcgcggcgtgctacggctccggccggggagccacgccggggccgggcgagcgccggcagccgagccggacgaggcgccgcgggagggctgctgggcgcagttgcctctcgagcttctgcgtatggtgctggtcagggtcgaggaccaggagccgcggtggccgggccgcagcgccgtcgtggcgtgcgcctgcgtctgccgctgctggagggccgccgtcaaggagatcgtgcgcgtgctggaggcgtctgggaaactcaccttccccatctctctcaagcagggatgcccctctcaaatgtttcatcaggaggaaccgggctgctcagtcgtattctttgtgccttggagtcactgatgggttagctgatgatgggaaattttctacttgctgcacgcaaatgccgtaggcctgcatgcactgaatacctgatctcgcttgatgcgaagaacacatcagctggttcctacattggcaagctaagatcaaacttcttgggaacaaagtttaccgtctatgatgcccatccaccttgtgccagagctgcggtttcaaaggggtacatgatcggctcagcccatgtttctcctggggtacctgctgggaattatccggtttctcacatttcttactatgcgactttgggttctagggtgccaagaaagatgaagtgtgtcatggacagcatccccgtctcagcgattaaaggaggagggactgctcccacgcagaccgagttcccatccatgagctccagctccttcgcatcggttccattcttcactaggaaaccaggccaccgtccggacagttgtccaggtgttccgccgggtacccagaacgaaaccaagacggtgctgaagaacaagtcccccaggtggcaccagccgctgcagtgctggtgcctcaacttccacgggcgggtcacggtcgcgtctgtgaaagaacttccagctggtggtggcttcgggcgagagtaaggctagctgcagcggcatccgccacactcgcactccttagccctgtagccatttaggatgacgcctgaagctctgtagccatttagggtgacgcctgagctgtaacggcgtgcgctaaacgggtccctacctgctacagccgtaggtgaagacgcgcacgtcccccagataagggaagcactgtagcgcccccacagtgctctcctatttaatagttgaacaaaaatagaaataaaagatgaatagggttagataataatattttatagttgtagtggggtataggggataatatagggagaaccgctgcgggagatgaaaatttagggggtgaaatgttgatgatgtgacacaaaaaagtgatataagaggaaaaatttagagaaagccgctgcggatagcctaaccaggacgacgacgtgatactccagttcgggaaggacctgttcaccatgacttccggtatccgatctccgcgttccaggcattcgccatctgcctgagcagctttgacaccaaaatcactcgcgagtgagtttgtctcccagagagacacgctctagcaccctgctttgacacagaatgtccgtattggcactgatgatctgcgctgtttaccactgtcctccactagtacttttcaggggtatccaagtcatttattacttttgatcctatagtgtcttgtcttttattcgtgggagtgtgttcaagctgcaccatttttgtttacttccacgtctcatttctcagcaggtgaaccagctagcagatacagcaaggaattaatagcctaatatagacttacctgagctttatgccggagagtttggtgatcaagtatacttttgttcagtacaatcgtgatgtaaatagcaatctagctggaccagatcatacttgtatctatctatgcaaccctacagttgtatcctaaagcatttattttgtacagttctttcttaaaatgacccttctgaggcgccagacgagtatatacatacatttgcaagtattttggcactctaaaaaaaatactgagacggctggctaaggtggcatggtggtgatgagttcaaagttgaagcttcaaacggcctcctggcctggctgcagatgattgtgatatagagtaatgaattttgctaacaagtatataatattatttttagggtagaaatttagagtaatatgagtgaggatagtctaagtatcctagatttattatcttcctatttgactacagtcagttatgcacaaatttgaaatcgagatgaaacttggtggtggatcggagctgaatgtgcaagagtagacgacgacaacataggtcagggccagccagccaaggaagccgaatgtactcaacgcagactagtaagtagtacagtgcactacagtacgtcgtggatttatttctgctgcacagagagaggaggacagtgaagtatcgccgtcctcgcgagcgaccggccggcggcaacaacacgtgcgagcagcgaccgacctgcaacaccaaaccaaccaagcaacccacgagacgagacgagaagcacatgctgcgctgtcgccctggtagagcgagcgaggcacgggccacgccacggtccccctactcctccggatcgatcgggggagtagtgtctcagacctcgccggacttggcgaaccgccccttgatccgcatccggccgtcagcgcgggccttgcgcgactcgtaccggatctgcttgccgaacctgtgcgcaagcaagagcagcgagagctagcgacgtgagagcgactgtggtgtcgatcggagctaccactactccggctcgcccgctcacctcctgttcttccgcttctccttgtagcgcgagatcaccgtgccgcggtcggggtgggccacgtcgtagccgcccttcttttccgtcaccggcaccagcgccgtcgtggccaacagctgcggtcgcggggccgtttcctcgtctggcttgttgccgctattgtccacgtcgccgccgctgctgagcgtgacgctggcggggaagatctccgacatgtccacgaacgaggacaggcacggctcgtccggcgccggagcagcctgctcgcgcgcctcctccacctccacctccgcccggcgcgcgtcgacgtcacaggcggtcgcgatccacgcctcctgctcctgtcaccagttcatgcatgtcgttgcttagaaatttgatgagatcctgttgcccttggaaatatgtagtttagaattgccatatataaactagtagatgctgtaatgtgtgcagctgcagcagagaagtgactgaacactgaaccaaacctcgtgggaaggcactgctgcgaaagccatggtcgctgcatcatgccaggcggcgtcagcgtcagcagcgtcgagagccccgaagtctgcggcggctccaatgtcgagctccggcgacgcccatggaggcagctgctcgccgtcacccggctccagctccgcgtaagacgccgccacggccgccgcctccgacttggcgagctcctccagctgccggattaccacgtcagccagctcaccgccggagctccggttctaggtcgccatatcaagacaaccattagagaagaggaaaaagaatcccgttttttttttgtttggtttcatttaacaatggctcttgtagcagggcagcagccgaagcagcaccgtacctttggggacggcggtgcgaggagcggatggaggccatgacaagatgtggtaggaacgaccacgtcctccaagcacaccacctggggctcctcccaggtggaccaccaaccgacgtccccgcccgccgccgccgccttctcgtcgtacccggcgacgccgaggatggccgcgagctcggcgatcgaagggcacccggcgtactcttccaccgcgtcatggtcgtggtggagcggccgcgggtcccggtgctcctcccccttctcctcgtcctccttctccaagcagtagcagtcggcgcagacgaagccgccgccgccgccgcggggggacgcgacggcggtggcggcggctgcgcggcacctggcgcagagcggcgcccgggcgtggcgggtggacaccgtgttggcgccgtgcacgtggcggtcgcacggcaggcacagcctcgcggagtcggcccggcagtacaccacggccggcaggcccatgcagtagtcgcatctcggcgcctccttgctgccggccgcgtccgcgtcggacatggcttccgccacctgcggcggatcacggcagcggacaagacccccgggggatctggttgggacgagcgcgatttgttgcagtgaggacggaggaggcacaggattgatggcgcgaaagggagaggggacgatagaggcctacaactcgcacggtcgtcaccctcactcgtcgctactgtcttgtagttgttgtaggtcgatggtgggtgccagtacaaagacactctgtagtctgtagatggccatgcagcagcagcagcacgccgccccgtagttgagcgcgaagcccgctattttggctcagcgtttaccagagctgtatgtattctacatatatgtctactgttgatatttgattttctaaaggtgtcgaaaacaagttaagtatttggaccttcgtcctttgatttaatgcgtaggatgaaggttcttaaaggagatggaaataaaaacgataacatgccatataagccaaaaagataatatgtcatacaatttaatgaagagagatataagagagtttaac

SEQ ID NO: 22952 - DNA, 809 bp, Zea Mays
atgctgatgaccggaccggaagacaaaacatgccaaaattgtgttcagcattaaaggctgctggtggtagagctaatggagatggaacaaggaagacaaggacacgggaccggcctagggctgttccagctccagaggcaaacgccgaactgcaagcaaatattgataaaagaaggttaataactcatgcaaatgcgaagagcaagagtgaaaagttccctccgccgcatcaggatggcgcacttggatttcccttgggctgttcgaaccacatggaaccttcatttgaacccccagacccttcttccttcagcactgtatttccttacgaaaaaagcaccgtgccaacctggtccggaccattggcggactctgcagctggcaaccagaagcggaaacacaagtctggccgctcctcgaaacaaccagcaaccgcccgtgctagatgatacacatcatgccatgcttagtccaaaccaaatcttcaatacctcccaaagaaataccttgcagtggttcctacaaactgggatacctgattcggaatcaagagctacagcaatgaactgttttcttttcctcagatccattcatgtacgcattttttttcctgagcatcgagcaatgtataggctggagatggagctggattagtcagttatgtacattaggttctcttttccattcttacaagcagcaacatgtcagtttagatttattcgagtgaggaatggagctggtaggtcaacttagcaagctatcattctacatagatacttacaatcaattgaaatattttttacttttta

SEQ ID NO: 22953 - DNA, 703 bp, Zea Mays
aaaatcgaccgtcttcctcccaacccaagtgcaggaccgcgaacacgaggaggcaggggagcagcatccacaaccacaagccatggcggggaggactaacatccccactaacaactccgccctcatcgcaatcatcgccgacgaggacaccgtcactggcttcttgatggccggcgttggcaatgttgatctgcgcaagaaaaccaattacctcctcgtcgacaacaagacgacagttaaacaaatcgaggacgcgttcaaagaatttactgcaagggaggatattgctattgtgctcatcagtcagtatattgccaacatgataagatttctggtggatagctacaacaagccagtccctgctattctggagatcccatccaaggaccatccatatgatccagcgcacgactcggtgctgtctcgagtgaagtatctcttctctgcggaatcggtggcgtctgataggcgatgaaggcatccttgtgtagtagtaccctttggtgtatctgttttgttatgtattgaaaagaagtggcatgcgtccgagcgagacagcaaacaataataatggttgtggaaccaaaccaacacctttttttctttcataaaaggttggaatgctattttgttgctttgtactgtatttggttggttaatagagagtaataaaatgcgattgtcatgttgcacagtactgttt

SEQ ID NO: 22954 - DNA, 702 bp, Zea Mays
aaatcgaccgtcttcctcccaacccaagtggatgaccgcgaacacgaggaggcaggggagcagcatccacaaccacaagccatggcggggaggactaacatccccactaacaactccgccctcatcgcaatcatcgccgacgaggacaccgtcactggcttcttgatggccggcgttggcaatgttgatctgcgcaagaaaaccaattacctcctcgtcgacaacaagacgacagttaaacaaatcgaggacgcgttcaaagaatttactgcaagggaggatattgctattgtgctcatcagtcagtatattgccaacatgataagatttctggtggatagctacaacaagccagtccctgctattctggagatcccatccaaggaccatccatatgatccagcgcacgactcggtgctgtctcgagtgaagtatctcttctctgcggaatcggtggcgtctgataggcgatgaaggcatccttgtgtagtagtaccctttggtgtatctgttttgttatgtattgaaaagaagtggcatgcgtccgagcgagacagcaaacaataataatggttgtggaaccaaaccaacacctttttttctttcataaaaggttggaatgctattttgttgctttgtactgtatttggttggttaatagagagtaataaaatgcgattgtcatgttgcacagtactgttt

SEQ ID NO: 22955 - DNA, 6807 bp, Zea Mays
aaactactactcatctagaaagacaaaaaaaggcgtcaacttgaattcacctgtgataccgagtagtactccaccaatacatatccaacctcggtgctgcagagcaaagagaccaacaagtacaacacaggccatgaatacgatccatcctgtgcaaccagcaagttcgtcaagatgatgatatatttgtcgagaaaggaaaacaccgaatatagtttatagctcaatatttcccaaaccagttcttgctactactttatatatagattcatcgatggcagtgtttttaacattcgagtaagtttgaaaatttatacaactaggaaaaaaatattcgagcactgaatgaagtgatttttttggagtatttgagactccgcacctaacctaatttttttttgtctatgaatagccttacagacagccgtgggacacctttgaacgaaacggacatcagaacaggagtccgtgagtggaagctataggtagcacggagattgcacacgccacgtcagagtcccatcctgtccagcagcagcgcatagctggggggacaaatggttttgtcaagtattgatgaggcatgaaagaaaaggagaagatcagaagaagctggaggcagttgaaaacgccaagtccaagcaagaaacacgcgcaccaaatcctctgctcgtgtcaggcgtccccgcctgtcactcgcacgcgcacccattgccgagcggacattcgcttcgctctcctcctcaagcgaaaagcggcggggaaagggtcaaaaaaaaaaaaaaaaagacgcggagcagcccaaaggggaaaccagcgtccgtgcgaaacctcgagccggccgaggcagacaagggcaggggaggacagcgaagagagagagagagagaggggagaccggggggcaagcctgggaggggccgaggaggcccgcttacgaatctcgcgatccccaatccggaagcctcgattcgccgatccgggctcggccggggagagagggatcccgccgatcggggggcgctcgtgctgcaccgattcgagctcgctccctgctctgcccgcgcggggtgcgttcctgcggaggtccgcgccgggccggtagctgctgcgtgctgcctggtggctgctgctaggtaggtggttaggcggcggcaggaggatgcgggcggcggccgcgtagcgccagcgcaggcgcagcagccccggcatgggcgacgacgccgagctcgaggagggggaggcctgcgcctgcggggacgacaccgccttcgtcgaccccgatgtcgcgctctcttacattgacgaaaagcttcaagacatacttggccatttccagaaggacttcgaaggaggcgtttctgcagataatctagggtcaaaatttggtgcatatggttcatttttgcctacgtaccagcgctctcctcttcctcaaactagaagtccccctaaggcaggaaatattacctcaaaatctccctttcaccagtcgaatgaggacttgtctcagaaacctccagctgtggcagtttcatctaccccccaaagtaatggtcctgtggtgcctttttctggtgattcaattaaaaaggaaatacgcccatccacaaagtctgaaaggggttccgtctcccatgattcatatgggccatcaaaatgtagtgaccaaaacagacttaaagtccggataaaggttggctctgataatgttttggcaagaaataatgcagctatctacagtggcctgggccttgatatttcttcaccttcatcaaacgaggatagccctgatggccgtgggagcctgtcccctgaagttaacaatgtgccacatgaatctccacaaaccattcttcagatcatgacatgcttttcagttcctggaggcttcctgttatcccctctaccagccaatatcttgcagttgacaaaaaaggtcgtgtcttcatcaaagaagtgggaatcaaatgtggatgtagaaaatgtacaagaatcatatgaaggccatgtggctaaaagggtgaaatctgatggtaacaaaaagaggctgatagatgcaaaaaattcaaagaacaaaaatgatattagtgcagttatgaaaaaggagattgatatggaattagttgctggtcaaaagatagtatctgaagctcttaaaatatcattgctgtctgaccccagagctatggatgcaaaaggtgagaatcgtcttgaagaggagccagcagaaaacaacttggttggaattagagatgctcgattgaaagagcggtgcaccaagactgactccatgacagtcaaagtggaacctgccaaagcagaggtgatggaatgtttagagaacagtagttttggcagttcagaaatggatctttcagcagtgaaagggaaatcaaaacccaagacagaaaagggtgaggcaactttagaagataggaatacaactaatgacaaagacctaatatcagataggaagcaaaaaaagaaaataaaatctgggagtaaatataatgcctctaactttgaaggtagcattagcaatgttataaacgaaggagcttcagctgttttccacatgggaaaaatttctggtctagaagctttgccttatgacacaaatggggaaaataattccaagagtgaggtcaaaaaaatgcagagagaacaaaaggccaatgtttcgacgtcttctgatttcctggaggaggagaaacacattcattcttctgctgcagttaaggagagaagtgacatgcaatcaaaacctatccatactggaaagaaacccaaagcaaaatcacatagagatgttagggacaacaattttcctgaaggatcttatggaagcaaggaacaggattcattggagaataaaagtgcctttggagatccccggccaaaggaaaaaccatggaagtttgacagcgaggactctgatgcacctgggatctcgaggaaggatagttcttatgtaaagcttgacaaacacctggctactgaggagcagaagatgcatatacttccacctgccactgcttcaactgcgaatgcagcttttatacatgcagccccagtcgtaatagaggaacattgggtgtgctgtgacatatgccagaaatggcgtctcctaccttatgaaatgaatccttcagatcttcctaagaagtggaaatgtagcatgctacagtggctacctgggatgaataggtgtgagattagtgaagaggagactacaaatgctctgaatgcactgtatgtccctgcccctgcaaatggtattccttcagttggccttcctcatgttgcttcatcaggactagtaacatccagcactcccaatatgaatggacatattgagcagagtaggaaaagaaagaatgttctaagtgatggaaattttgtggctgagggttctcaccaaacacagggttcaggtcatccaatgagcaaccaacatgctcccaataaaagtaaaactcatactgatggtatccagtatcctattgatagagattctgtaagcaaatcagttgacccaacaattaaaaagcaaaggtccaaaagcaaacatcacagtagctattctgatggagtagatcttgttgaaagacctaagaagcattctaaagtaaaaagcaagagagacttggatcgtgatgaatacaaagcttctaaaaaaatcaggaaagaagagcgccattttgatagagatcggaaccttggatccggtttagctagtcgtgatgttcccgatgaggccaaggcttttcctgtgaagtcagtaacgtcaaagggttcaggtgaaaggagtgatctttcttcatcaaagcaaaaaaatgtctcacatcataaccatttggaaaattccaagaaagcaaggcaagattatgtaggttttcctgaagacgagagcaaggaatattttcaccagtcagatgtgcaaagatcagatttgtctagtaagaagaggatagtgaagaaatgggaggagagtcagtacaatccagtagctcaggtaagcaaaggagctatcaaggaaacctatagggatcagaacttaaaggaagcaaagttgatgtcattgaattctgaagaactgttttctatgacgagctccaaaccaccgaaagctcaacatgctgatcaggttttgttttatgatggggggcgtacgaacagcgagttagttgaggataacacacactttagtggcaaaacaggtctccctgagcaagaaaatagtctttctgataaggctttagacttgggcaaacctgctagtgatgtggcctatattcagacttcagctgtaacttcaagttcttcaaaggcttcagtctcacaaaaaaagaagcagaccactcaagctatgaagacatcgtcaattgagtctctttctttgtcaccacagagaaactctaacattgacaatgtctctgcctctcatagtagagtttcaggtaaggatggatctctgaatgctaactcaagcactgtgccggccatggcaaaacaactaaatactcaagttggtgtagcagtcaatgatcaatggtctagtgaacctattttggttggttcttcccgaagaaaatctgatagagataatggacaggttcagttaactcaaggtcatgcctctgatggtattcatcctgaaaggggtttgaatgaggacctgcagcctgaatctgggagaaaggattccaatataaaaaactcccatattcctaaaagttctaaccatttgcattctggtgaaaaaaataactataatacagatggctctcctatgcaaccaggaaagcatcttgttgatccaaagacaccagtcttggataaaggtgattcaagtatgcatgaaaataagaaaagtgcaaattctcttcaagatagaaatggatcaactcattgcccaccagatggaaatcctctgctcggtttaccatctggaaaagagaaatcatatctcaaaaacaacaggcaagattcacagaagcctaaaccccagatctcacctctgaaagaaagcaaattggattcccattccactccattaaaacctaatgggtcaaaattgactccacaatcaagacaatacaatgctgaaaatggagggcgacatggcactgcaaaacaagcaattcgtagtcctgctgatacttttagtccagctaggaaggacaatacttcaactgcgtatgctctcaaagaagcccgtgatttaaagcataaggctaatcgtttgaaggaagaaggaaaagagcttgaaagtacaagactctactttgactccgccttaaaatttttgcatgttgcatcacttttggaacctcctagctttgatggtttgaaacaaggcgatgcagcccagagcatgtattcagatactgcaaaactttgcaactttgttggtcacgcgtatgaaaaatgcaagaagatggctgctgctgctttagcatacaagtgtgttgaagttgcttatctgaaggctgcatactgcaagcacccaactgcaagcaaggatagacaagtgttacaggcagttgtacagactgctccaggtgaatcaccatcatcttcagcctcagacattgataatttaaataacaatggattatccaagggcccttcaagcaaggatgccaattcaccacaagtggttggaaatcatttgttgctggccactcgaaatcaaccacacttgatgcggttactagcttatacaaatgatgtcaatagtgcctttgaggctactcggaagtctcacatggcaattgcttctgcttctggcaatcacgaaaatggagttgatggtctttcttcagtaaaaacagtgctggattttaacttccgaagtgtgaatgatctactaagcatgaagctgaatataatccaacagtgcaaaagcataggtctttcatttgagcttgctggtcaacttgtacagagagtgatcatatttcttctttttttacgttgattacacccaattagtatatatagttgcatacccacttggatgatttagttagtgaggaacacaagtgaagatgagctttgcactgttcaatgcttctgcttggaagaaggatgctcttgtggccgcagttcgttgttatctggaaagtggcttgctactgagcattctcttactacatgatgtaaattgtgaatctccatcaaggctggcttatggctgaagaggagaggacagcaaagccagctaatctcgctatccaagaaatcggctagtagttttttcccttttgaaccttgtcacgatgccttgtcttctggataaagttcacgcaggtttcaaataagaaatcacatggactatcagacttgtatggaatatggatgctgtacaaagatttctaatgtacattagtctaactttttttttcgtgatccccgaaatgccgactatcaccagcgcatgtacatgtatatatacatacaataaaggttggggcatttttaccacgtgctggtctctatgtatgacgcctttggttccgtccaacttttagtctttcacatttttgaaattttgtgacattctagttttttgttaggatagcgtctagtactgggaatttgttgcagaatgcaaaataaattccgtgctgtacaacttgtagccgagtttcaggtcgtcgagtgaagtgatggtaactgctcgccgaatttgcactatgcggtctgtggatagctacttgaatgaaaagtttgtttccacatatcaagtcgatggtgcctgatgctgctgcactttgcaggcttcaaattgattggaac

SEQ ID NO: 22956 - DNA, 6729 bp, Zea Mays
aaactactactcatctagaaagacaaaaaaaggcgtcaacttgaattcacctgtgataccgagtagtactccaccaatacatatccaacctcggtgctgcagagcaaagagaccaacaagtacaacacaggccatgaatacgatccatcctgtgcaaccagcaagttcgtcaagatgatgatatatttgtcgagaaaggaaaacaccgaatatagtttatagctcaatatttcccaaaccagttcttgctactactttatatatagattcatcgatggcagtgtttttaacattcgagtaagtttgaaaatttatacaactaggaaaaaaatattcgagcactgaatgaagtgatttttttggagtatttgagactccgcacctaacctaatttttttttgtctatgaatagccttacagacagccgtgggacacctttgaacgaaacggacatcagaacaggagtccgtgagtggaagctataggtagcacggagattgcacacgccacgtcagagtcccatcctgtccagcagcagcgcatagctggggggacaaatggttttgtcaagtattgatgaggcatgaaagaaaaggagaagatcagaagaagctggaggcagttgaaaacgccaagtccaagcaagaaacacgcgcaccaaatcctctgctcgtgtcaggcgtccccgcctgtcactcgcacgcgcacccattgccgagcggacattcgcttcgctctcctcctcaagcgaaaagcggcggggaaagggtcaaaaaaaaaaaaaaaaagacgcggagcagcccaaaggggaaaccagcgtccgtgcgaaacctcgagccggccgaggcagacaagggcaggggaggacagcgaagagagagagagagagaggggagaccggggggcaagcctgggaggggccgaggaggcccgcttacgaatctcgcgatccccaatccggaagcctcgattcgccgatccgggctcggccggggagagagggatcccgccgatcggggggcgctcgtgctgcaccgattcgagctcgctccctgctctgcccgcgcggggtgcgttcctgcggaggtccgcgccgggccggtagctgctgcgtgctgcctggtggctgctgctaggtaggtggttaggcggcggcaggaggatgcgggcggcggccgcgtagcgccagcgcaggcgcagcagccccggcatgggcgacgacgccgagctcgaggagggggaggcctgcgcctgcggggacgacaccgccttcgtcgaccccgatgtcgcgctctcttacattgacgaaaagcttcaagacatacttggccatttccagaaggacttcgaaggaggcgtttctgcagataatctagggtcaaaatttggtgcatatggttcatttttgcctacgtaccagcgctctcctcttcctcaaactagaagtccccctaaggcaggaaatattacctcaaaatctccctttcaccagtcgaatgaggacttgtctcagaaacctccagctgtggcagtttcatctaccccccaaagtaatggtcctgtggtgcctttttctggtgattcaattaaaaaggaaatacgcccatccacaaagtctgaaaggggttccgtctcccatgattcatatgggccatcaaaatgtagtgaccaaaacagacttaaagtccggataaaggttggctctgataatgttttggcaagaaataatgcagctatctacagtggcctgggccttgatatttcttcaccttcatcaaacgaggatagccctgatggccgtgggagcctgtcccctgaagttaacaatgtgccacatgaatctccacaaaccattcttcagatcatgacatgcttttcagttcctggaggcttcctgttatcccctctaccagccaatatcttgcagttgacaaaaaaggtcgtgtcttcatcaaagaagtgggaatcaaatgtggatgtagaaaatgtacaagaatcatatgaaggccatgtggctaaaagggtgaaatctgatggtaacaaaaagaggctgatagatgcaaaaaattcaaagaacaaaaatgatattagtgcagttatgaaaaaggagattgatatggaattagttgctggtcaaaagatagtatctgaagctcttaaaatatcattgctgtctgaccccagagctatggatgcaaaaggtgagaatcgtcttgaagaggagccagcagaaaacaacttggttggaattagagatgctcgattgaaagagcggtgcaccaagactgactccatgacagtcaaagtggaacctgccaaagcagaggtgatggaatgtttagagaacagtagttttggcagttcagaaatggatctttcagcagtgaaagggaaatcaaaacccaagacagaaaagggtgaggcaactttagaagataggaatacaactaatgacaaagacctaatatcagataggaagcaaaaaaagaaaataaaatctgggagtaaatataatgcctctaactttgaaggtagcattagcaatgttataaacgaaggagcttcagctgttttccacatgggaaaaatttctggtctagaagctttgccttatgacacaaatggggaaaataattccaagagtgaggtcaaaaaaatgcagagagaacaaaaggccaatgtttcgacgtcttctgatttcctggaggaggagaaacacattcattcttctgctgcagttaaggagagaagtgacatgcaatcaaaacctatccatactggaaagaaacccaaagcaaaatcacatagagatgttagggacaacaattttcctgaaggatcttatggaagcaaggaacaggattcattggagaataaaagtgcctttggagatccccggccaaaggaaaaaccatggaagtttgacagcgaggactctgatgcacctgggatctcgaggaaggatagttcttatgtaaagcttgacaaacacctggctactgaggagcagaagatgcatatacttccacctgccactgcttcaactgcgaatgcagcttttatacatgcagccccagtcgtaatagaggaacattgggtgtgctgtgacatatgccagaaatggcgtctcctaccttatgaaatgaatccttcagatcttcctaagaagtggaaatgtagcatgctacagtggctacctgggatgaataggtgtgagattagtgaagaggagactacaaatgctctgaatgcactgtatgtccctgcccctgcaaatggtattccttcagttggccttcctcatgttgcttcatcaggactagtaacatccagcactcccaatatgaatggacatattgagcagagtaggaaaagaaagaatgttctaagtgatggaaattttgtggctgagggttctcaccaaacacagggttcaggtcatccaatgagcaaccaacatgctcccaataaaagtaaaactcatactgatggtatccagtatcctattgatagagattctgtaagcaaatcagttgacccaacaattaaaaagcaaaggtccaaaagcaaacatcacagtagctattctgatggagtagatcttgttgaaagacctaagaagcattctaaagtaaaaagcaagagagacttggatcgtgatgaatacaaagcttctaaaaaaatcaggaaagaagagcgccattttgatagagatcggaaccttggatccggtttagctagtcgtgatgttcccgatgaggccaaggcttttcctgtgaagtcagtaacgtcaaagggttcaggtgaaaggagtgatctttcttcatcaaagcaaaaaaatgtctcacatcataaccatttggaaaattccaagaaagcaaggcaagattatgtaggttttcctgaagacgagagcaaggaatattttcaccagtcagatgtgcaaagatcagatttgtctagtaagaagaggatagtgaagaaatgggaggagagtcagtacaatccagtagctcaggtaagcaaaggagctatcaaggaaacctatagggatcagaacttaaaggaagcaaagttgatgtcattgaattctgaagaactgttttctatgacgagctccaaaccaccgaaagctcaacatgctgatcaggttttgttttatgatggggggcgtacgaacagcgagttagttgaggataacacacactttagtggcaaaacaggtctccctgagcaagaaaatagtctttctgataaggctttagacttgggcaaacctgctagtgatgtggcctatattcagacttcagctgtaacttcaagttcttcaaaggcttcagtctcacaaaaaaagaagcagaccactcaagctatgaagacatcgtcaattgagtctctttctttgtcaccacagagaaactctaacattgacaatgtctctgcctctcatagtagagtttcagtcaatgatcaatggtctagtgaacctattttggttggttcttcccgaagaaaatctgatagagataatggacaggttcagttaactcaaggtcatgcctctgatggtattcatcctgaaaggggtttgaatgaggacctgcagcctgaatctgggagaaaggattccaatataaaaaactcccatattcctaaaagttctaaccatttgcattctggtgaaaaaaataactataatacagatggctctcctatgcaaccaggaaagcatcttgttgatccaaagacaccagtcttggataaaggtgattcaagtatgcatgaaaataagaaaagtgcaaattctcttcaagatagaaatggatcaactcattgcccaccagatggaaatcctctgctcggtttaccatctggaaaagagaaatcatatctcaaaaacaacaggcaagattcacagaagcctaaaccccagatctcacctctgaaagaaagcaaattggattcccattccactccattaaaacctaatgggtcaaaattgactccacaatcaagacaatacaatgctgaaaatggagggcgacatggcactgcaaaacaagcaattcgtagtcctgctgatacttttagtccagctaggaaggacaatacttcaactgcgtatgctctcaaagaagcccgtgatttaaagcataaggctaatcgtttgaaggaagaaggaaaagagcttgaaagtacaagactctactttgactccgccttaaaatttttgcatgttgcatcacttttggaacctcctagctttgatggtttgaaacaaggcgatgcagcccagagcatgtattcagatactgcaaaactttgcaactttgttggtcacgcgtatgaaaaatgcaagaagatggctgctgctgctttagcatacaagtgtgttgaagttgcttatctgaaggctgcatactgcaagcacccaactgcaagcaaggatagacaagtgttacaggcagttgtacagactgctccaggtgaatcaccatcatcttcagcctcagacattgataatttaaataacaatggattatccaagggcccttcaagcaaggatgccaattcaccacaagtggttggaaatcatttgttgctggccactcgaaatcaaccacacttgatgcggttactagcttatacaaatgatgtcaatagtgcctttgaggctactcggaagtctcacatggcaattgcttctgcttctggcaatcacgaaaatggagttgatggtctttcttcagtaaaaacagtgctggattttaacttccgaagtgtgaatgatctactaagtagcatgaagctgaatataatccaacagtgcaaaagcataggtctttcatttgagcttgctggtcaacttgtacagagagtgatcatatttcttctttttttacgttgattacacccaattagtatatatagttgcatacccacttggatgatttagttagtgaggaacacaagtgaagatgagctttgcactgttcaatgcttctgcttggaagaaggatgctcttgtggccgcagttcgttgttatctggaaagtggcttgctactgagcattctcttactacatgatgtaaattgtgaatctccatcaaggctggcttatggctgaagaggagaggacagcaaagccagctaatctcgctatccaagaaatcggctagtagttttttcccttttgaaccttgtcacgatgccttgtcttctggataaagttcacgcaggtttcaaataagaaatcacatggactatcagacttgtatggaatatggatgctgtacaaagatttctaatgtacattagtctaactttttttttcgtgatccccgaaatgccgactatcaccagcgcatgtacatgtatatatacatacaataaaggttggggcatttttaccacgtgctggtctctatgtatgacgcctttggttccgtccaacttttagtctttcacatttttgaaattttgtgacattctagttttttgttaggatagcgtctagtactgggaatttgttgcagaatgcaaaataaattccgtgctgtacaacttgtagccgagtttcaggtcgtcgagtgaagtgatggtaactgctcgccgaatttgcactatgcggtctgtggatagctacttgaatgaaaagtttgtttccacatatcaagtcgatggtgcctgatgctgctgcactttgcaggcttcaaattgattggaac

SEQ ID NO: 22957 - DNA, 5246 bp, Zea Mays
cacgcgcacccattgccgagcggacattcgcttcgctctcctcctcaagcgaaaagcggcggggaaagggtcaaaaaaaaaaaaaaaaagacgcggagcagcccaaaggggaaaccagcgtccgtgcgaaacctcgagccggccgaggcagacaagggcaggggaggacagcgaagagagagagagagagaggggagaccggggggcaagcctgggaggggccgaggaggcccgcttacgaatctcgcgatccccaatccggaagcctcgattcgccgatccgggctcggccggggagagagggatcccgccgatcggggggcgctcgtgctgcaccgattcgagctcgctccctgctctgcccgcgcggggtgcgttcctgcggaggtccgcgccgggccggtagctgctgcgtgctgcctggtggctgctgctaggtaggtggttaggcggcggcaggaggatgcgggcggcggccgcgtagcgccagcgcaggcgcagcagccccggcatgggcgacgacgccgagctcgaggagggggaggcctgcgcctgcggggacgacaccgccttcgtcgaccccgatgtcgcgctctcttacattgacgaaaagcttcaagacatacttggccatttccagaaggacttcgaaggaggcgtttctgcagataatctagggtcaaaatttggtgcatatggttcatttttgcctacgtaccagcgctctcctcttcctcaaactagaagtccccctaaggcaggaaatattacctcaaaatctccctttcaccagtcgaatgaggacttgtctcagaaacctccagctgtggcagtttcatctaccccccaaagtaatggtcctgtggtgcctttttctggtgattcaattaaaaaggaaatacgcccatccacaaagtctgaaaggggttccgtctcccatgattcatatgggccatcaaaatgtagtgaccaaaacagacttaaagtccggataaaggttggctctgataatgttttggcaagaaataatgcagctatctacagtggcctgggccttgatatttcttcaccttcatcaaacgaggatagccctgatggccgtgggagcctgtcccctgaagttaacaatgtgccacatgaatctccacaaaccattcttcagatcatgacatgcttttcagttcctggaggcttcctgttatcccctctaccagccaatatcttgcagttgacaaaaaaggtcgtgtcttcatcaaagaagtgggaatcaaatgtggatgtagaaaatgtacaagaatcatatgaaggccatgtggctaaaagggtgaaatctgatggtaacaaaaagaggctgatagatgcaaaaaattcaaagaacaaaaatgatattagtgcagttatgaaaaaggagattgatatggaattagttgctggtcaaaagatagtatctgaagctcttaaaatatcattgctgtctgaccccagagctatggatgcaaaaggtgagaatcgtcttgaagaggagccagcagaaaacaacttggttggaattagagatgctcgattgaaagagcggtgcaccaagactgactccatgacagtcaaagtggaacctgccaaagcagaggtgatggaatgtttagagaacagtagttttggcagttcagaaatggatctttcagcagtgaaagggaaatcaaaacccaagacagaaaagggtgaggcaactttagaagataggaatacaactaatgacaaagacctaatatcagataggaagcaaaaaaagaaaataaaatctgggagtaaatataatgcctctaactttgaaggtagcattagcaatgttataaacgaaggagcttcagctgttttccacatgggaaaaatttctggtctagaagctttgccttatgacacaaatggggaaaataattccaagagtgaggtcaaaaaaatgcagagagaacaaaaggccaatgtttcgacgtcttctgatttcctggaggaggagaaacacattcattcttctgctgcagttaaggagagaagtgacatgcaatcaaaacctatccatactggaaagaaacccaaagcaaaatcacatagagatgttagggacaacaattttcctgaaggatcttatggaagcaaggaacaggattcattggagaataaaagtgcctttggagatccccggccaaaggaaaaaccatggaagtttgacagcgaggactctgatgcacctgggatctcgaggaaggatagttcttatgtaaagcttgacaaacacctggctactgaggagcagaagatgcatatacttccacctgccactgcttcaactgcgaatgcagcttttatacatgcagccccagtcgtaatagaggaacattgggtgtgctgtgacatatgccagaaatggcgtctcctaccttatgaaatgaatccttcagatcttcctaagaagtggaaatgtagcatgctacagtggctacctgggatgaataggtgtgagattagtgaagaggagactacaaatgctctgaatgcactgtatgtccctgcccctgcaaatggtattccttcagttggccttcctcatgttgcttcatcaggactagtaacatccagcactcccaatatgaatggacatattgagcagagtaggaaaagaaagaatgttctaagtgatggaaattttgtggctgagggttctcaccaaacacagggttcaggtcatccaatgagcaaccaacatgctcccaataaaagtaaaactcatactgatggtatccagtatcctattgatagagattctgtaagcaaatcagttgacccaacaattaaaaagcaaaggtccaaaagcaaacatcacagtagctattctgatggagtagatcttgttgaaagacctaagaagcattctaaagtaaaaagcaagagagacttggatcgtgatgaatacaaagcttctaaaaaaatcaggaaagaagagcgccattttgatagagatcggaaccttggatccggtttagctagtcgtgatgttcccgatgaggccaaggcttttcctgtgaagtcagtaacgtcaaagggttcaggtgaaaggagtgatctttcttcatcaaagcaaaaaaatgtctcacatcataaccatttggaaaattccaagaaagcaaggcaagattatgtaggttttcctgaagacgagagcaaggaatattttcaccagtcagatgtgcaaagatcagatttgtctagtaagaagaggatagtgaagaaatgggaggagagtcagtacaatccagtagctcaggtaagcaaaggagctatcaaggaaacctatagggatcagaacttaaaggaagcaaagttgatgtcattgaattctgaagaactgttttctatgacgagctccaaaccaccgaaagctcaacatgctgatcaggttttgttttatgatggggggcgtacgaacagcgagttagttgaggataacacacactttagtggcaaaacaggtctccctgagcaagaaaatagtctttctgataaggctttagacttgggcaaacctgctagtgatgtggcctatattcagacttcagctgtaacttcaagttcttcaaaggcttcagtctcacaaaaaaagaagcagaccactcaagctatgaagacatcgtcaattgagtctctttctttgtcaccacagagaaactctaacattgacaatgtctctgcctctcatagtagagtttcaggtaaggatggatctctgaatgctaactcaagcactgtgccggccatggcaaaacaactaaatactcaagttggtgtagcagtcaatgatcaatggtctagtgaacctattttggttggttcttcccgaagaaaatctgatagagataatggacaggttcagttaactcaaggtcatgcctctgatggtattcatcctgaaaggggtttgaatgaggacctgcagcctgaatctgggagaaaggattccaatataaaaaactcccatattcctaaaagttctaaccatttgcattctggtgaaaaaaataactataatacagatggctctcctatgcaaccaggaaagcatcttgttgatccaaagacaccagtcttggataaaggtgattcaagtatgcatgaaaataagaaaagtgcaaattctcttcaagatagaaatggatcaactcattgcccaccagatggaaatcctctgctcggtttaccatctggaaaagagaaatcatatctcaaaaacaacaggcaagattcacagaagcctaaaccccagatctcacctctgaaagaaagcaaattggattcccattccactccattaaaacctaatgggtcaaaattgactccacaatcaagacaatacaatgctgaaaatggagggcgacatggcactgcaaaacaagcaattcgtagtcctgctgatacttttagtccagctaggaaggacaatacttcaactgcgtatgctctcaaagaagcccgtgatttaaagcataaggctaatcgtttgaaggaagaaggaaaagagcttgaaagtacaagactctactttgactccgccttaaaatttttgcatgttgcatcacttttggaacctcctagctttgatggtttgaaacaaggcgatgcagcccagagcatgtattcagatactgcaaaactttgcaactttgttggtcacgcgtatgaaaaatgcaagaagatggctgctgctgctttagcatacaagtgtgttgaagttgcttatctgaaggctgcatactgcaagcacccaactgcaagcaaggatagacaagtgttacaggcagttgtacagactgctccaggagagctgcatttcattaaataagaaggtgaaccccaaaatggggcggtacaaaagtggggtggcattttacggcggccaacgccttacatagacaaacttatccataagactgggaaacaactcagccctcagccctaggggctccagcaaggcgccagttagtggcatcttcgctaatctcccgcaccactttagagatatctgcagccccttcatcgaacacacagtaattccacctgcttcataggtagtttgatatcttcataggtagttgaaactcaaaataatgcacctgcttacaacatgctttagttttcatgatttcgaagatggttcataatctgtggactatgcaatataaaatgttttgttagta

SEQ ID NO: 22958 - DNA, 5512 bp, Zea Mays
cacgcgcacccattgccgagcggacattcgcttcgctctcctcctcaagcgaaaagcggcggggaaagggtcaaaaaaaaaaaaaaaaagacgcggagcagcccaaaggggaaaccagcgtccgtgcgaaacctcgagccggccgaggcagacaagggcaggggaggacagcgaagagagagagagagagaggggagaccggggggcaagcctgggaggggccgaggaggcccgcttacgaatctcgcgatccccaatccggaagcctcgattcgccgatccgggctcggccggggagagagggatcccgccgatcggggggcgctcgtgctgcaccgattcgagctcgctccctgctctgcccgcgcggggtgcgttcctgcggaggtccgcgccgggccggtagctgctgcgtgctgcctggtggctgctgctaggtaggtggttaggcggcggcaggaggatgcgggcggcggccgcgtagcgccagcgcaggcgcagcagccccggcatgggcgacgacgccgagctcgaggagggggaggcctgcgcctgcggggacgacaccgccttcgtcgaccccgatgtcgcgctctcttacattgacgaaaagcttcaagacatacttggccatttccagaaggacttcgaaggaggcgtttctgcagataatctagggtcaaaatttggtgcatatggttcatttttgcctacgtaccagcgctctcctcttcctcaaactagaagtccccctaaggcaggaaatattacctcaaaatctccctttcaccagtcgaatgaggacttgtctcagaaacctccagctgtggcagtttcatctaccccccaaagtaatggtcctgtggtgcctttttctggtgattcaattaaaaaggaaatacgcccatccacaaagtctgaaaggggttccgtctcccatgattcatatgggccatcaaaatgtagtgaccaaaacagacttaaagtccggataaaggttggctctgataatgttttggcaagaaataatgcagctatctacagtggcctgggccttgatatttcttcaccttcatcaaacgaggatagccctgatggccgtgggagcctgtcccctgaagttaacaatgtgccacatgaatctccacaaaccattcttcagatcatgacatgcttttcagttcctggaggcttcctgttatcccctctaccagccaatatcttgcagttgacaaaaaaggtcgtgtcttcatcaaagaagtgggaatcaaatgtggatgtagaaaatgtacaagaatcatatgaaggccatgtggctaaaagggtgaaatctgatggtaacaaaaagaggctgatagatgcaaaaaattcaaagaacaaaaatgatattagtgcagttatgaaaaaggagattgatatggaattagttgctggtcaaaagatagtatctgaagctcttaaaatatcattgctgtctgaccccagagctatggatgcaaaaggtgagaatcgtcttgaagaggagccagcagaaaacaacttggttggaattagagatgctcgattgaaagagcggtgcaccaagactgactccatgacagtcaaagtggaacctgccaaagcagaggtgatggaatgtttagagaacagtagttttggcagttcagaaatggatctttcagcagtgaaagggaaatcaaaacccaagacagaaaagggtgaggcaactttagaagataggaatacaactaatgacaaagacctaatatcagataggaagcaaaaaaagaaaataaaatctgggagtaaatataatgcctctaactttgaaggtagcattagcaatgttataaacgaaggagcttcagctgttttccacatgggaaaaatttctggtctagaagctttgccttatgacacaaatggggaaaataattccaagagtgaggtcaaaaaaatgcagagagaacaaaaggccaatgtttcgacgtcttctgatttcctggaggaggagaaacacattcattcttctgctgcagttaaggagagaagtgacatgcaatcaaaacctatccatactggaaagaaacccaaagcaaaatcacatagagatgttagggacaacaattttcctgaaggatcttatggaagcaaggaacaggattcattggagaataaaagtgcctttggagatccccggccaaaggaaaaaccatggaagtttgacagcgaggactctgatgcacctgggatctcgaggaaggatagttcttatgtaaagcttgacaaacacctggctactgaggagcagaagatgcatatacttccacctgccactgcttcaactgcgaatgcagcttttatacatgcagccccagtcgtaatagaggaacattgggtgtgctgtgacatatgccagaaatggcgtctcctaccttatgaaatgaatccttcagatcttcctaagaagtggaaatgtagcatgctacagtggctacctgggatgaataggtgtgagattagtgaagaggagactacaaatgctctgaatgcactgtatgtccctgcccctgcaaatggtattccttcagttggccttcctcatgttgcttcatcaggactagtaacatccagcactcccaatatgaatggacatattgagcagagtaggaaaagaaagaatgttctaagtgatggaaattttgtggctgagggttctcaccaaacacagggttcaggtcatccaatgagcaaccaacatgctcccaataaaagtaaaactcatactgatggtatccagtatcctattgatagagattctgtaagcaaatcagttgacccaacaattaaaaagcaaaggtccaaaagcaaacatcacagtagctattctgatggagtagatcttgttgaaagacctaagaagcattctaaagtaaaaagcaagagagacttggatcgtgatgaatacaaagcttctaaaaaaatcaggaaagaagagcgccattttgatagagatcggaaccttggatccggtttagctagtcgtgatgttcccgatgaggccaaggcttttcctgtgaagtcagtaacgtcaaagggttcaggtgaaaggagtgatctttcttcatcaaagcaaaaaaatgtctcacatcataaccatttggaaaattccaagaaagcaaggcaagattatgtaggttttcctgaagacgagagcaaggaatattttcaccagtcagatgtgcaaagatcagatttgtctagtaagaagaggatagtgaagaaatgggaggagagtcagtacaatccagtagctcaggtaagcaaaggagctatcaaggaaacctatagggatcagaacttaaaggaagcaaagttgatgtcattgaattctgaagaactgttttctatgacgagctccaaaccaccgaaagctcaacatgctgatcaggttttgttttatgatggggggcgtacgaacagcgagttagttgaggataacacacactttagtggcaaaacaggtctccctgagcaagaaaatagtctttctgataaggctttagacttgggcaaacctgctagtgatgtggcctatattcagacttcagctgtaacttcaagttcttcaaaggcttcagtctcacaaaaaaagaagcagaccactcaagctatgaagacatcgtcaattgagtctctttctttgtcaccacagagaaactctaacattgacaatgtctctgcctctcatagtagagtttcaggtaaggatggatctctgaatgctaactcaagcactgtgccggccatggcaaaacaactaaatactcaagttggtgtagcagtcaatgatcaatggtctagtgaacctattttggttggttcttcccgaagaaaatctgatagagataatggacaggttcagttaactcaaggtcatgcctctgatggtattcatcctgaaaggggtttgaatgaggacctgcagcctgaatctgggagaaaggattccaatataaaaaactcccatattcctaaaagttctaaccatttgcattctggtgaaaaaaataactataatacagatggctctcctatgcaaccaggaaagcatcttgttgatccaaagacaccagtcttggataaaggtgattcaagtatgcatgaaaataagaaaagtgcaaattctcttcaagatagaaatggatcaactcattgcccaccagatggaaatcctctgctcggtttaccatctggaaaagagaaatcatatctcaaaaacaacaggcaagattcacagaagcctaaaccccagatctcacctctgaaagaaagcaaattggattcccattccactccattaaaacctaatgggtcaaaattgactccacaatcaagacaatacaatgctgaaaatggagggcgacatggcactgcaaaacaagcaattcgtagtcctgctgatacttttagtccagctaggaaggacaatacttcaactgcgtatgctctcaaagaagcccgtgatttaaagcataaggctaatcgtttgaaggaagaaggaaaagagcttgaaagtacaagactctactttgactccgccttaaaatttttgcatgttgcatcacttttggaacctcctagctttgatggtttgaaacaaggcgatgcagcccagagcatgtattcagatactgcaaaactttgcaactttgttggtcacgcgtatgaaaaatgcaagaagatggctgctgctgctttagcatacaagtgtgttgaagttgcttatctgaaggctgcatactgcaagcacccaactgcaagcaaggatagacaagtgttacaggcagttgtacagactgctccagacaaatgatgtcaatagtgcctttgaggctactcggaagtctcacatggcaattgcttctgcttctggcaatcacgaaaatggagttgatggtctttcttcagtaaaaacagtgctggattttaacttccgaagtgtgaatgatctactaagcatgaagctgaatataatccaacagtgcaaaagcataggtctttcatttgagcttgctggtcaacttgtacagagagtgatcatatttcttctttttttacgttgattacacccaattagtatatatagttgcatacccacttggatgatttagttagtgaggaacacaagtgaagatgagctttgcactgttcaatgcttctgcttggaagaaggatgctcttgtggccgcagttcgttgttatctggaaagtggcttgctactgagcattctcttactacatgatgtaaattgtgaatctccatcaaggctggcttatggctgaagaggagaggacagcaaagccagctaatctcgctatccaagaaatcggctagtagttttttcccttttgaaccttgtcacgatgccttgtcttctggataaagttcacgcagatctgctgctatggtgcgaagtaaaaaaaaaaagtgaccaggaagagcatctgc

SEQ ID NO: 22959 - DNA, 5709 bp, Zea Mays
cacgcgcacccattgccgagcggacattcgcttcgctctcctcctcaagcgaaaagcggcggggaaagggtcaaaaaaaaaaaaaaaaagacgcggagcagcccaaaggggaaaccagcgtccgtgcgaaacctcgagccggccgaggcagacaagggcaggggaggacagcgaagagagagagagagagaggggagaccggggggcaagcctgggaggggccgaggaggcccgcttacgaatctcgcgatccccaatccggaagcctcgattcgccgatccgggctcggccggggagagagggatcccgccgatcggggggcgctcgtgctgcaccgattcgagctcgctccctgctctgcccgcgcggggtgcgttcctgcggaggtccgcgccgggccggtagctgctgcgtgctgcctggtggctgctgctaggtaggtggttaggcggcggcaggaggatgcgggcggcggccgcgtagcgccagcgcaggcgcagcagccccggcatgggcgacgacgccgagctcgaggagggggaggcctgcgcctgcggggacgacaccgccttcgtcgaccccgatgtcgcgctctcttacattgacgaaaagcttcaagacatacttggccatttccagaaggacttcgaaggaggcgtttctgcagataatctagggtcaaaatttggtgcatatggttcatttttgcctacgtaccagcgctctcctcttcctcaaactagaagtccccctaaggcaggaaatattacctcaaaatctccctttcaccagtcgaatgaggacttgtctcagaaacctccagctgtggcagtttcatctaccccccaaagtaatggtcctgtggtgcctttttctggtgattcaattaaaaaggaaatacgcccatccacaaagtctgaaaggggttccgtctcccatgattcatatgggccatcaaaatgtagtgaccaaaacagacttaaagtccggataaaggttggctctgataatgttttggcaagaaataatgcagctatctacagtggcctgggccttgatatttcttcaccttcatcaaacgaggatagccctgatggccgtgggagcctgtcccctgaagttaacaatgtgccacatgaatctccacaaaccattcttcagatcatgacatgcttttcagttcctggaggcttcctgttatcccctctaccagccaatatcttgcagttgacaaaaaaggtcgtgtcttcatcaaagaagtgggaatcaaatgtggatgtagaaaatgtacaagaatcatatgaaggccatgtggctaaaagggtgaaatctgatggtaacaaaaagaggctgatagatgcaaaaaattcaaagaacaaaaatgatattagtgcagttatgaaaaaggagattgatatggaattagttgctggtcaaaagatagtatctgaagctcttaaaatatcattgctgtctgaccccagagctatggatgcaaaaggtgagaatcgtcttgaagaggagccagcagaaaacaacttggttggaattagagatgctcgattgaaagagcggtgcaccaagactgactccatgacagtcaaagtggaacctgccaaagcagaggtgatggaatgtttagagaacagtagttttggcagttcagaaatggatctttcagcagtgaaagggaaatcaaaacccaagacagaaaagggtgaggcaactttagaagataggaatacaactaatgacaaagacctaatatcagataggaagcaaaaaaagaaaataaaatctgggagtaaatataatgcctctaactttgaaggtagcattagcaatgttataaacgaaggagcttcagctgttttccacatgggaaaaatttctggtctagaagctttgccttatgacacaaatggggaaaataattccaagagtgaggtcaaaaaaatgcagagagaacaaaaggccaatgtttcgacgtcttctgatttcctggaggaggagaaacacattcattcttctgctgcagttaaggagagaagtgacatgcaatcaaaacctatccatactggaaagaaacccaaagcaaaatcacatagagatgttagggacaacaattttcctgaaggatcttatggaagcaaggaacaggattcattggagaataaaagtgcctttggagatccccggccaaaggaaaaaccatggaagtttgacagcgaggactctgatgcacctgggatctcgaggaaggatagttcttatgtaaagcttgacaaacacctggctactgaggagcagaagatgcatatacttccacctgccactgcttcaactgcgaatgcagcttttatacatgcagccccagtcgtaatagaggaacattgggtgtgctgtgacatatgccagaaatggcgtctcctaccttatgaaatgaatccttcagatcttcctaagaagtggaaatgtagcatgctacagtggctacctgggatgaataggtgtgagattagtgaagaggagactacaaatgctctgaatgcactgtatgtccctgcccctgcaaatggtattccttcagttggccttcctcatgttgcttcatcaggactagtaacatccagcactcccaatatgaatggacatattgagcagagtaggaaaagaaagaatgttctaagtgatggaaattttgtggctgagggttctcaccaaacacagggttcaggtcatccaatgagcaaccaacatgctcccaataaaagtaaaactcatactgatggtatccagtatcctattgatagagattctgtaagcaaatcagttgacccaacaattaaaaagcaaaggtccaaaagcaaacatcacagtagctattctgatggagtagatcttgttgaaagacctaagaagcattctaaagtaaaaagcaagagagacttggatcgtgatgaatacaaagcttctaaaaaaatcaggaaagaagagcgccattttgatagagatcggaaccttggatccggtttagctagtcgtgatgttcccgatgaggccaaggcttttcctgtgaagtcagtaacgtcaaagggttcaggtgaaaggagtgatctttcttcatcaaagcaaaaaaatgtctcacatcataaccatttggaaaattccaagaaagcaaggcaagattatgtaggttttcctgaagacgagagcaaggaatattttcaccagtcagatgtgcaaagatcagatttgtctagtaagaagaggatagtgaagaaatgggaggagagtcagtacaatccagtagctcaggtaagcaaaggagctatcaaggaaacctatagggatcagaacttaaaggaagcaaagttgatgtcattgaattctgaagaactgttttctatgacgagctccaaaccaccgaaagctcaacatgctgatcaggttttgttttatgatggggggcgtacgaacagcgagttagttgaggataacacacactttagtggcaaaacaggtctccctgagcaagaaaatagtctttctgataaggctttagacttgggcaaacctgctagtgatgtggcctatattcagacttcagctgtaacttcaagttcttcaaaggcttcagtctcacaaaaaaagaagcagaccactcaagctatgaagacatcgtcaattgagtctctttctttgtcaccacagagaaactctaacattgacaatgtctctgcctctcatagtagagtttcagtcaatgatcaatggtctagtgaacctattttggttggttcttcccgaagaaaatctgatagagataatggacaggttcagttaactcaaggtcatgcctctgatggtattcatcctgaaaggggtttgaatgaggacctgcagcctgaatctgggagaaaggattccaatataaaaaactcccatattcctaaaagttctaaccatttgcattctggtgaaaaaaataactataatacagatggctctcctatgcaaccaggaaagcatcttgttgatccaaagacaccagtcttggataaaggtgattcaagtatgcatgaaaataagaaaagtgcaaattctcttcaagatagaaatggatcaactcattgcccaccagatggaaatcctctgctcggtttaccatctggaaaagagaaatcatatctcaaaaacaacaggcaagattcacagaagcctaaaccccagatctcacctctgaaagaaagcaaattggattcccattccactccattaaaacctaatgggtcaaaattgactccacaatcaagacaatacaatgctgaaaatggagggcgacatggcactgcaaaacaagcaattcgtagtcctgctgatacttttagtccagctaggaaggacaatacttcaactgcgtatgctctcaaagaagcccgtgatttaaagcataaggctaatcgtttgaaggaagaaggaaaagagcttgaaagtacaagactctactttgactccgccttaaaatttttgcatgttgcatcacttttggaacctcctagctttgatggtttgaaacaaggcgatgcagcccagagcatgtattcagatactgcaaaactttgcaactttgttggtcacgcgtatgaaaaatgcaagaagatggctgctgctgctttagcatacaagtgtgttgaagttgcttatctgaaggctgcatactgcaagcacccaactgcaagcaaggatagacaagtgttacaggcagttgtacagactgctccaggtgaatcaccatcatcttcagcctcagacattgataatttaaataacaatggattatccaagggcccttcaagcaaggatgccaattcaccacaagtggttggaaatcatttgttgctggccactcgaaatcaaccacacttgatgcggttactagcttatacaaatgatgtcaatagtgcctttgaggctactcggaagtctcacatggcaattgcttctgcttctggcaatcacgaaaatggagttgatggtctttcttcagtaaaaacagtgctggattttaacttccgaagtgtgaatgatctactaaggtttgtgcggatttcaatggagtctatcagctgctgatgtgtgcagaatctgagaaagtgccatctgatggaagttcctgttggatgtttaatctaattaactttgtttttgatgaagtagcatgaagctgaatataatccaacagtgcaaaagcataggtctttcatttgagcttgctggtcaacttgtacagagagtgatcatatttcttctttttttacgttgattacacccaattagtatatatagttgcatacccacttggatgatttagttagtgaggaacacaagtgaagatgagctttgcactgttcaatgcttctgcttggaagaaggatgctcttgtggccgcagttcgttgttatctggaaagtggcttgctactgagcattctcttactacatgatgtaaattgtgaatctccatcaaggctggcttatggctgaagagtcagtatcatagtttcctttgatgggagaggacagcaaagccagctaatctcgctatccaagaaatcggctagtagttttttcccttttgaaccttgtcacgatgccttgtcttctggataaagttcacgcagctattagctttcatttacaaagcga

SEQ ID NO: 22960 - DNA, 6105 bp, Zea Mays
cacgcgcacccattgccgagcggacattcgcttcgctctcctcctcaagcgaaaagcggcggggaaagggtcaaaaaaaaaaaaaaaaagacgcggagcagcccaaaggggaaaccagcgtccgtgcgaaacctcgagccggccgaggcagacaagggcaggggaggacagcgaagagagagagagagagaggggagaccggggggcaagcctgggaggggccgaggaggcccgcttacgaatctcgcgatccccaatccggaagcctcgattcgccgatccgggctcggccggggagagagggatcccgccgatcggggggcgctcgtgctgcaccgattcgagctcgctccctgctctgcccgcgcggggtgcgttcctgcggaggtccgcgccgggccggtagctgctgcgtgctgcctggtggctgctgctaggtaggtggttaggcggcggcaggaggatgcgggcggcggccgcgtagcgccagcgcaggcgcagcagccccggcatgggcgacgacgccgagctcgaggagggggaggcctgcgcctgcggggacgacaccgccttcgtcgaccccgatgtcgcgctctcttacattgacgaaaagcttcaagacatacttggccatttccagaaggacttcgaaggaggcgtttctgcagataatctagggtcaaaatttggtgcatatggttcatttttgcctacgtaccagcgctctcctcttcctcaaactagaagtccccctaaggcaggaaatattacctcaaaatctccctttcaccagtcgaatgaggacttgtctcagaaacctccagctgtggcagtttcatctaccccccaaagtaatggtcctgtggtgcctttttctggtgattcaattaaaaaggaaatacgcccatccacaaagtctgaaaggggttccgtctcccatgattcatatgggccatcaaaatgtagtgaccaaaacagacttaaagtccggataaaggttggctctgataatgttttggcaagaaataatgcagctatctacagtggcctgggccttgatatttcttcaccttcatcaaacgaggatagccctgatggccgtgggagcctgtcccctgaagttaacaatgtgccacatgaatctccacaaaccattcttcagatcatgacatgcttttcagttcctggaggcttcctgttatcccctctaccagccaatatcttgcagttgacaaaaaaggtcgtgtcttcatcaaagaagtgggaatcaaatgtggatgtagaaaatgtacaagaatcatatgaaggccatgtggctaaaagggtgaaatctgatggtaacaaaaagaggctgatagatgcaaaaaattcaaagaacaaaaatgatattagtgcagttatgaaaaaggagattgatatggaattagttgctggtcaaaagatagtatctgaagctcttaaaatatcattgctgtctgaccccagagctatggatgcaaaaggtgagaatcgtcttgaagaggagccagcagaaaacaacttggttggaattagagatgctcgattgaaagagcggtgcaccaagactgactccatgacagtcaaagtggaacctgccaaagcagaggtgatggaatgtttagagaacagtagttttggcagttcagaaatggatctttcagcagtgaaagggaaatcaaaacccaagacagaaaagggtgaggcaactttagaagataggaatacaactaatgacaaagacctaatatcagataggaagcaaaaaaagaaaataaaatctgggagtaaatataatgcctctaactttgaaggtagcattagcaatgttataaacgaaggagcttcagctgttttccacatgggaaaaatttctggtctagaagctttgccttatgacacaaatggggaaaataattccaagagtgaggtcaaaaaaatgcagagagaacaaaaggccaatgtttcgacgtcttctgatttcctggaggaggagaaacacattcattcttctgctgcagttaaggagagaagtgacatgcaatcaaaacctatccatactggaaagaaacccaaagcaaaatcacatagagatgttagggacaacaattttcctgaaggatcttatggaagcaaggaacaggattcattggagaataaaagtgcctttggagatccccggccaaaggaaaaaccatggaagtttgacagcgaggactctgatgcacctgggatctcgaggaaggatagttcttatgtaaagcttgacaaacacctggctactgaggagcagaagatgcatatacttccacctgccactgcttcaactgcgaatgcagcttttatacatgcagccccagtcgtaatagaggaacattgggtgtgctgtgacatatgccagaaatggcgtctcctaccttatgaaatgaatccttcagatcttcctaagaagtggaaatgtagcatgctacagtggctacctgggatgaataggtgtgagattagtgaagaggagactacaaatgctctgaatgcactgtatgtccctgcccctgcaaatggtattccttcagttggccttcctcatgttgcttcatcaggactagtaacatccagcactcccaatatgaatggacatattgagcagagtaggaaaagaaagaatgttctaagtgatggaaattttgtggctgagggttctcaccaaacacagggttcaggtcatccaatgagcaaccaacatgctcccaataaaagtaaaactcatactgatggtatccagtatcctattgatagagattctgtaagcaaatcagttgacccaacaattaaaaagcaaaggtccaaaagcaaacatcacagtagctattctgatggagatcttgttgaaagacctaagaagcattctaaagtaaaaagcaagagagacttggatcgtgatgaatacaaagcttctaaaaaaatcaggaaagaagagcgccattttgatagagatcggaaccttggatccggtttagctagtcgtgatgttcccgatgaggccaaggcttttcctgtgaagtcagtaacgtcaaagggttcaggtgaaaggagtgatctttcttcatcaaagcaaaaaaatgtctcacatcataaccatttggaaaattccaagaaagcaaggcaagattatgtaggttttcctgaagacgagagcaaggaatattttcaccagtcagatgtgcaaagatcagatttgtctagtaagaagaggatagtgaagaaatgggaggagagtcagtacaatccagtagctcaggtaagcaaaggagctatcaaggaaacctatagggatcagaacttaaaggaagcaaagttgatgtcattgaattctgaagaactgttttctatgacgagctccaaaccaccgaaagctcaacatgctgatcaggttttgttttatgatggggggcgtacgaacagcgagttagttgaggataacacacactttagtggcaaaacaggtctccctgagcaagaaaatagtctttctgataaggctttagacttgggcaaacctgctagtgatgtggcctatattcagacttcagctgtaacttcaagttcttcaaaggcttcagtctcacaaaaaaagaagcagaccactcaagctatgaagacatcgtcaattgagtctctttctttgtcaccacagagaaactctaacattgacaatgtctctgcctctcatagtagagtttcaggtaaggatggatctctgaatgctaactcaagcactgtgccggccatggcaaaacaactaaatactcaagttggtgtagcagtcaatgatcaatggtctagtgaacctattttggttggttcttcccgaagaaaatctgatagagataatggacaggttcagttaactcaaggtcatgcctctgatggtattcatcctgaaaggggtttgaatgaggacctgcagcctgaatctgggagaaaggattccaatataaaaaactcccatattcctaaaagttctaaccatttgcattctggtgaaaaaaataactataatacagatggctctcctatgcaaccaggaaagcatcttgttgatccaaagacaccagtcttggataaaggtgattcaagtatgcatgaaaataagaaaagtgcaaattctcttcaagatagaaatggatcaactcattgcccaccagatggaaatcctctgctcggtttaccatctggaaaagagaaatcatatctcaaaaacaacaggcaagattcacagaagcctaaaccccagatctcacctctgaaagaaagcaaattggattcccattccactccattaaaacctaatgggtcaaaattgactccacaatcaagacaatacaatgctgaaaatggagggcgacatggcactgcaaaacaagcaattcgtagtcctgctgatacttttagtccagctaggaaggacaatacttcaactgcgtatgctctcaaagaagcccgtgatttaaagcataaggctaatcgtttgaaggaagaaggaaaagagcttgaaagtacaagactctactttgactccgccttaaaatttttgcatgttgcatcacttttggaacctcctagctttgatggtttgaaacaaggcgatgcagcccagagcatgtattcagatactgcaaaactttgcaactttgttggtcacgcgtatgaaaaatgcaagaagatggctgctgctgctttagcatacaagtgtgttgaagttgcttatctgaaggctgcatactgcaagcacccaactgcaagcaaggatagacaagtgttacaggcagttgtacagactgctccaggtgaatcaccatcatcttcagcctcagacattgataatttaaataacaatggattatccaagggcccttcaagcaaggatgccaattcaccacaagtggttggaaatcatttgttgctggccactcgaaatcaaccacacttgatgcggttactagcttatacaaatgatgtcaatagtgcctttgaggctactcggaagtctcacatggcaattgcttctgcttctggcaatcacgaaaatggagttgatggtctttcttcagtaaaaacagtgctggattttaacttccgaagtgtgaatgatctactaagcatgaagctgaatataatccaacagtgcaaaagcataggtctttcatttgagcttgctggtcaacttgtacagagagtgatcatatttcttctttttttacgttgattacacccaattagtatatatagttgcatacccacttggatgatttagttagtgaggaacacaagtgaagatgagctttgcactgttcaatgcttctgcttggaagaaggatgctcttgtggccgcagttcgttgttatctggaaagtggcttgctactgagcattctcttactacatgatgtaaattgtgaatctccatcaaggctggcttatggctgaagaggagaggacagcaaagccagctaatctcgctatccaagaaatcggctagtagttttttcccttttgaaccttgtcacgatgccttgtcttctggataaagttcacgcaggtttcaaataagaaatcacatggactatcagacttgtatggaatatggatgctgtacaaagatttctaatgtacattagtctaactttttttttcgtgatccccgaaatgccgactatcaccagcgcatgtacatgtatatatacatacaataaaggttggggcatttttaccacgtgctggtctctatgtatgacgcctttggttccgtccaacttttagtctttcacatttttgaaattttgtgacattctagttttttgttaggatagcgtctagtactgggaatttgttgcagaatgcaaaataaattccgtgctgtacaacttgtagccgagtttcaggtcgtcgagtgaagtgatggtaactgctcgccgaatttgcactatgcggtctgtggatagctacttgaatgaaaagtttgtttccacatatcaagtcgatggtgcctgatgctgctgcactttgcaggcttcaaattgattggaac

SEQ ID NO: 22961 - DNA, 6118 bp, Zea Mays
cacgcgcacccattgccgagcggacattcgcttcgctctcctcctcaagcgaaaagcggcggggaaagggtcaaaaaaaaaaaaaaaaagacgcggagcagcccaaaggggaaaccagcgtccgtgcgaaacctcgagccggccgaggcagacaagggcaggggaggacagcgaagagagagagagagagaggggagaccggggggcaagcctgggaggggccgaggaggcccgcttacgaatctcgcgatccccaatccggaagcctcgattcgccgatccgggctcggccggggagagagggatcccgccgatcggggggcgctcgtgctgcaccgattcgagctcgctccctgctctgcccgcgcggggtgcgttcctgcggaggtccgcgccgggccggtagctgctgcgtgctgcctggtggctgctgctaggtaggtggttaggcggcggcaggaggatgcgggcggcggccgcgtagcgccagcgcaggcgcagcagccccggcatgggcgacgacgccgagctcgaggagggggaggcctgcgcctgcggggacgacaccgccttcgtcgaccccgatgtcgcgctctcttacattgacgaaaagcttcaagacatacttggccatttccagaaggacttcgaaggaggcgtttctgcagataatctagggtcaaaatttggtgcatatggttcatttttgcctacgtaccagcgctctcctcttcctcaaactagaagtccccctaaggcaggaaatattacctcaaaatctccctttcaccagtcgaatgagaaacctccagctgtggcagtttcatctaccccccaaagtaatggtcctgtggtgcctttttctggtgattcaattaaaaaggaaatacgcccatccacaaagtctgaaaggggttccgtctcccatgattcatatgggccatcaaaatgtagtgaccaaaacagacttaaagtccggataaaggttggctctgataatgttttggcaagaaataatgcagctatctacagtggcctgggccttgatatttcttcaccttcatcaaacgaggatagccctgatggccgtgggagcctgtcccctgaagttaacaatgtgccacatgaatctccacaaaccattcttcagatcatgacatgcttttcagttcctggaggcttcctgttatcccctctaccagccaatatcttgcagttgacaaaaaaggtcgtgtcttcatcaaagaagtgggaatcaaatgtggatgtagaaaatgtacaagaatcatatgaaggccatgtggctaaaagggtgaaatctgatggtaacaaaaagaggctgatagatgcaaaaaattcaaagaacaaaaatgatattagtgcagttatgaaaaaggagattgatatggaattagttgctggtcaaaagatagtatctgaagctcttaaaatatcattgctgtctgaccccagagctatggatgcaaaaggtgagaatcgtcttgaagaggagccagcagaaaacaacttggttggaattagagatgctcgattgaaagagcggtgcaccaagactgactccatgacagtcaaagtggaacctgccaaagcagaggtgatggaatgtttagagaacagtagttttggcagttcagaaatggatctttcagcagtgaaagggaaatcaaaacccaagacagaaaagggtgaggcaactttagaagataggaatacaactaatgacaaagacctaatatcagataggaagcaaaaaaagaaaataaaatctgggagtaaatataatgcctctaactttgaaggtagcattagcaatgttataaacgaaggagcttcagctgttttccacatgggaaaaatttctggtctagaagctttgccttatgacacaaatggggaaaataattccaagagtgaggtcaaaaaaatgcagagagaacaaaaggccaatgtttcgacgtcttctgatttcctggaggaggagaaacacattcattcttctgctgcagttaaggagagaagtgacatgcaatcaaaacctatccatactggaaagaaacccaaagcaaaatcacatagagatgttagggacaacaattttcctgaaggatcttatggaagcaaggaacaggattcattggagaataaaagtgcctttggagatccccggccaaaggaaaaaccatggaagtttgacagcgaggactctgatgcacctgggatctcgaggaaggatagttcttatgtaaagcttgacaaacacctggctactgaggagcagaagatgcatatacttccacctgccactgcttcaactgcgaatgcagcttttatacatgcagccccagtcgtaatagaggaacattgggtgtgctgtgacatatgccagaaatggcgtctcctaccttatgaaatgaatccttcagatcttcctaagaagtggaaatgtagcatgctacagtggctacctgggatgaataggtgtgagattagtgaagaggagactacaaatgctctgaatgcactgtatgtccctgcccctgcaaatggtattccttcagttggccttcctcatgttgcttcatcaggactagtaacatccagcactcccaatatgaatggacatattgagcagagtaggaaaagaaagaatgttctaagtgatggaaattttgtggctgagggttctcaccaaacacagggttcaggtcatccaatgagcaaccaacatgctcccaataaaagtaaaactcatactgatggtatccagtatcctattgatagagattctgtaagcaaatcagttgacccaacaattaaaaagcaaaggtccaaaagcaaacatcacagtagctattctgatggagatcttgttgaaagacctaagaagcattctaaagtaaaaagcaagagagacttggatcgtgatgaatacaaagcttctaaaaaaatcaggaaagaagagcgccattttgatagagatcggaaccttggatccggtttagctagtcgtgatgttcccgatgaggccaaggcttttcctgtgaagtcagtaacgtcaaagggttcaggtgaaaggagtgatctttcttcatcaaagcaaaaaaatgtctcacatcataaccatttggaaaattccaagaaagcaaggcaagattatgtaggttttcctgaagacgagagcaaggaatattttcaccagtcagatgtgcaaagatcagatttgtctagtaagaagaggatagtgaagaaatgggaggagagtcagtacaatccagtagctcaggtaagcaaaggagctatcaaggaaacctatagggatcagaacttaaaggaagcaaagttgatgtcattgaattctgaagaactgttttctatgacgagctccaaaccaccgaaagctcaacatgctgatcaggttttgttttatgatggggggcgtacgaacagcgagttagttgaggataacacacactttagtggcaaaacaggtctccctgagcaagaaaatagtctttctgataaggctttagacttgggcaaacctgctagtgatgtggcctatattcagacttcagctgtaacttcaagttcttcaaaggcttcagtctcacaaaaaaagaagcagaccactcaagctatgaagacatcgtcaattgagtctctttctttgtcaccacagagaaactctaacattgacaatgtctctgcctctcatagtagagtttcaggtaaggatggatctctgaatgctaactcaagcactgtgccggccatggcaaaacaactaaatactcaagttggtgtagcagtcaatgatcaatggtctagtgaacctattttggttggttcttcccgaagaaaatctgatagagataatggacaggttcagttaactcaaggtcatgcctctgatggtattcatcctgaaaggggtttgaatgaggacctgcagcctgaatctgggagaaaggattccaatataaaaaactcccatattcctaaaagttctaaccatttgcattctggtgaaaaaaataactataatacagatggctctcctatgcaaccaggaaagcatcttgttgatccaaagacaccagtcttggataaaggtgattcaagtatgcatgaaaataagaaaagtgcaaattctcttcaagatagaaatggatcaactcattgcccaccagatggaaatcctctgctcggtttaccatctggaaaagagaaatcatatctcaaaaacaacaggcaagattcacagaagcctaaaccccagatctcacctctgaaagaaagcaaattggattcccattccactccattaaaacctaatgggtcaaaattgactccacaatcaagacaatacaatgctgaaaatggagggcgacatggcactgcaaaacaagcaattcgtagtcctgctgatacttttagtccagctaggaaggacaatacttcaactgcgtatgctctcaaagaagcccgtgatttaaagcataaggctaatcgtttgaaggaagaaggaaaagagcttgaaagtacaagactctactttgactccgccttaaaatttttgcatgttgcatcacttttggaacctcctagctttgatggtttgaaacaaggcgatgcagcccagagcatgtattcagatactgcaaaactttgcaactttgttggtcacgcgtatgaaaaatgcaagaagatggctgctgctgctttagcatacaagtgtgttgaagttgcttatctgaaggctgcatactgcaagcacccaactgcaagcaaggatagacaagtgttacaggcagttgtacagactgctccaggtgaatcaccatcatcttcagcctcagacattgataatttaaataacaatggattatccaagggcccttcaagcaaggatgccaattcaccacaagtggttggaaatcatttgttgctggccactcgaaatcaaccacacttgatgcggttactagcttatacaaatgatgtcaatagtgcctttgaggctactcggaagtctcacatggcaattgcttctgcttctggcaatcacgaaaatggagttgatggtctttcttcagtaaaaacagtgctggattttaacttccgaagtgtgaatgatctactaagcatgaagctgaatataatccaacagtgcaaaagcataggtctttcatttgagcttgctggtcaacttgtacagagagtgatcatatttcttctttttttacgttgattacacccaattagtatatatagttgcatacccacttggatgatttagttagtgaggaacacaagtgaagatgagctttgcactgttcaatgcttctgcttggaagaaggatgctcttgtggccgcagttcgttgttatctggaaagtggcttgctactgagcattctcttactacatgatgtaaattgtgaatctccatcaaggctggcttatggctgaagagtcagtatcatagtttcctttgatgggagaggacagcaaagccagctaatctcgctatccaagaaatcggctagtagttttttcccttttgaaccttgtcacgatgccttgtcttctggataaagttcacgcaggtttcaaataagaaatcacatggactatcagacttgtatggaatatggatgctgtacaaagatttctaatgtacattagtctaactttttttttcgtgatccccgaaatgccgactatcaccagcgcatgtacatgtatatatacatacaataaaggttggggcatttttaccacgtgctggtctctatgtatgacgcctttggttccgtccaacttttagtctttcacatttttgaaattttgtgacattctagttttttgttaggatagcgtctagtactgggaatttgttgcagaatgcaaaataaattccgtgctgtacaacttgtagccgagtttcaggtcgtcgagtgaagtgatggtaactgctcgccgaatttgcactatgcggtctgtggatagctacttgaatgaaaagtttgtttccacatatcaagtcgatggtgcctgatgctgctgcactttgcaggcttcaaattgattggaac

SEQ ID NO: 22962 - DNA, 5181 bp, Zea Mays
cacgcgcacccattgccgagcggacattcgcttcgctctcctcctcaagcgaaaagcggcggggaaagggtcaaaaaaaaaaaaaaaaagacgcggagcagcccaaaggggaaaccagcgtccgtgcgaaacctcgagccggccgaggcagacaagggcaggggaggacagcgaagagagagagagagagaggggagaccggggggcaagcctgggaggggccgaggaggcccgcttacgaatctcgcgatccccaatccggaagcctcgattcgccgatccgggctcggccggggagagagggatcccgccgatcggggggcgctcgtgctgcaccgattcgagctcgctccctgctctgcccgcgcggggtgcgttcctgcggaggtccgcgccgggccggtagctgctgcgtgctgcctggtggctgctgctaggtaggtggttaggcggcggcaggaggatgcgggcggcggccgcgtagcgccagcgcaggcgcagcagccccggcatgggcgacgacgccgagctcgaggagggggaggcctgcgcctgcggggacgacaccgccttcgtcgaccccgatgtcgcgctctcttacattgacgaaaagcttcaagacatacttggccatttccagaaggacttcgaaggaggcgtttctgcagataatctagggtcaaaatttggtgcatatggttcatttttgcctacgtaccagcgctctcctcttcctcaaactagaagtccccctaaggcaggaaatattacctcaaaatctccctttcaccagtcgaatgaggacttgtctcagaaacctccagctgtggcagtttcatctaccccccaaagtaatggtcctgtggtgcctttttctggtgattcaattaaaaaggaaatacgcccatccacaaagtctgaaaggggttccgtctcccatgattcatatgggccatcaaaatgtagtgaccaaaacagacttaaagtccggataaaggttggctctgataatgttttggcaagaaataatgcagctatctacagtggcctgggccttgatatttcttcaccttcatcaaacgaggatagccctgatggccgtgggagcctgtcccctgaagttaacaatgtgccacatgaatctccacaaaccattcttcagatcatgacatgcttttcagttcctggaggcttcctgttatcccctctaccagccaatatcttgcagttgacaaaaaaggtcgtgtcttcatcaaagaagtgggaatcaaatgtggatgtagaaaatgtacaagaatcatatgaaggccatgtggctaaaagggtgaaatctgatggtaacaaaaagaggctgatagatgcaaaaaattcaaagaacaaaaatgatattagtgcagttatgaaaaaggagattgatatggaattagttgctggtcaaaagatagtatctgaagctcttaaaatatcattgctgtctgaccccagagctatggatgcaaaaggtgagaatcgtcttgaagaggagccagcagaaaacaacttggttggaattagagatgctcgattgaaagagcggtgcaccaagactgactccatgacagtcaaagtggaacctgccaaagcagaggtgatggaatgtttagagaacagtagttttggcagttcagaaatggatctttcagcagtgaaagggaaatcaaaacccaagacagaaaagggtgaggcaactttagaagataggaatacaactaatgacaaagacctaatatcagataggaagcaaaaaaagaaaataaaatctgggagtaaatataatgcctctaactttgaaggtagcattagcaatgttataaacgaaggagcttcagctgttttccacatgggaaaaatttctggtctagaagctttgccttatgacacaaatggggaaaataattccaagagtgaggtcaaaaaaatgcagagagaacaaaaggccaatgtttcgacgtcttctgatttcctggaggaggagaaacacattcattcttctgctgcagttaaggagagaagtgacatgcaatcaaaacctatccatactggaaagaaacccaaagcaaaatcacatagagatgttagggacaacaattttcctgaaggatcttatggaagcaaggaacaggattcattggagaataaaagtgcctttggagatccccggccaaaggaaaaaccatggaagtttgacagcgaggactctgatgcacctgggatctcgaggaaggatagttcttatgtaaagcttgacaaacacctggctactgaggagcagaagatgcatatacttccacctgccactgcttcaactgcgaatgcagcttttatacatgcagccccagtcgtaatagaggaacattgggtgtgctgtgacatatgccagaaatggcgtctcctaccttatgaaatgaatccttcagatcttcctaagaagtggaaatgtagcatgctacagtggctacctgggatgaataggtgtgagattagtgaagaggagactacaaatgctctgaatgcactgtatgtccctgcccctgcaaatggtattccttcagttggccttcctcatgttgcttcatcaggactagtaacatccagcactcccaatatgaatggacatattgagcagagtaggaaaagaaagaatgttctaagtgatggaaattttgtggctgagggttctcaccaaacacagggttcaggtcatccaatgagcaaccaacatgctcccaataaaagtaaaactcatactgatggtatccagtatcctattgatagagattctgtaagcaaatcagttgacccaacaattaaaaagcaaaggtccaaaagcaaacatcacagtagctattctgatggagtagatcttgttgaaagacctaagaagcattctaaagtaaaaagcaagagagacttggatcgtgatgaatacaaagcttctaaaaaaatcaggaaagaagagcgccattttgatagagatcggaaccttggatccggtttagctagtcgtgatgttcccgatgaggccaaggcttttcctgtgaagtcagtaacgtcaaagggttcaggtgaaaggagtgatctttcttcatcaaagcaaaaaaatgtctcacatcataaccatttggaaaattccaagaaagcaaggcaagattatgtaggttttcctgaagacgagagcaaggaatattttcaccagtcagatgtgcaaagatcagatttgtctagtaagaagaggatagtgaagaaatgggaggagagtcagtacaatccagtagctcaggtaagcaaaggagctatcaaggaaacctatagggatcagaacttaaaggaagcaaagttgatgtcattgaattctgaagaactgttttctatgacgagctccaaaccaccgaaagctcaacatgctgatcaggttttgttttatgatggggggcgtacgaacagcgagttagttgaggataacacacactttagtggcaaaacaggtctccctgagcaagaaaatagtctttctgataaggctttagacttgggcaaacctgctagtgatgtggcctatattcagacttcagctgtaacttcaagttcttcaaaggcttcagtctcacaaaaaaagaagcagaccactcaagctatgaagacatcgtcaattgagtctctttctttgtcaccacagagaaactctaacattgacaatgtctctgcctctcatagtagagtttcaggaagaaggaaaagagcttgaaagtacaagactctactttgactccgccttaaaatttttgcatgttgcatcacttttggaacctcctagctttgatggtttgaaacaaggcgatgcagcccagagcatgtattcagatactgcaaaactttgcaactttgttggtcacgcgtatgaaaaatgcaagaagatggctgctgctgctttagcatacaagtgtgttgaagttgcttatctgaaggctgcatactgcaagcacccaactgcaagcaaggatagacaagtgttacaggcagttgtacagactgctccagacaaatgatgtcaatagtgcctttgaggctactcggaagtctcacatggcaattgcttctgcttctggcaatcacgaaaatggagttgatggtctttcttcagtaaaaacagtgctggattttaacttccgaagtgtgaatgatctactaagcatgaagctgaatataatccaacagtgcaaaagcataggtctttcatttgagcttgctggtcaacttgtacagagagtgatcatatttcttctttttttacgttgattacacccaattagtatatatagttgcatacccacttggatgatttagttagtgaggaacacaagtgaagatgagctttgcactgttcaatgcttctgcttggaagaaggatgctcttgtggccgcagttcgttgttatctggaaagtggcttgctactgagcattctcttactacatgatgtaaattgtgaatctccatcaaggctggcttatggctgaagagtcagtatcatagtttcctttgatgggagaggacagcaaagccagctaatctcgctatccaagaaatcggctagtagttttttcccttttgaaccttgtcacgatgccttgtcttctggataaagttcacgcaggtttcaaataagaaatcacatggactatcagacttgtatggaatatggatgctgtacaaagatttctaatgtacattagtctaactttttttttcgtgatccccgaaatgccgactatcaccagcgcatgtacatgtatatatacatacaataaaggttggggcatttttaccacgtgctggtctctatgtatgacgcctttggttccgtccaacttttagtctttcacatttttgaaattttgtgacattctagttttttgttaggatagcgtctagtactgggaatttgttgcagaatgcaaaataaattccgtgctgtacaacttgtagccgagtttcaggtcgtcgagtgaagtgatggtaactgctcgccgaatttgcactatgcggtctgtggatagctacttgaatgaaaagtttgtttccacatatcaagtcgatggtgcctgatgctgctgcactttgcaggcttcaaattgattggaac

SEQ ID NO: 22963 - DNA, 6043 bp, Zea Mays
cacgcgcacccattgccgagcggacattcgcttcgctctcctcctcaagcgaaaagcggcggggaaagggtcaaaaaaaaaaaaaaaaagacgcggagcagcccaaaggggaaaccagcgtccgtgcgaaacctcgagccggccgaggcagacaagggcaggggaggacagcgaagagagagagagagagaggggagaccggggggcaagcctgggaggggccgaggaggcccgcttacgaatctcgcgatccccaatccggaagcctcgattcgccgatccgggctcggccggggagagagggatcccgccgatcggggggcgctcgtgctgcaccgattcgagctcgctccctgctctgcccgcgcggggtgcgttcctgcggaggtccgcgccgggccggtagctgctgcgtgctgcctggtggctgctgctaggtaggtggttaggcggcggcaggaggatgcgggcggcggccgcgtagcgccagcgcaggcgcagcagccccggcatgggcgacgacgccgagctcgaggagggggaggcctgcgcctgcggggacgacaccgccttcgtcgaccccgatgtcgcgctctcttacattgacgaaaagcttcaagacatacttggccatttccagaaggacttcgaaggaggcgtttctgcagataatctagggtcaaaatttggtgcatatggttcatttttgcctacgtaccagcgctctcctcttcctcaaactagaagtccccctaaggcaggaaatattacctcaaaatctccctttcaccagtcgaatgagaaacctccagctgtggcagtttcatctaccccccaaagtaatggtcctgtggtgcctttttctggtgattcaattaaaaaggaaatacgcccatccacaaagtctgaaaggggttccgtctcccatgattcatatgggccatcaaaatgtagtgaccaaaacagacttaaagtccggataaaggttggctctgataatgttttggcaagaaataatgcagctatctacagtggcctgggccttgatatttcttcaccttcatcaaacgaggatagccctgatggccgtgggagcctgtcccctgaagttaacaatgtgccacatgaatctccacaaaccattcttcagatcatgacatgcttttcagttcctggaggcttcctgttatcccctctaccagccaatatcttgcagttgacaaaaaaggtcgtgtcttcatcaaagaagtgggaatcaaatgtggatgtagaaaatgtacaagaatcatatgaaggccatgtggctaaaagggtgaaatctgatggtaacaaaaagaggctgatagatgcaaaaaattcaaagaacaaaaatgatattagtgcagttatgaaaaaggagattgatatggaattagttgctggtcaaaagatagtatctgaagctcttaaaatatcattgctgtctgaccccagagctatggatgcaaaaggtgagaatcgtcttgaagaggagccagcagaaaacaacttggttggaattagagatgctcgattgaaagagcggtgcaccaagactgactccatgacagtcaaagtggaacctgccaaagcagaggtgatggaatgtttagagaacagtagttttggcagttcagaaatggatctttcagcagtgaaagggaaatcaaaacccaagacagaaaagggtgaggcaactttagaagataggaatacaactaatgacaaagacctaatatcagataggaagcaaaaaaagaaaataaaatctgggagtaaatataatgcctctaactttgaaggtagcattagcaatgttataaacgaaggagcttcagctgttttccacatgggaaaaatttctggtctagaagctttgccttatgacacaaatggggaaaataattccaagagtgaggtcaaaaaaatgcagagagaacaaaaggccaatgtttcgacgtcttctgatttcctggaggaggagaaacacattcattcttctgctgcagttaaggagagaagtgacatgcaatcaaaacctatccatactggaaagaaacccaaagcaaaatcacatagagatgttagggacaacaattttcctgaaggatcttatggaagcaaggaacaggattcattggagaataaaagtgcctttggagatccccggccaaaggaaaaaccatggaagtttgacagcgaggactctgatgcacctgggatctcgaggaaggatagttcttatgtaaagcttgacaaacacctggctactgaggagcagaagatgcatatacttccacctgccactgcttcaactgcgaatgcagcttttatacatgcagccccagtcgtaatagaggaacattgggtgtgctgtgacatatgccagaaatggcgtctcctaccttatgaaatgaatccttcagatcttcctaagaagtggaaatgtagcatgctacagtggctacctgggatgaataggtgtgagattagtgaagaggagactacaaatgctctgaatgcactgtatgtccctgcccctgcaaatggtattccttcagttggccttcctcatgttgcttcatcaggactagtaacatccagcactcccaatatgaatggacatattgagcagagtaggaaaagaaagaatgttctaagtgatggaaattttgtggctgagggttctcaccaaacacagggttcaggtcatccaatgagcaaccaacatgctcccaataaaagtaaaactcatactgatggtatccagtatcctattgatagagattctgtaagcaaatcagttgacccaacaattaaaaagcaaaggtccaaaagcaaacatcacagtagctattctgatggagtagatcttgttgaaagacctaagaagcattctaaagtaaaaagcaagagagacttggatcgtgatgaatacaaagcttctaaaaaaatcaggaaagaagagcgccattttgatagagatcggaaccttggatccggtttagctagtcgtgatgttcccgatgaggccaaggcttttcctgtgaagtcagtaacgtcaaagggttcaggtgaaaggagtgatctttcttcatcaaagcaaaaaaatgtctcacatcataaccatttggaaaattccaagaaagcaaggcaagattatgtaggttttcctgaagacgagagcaaggaatattttcaccagtcagatgtgcaaagatcagatttgtctagtaagaagaggatagtgaagaaatgggaggagagtcagtacaatccagtagctcaggtaagcaaaggagctatcaaggaaacctatagggatcagaacttaaaggaagcaaagttgatgtcattgaattctgaagaactgttttctatgacgagctccaaaccaccgaaagctcaacatgctgatcaggttttgttttatgatggggggcgtacgaacagcgagttagttgaggataacacacactttagtggcaaaacaggtctccctgagcaagaaaatagtctttctgataaggctttagacttgggcaaacctgctagtgatgtggcctatattcagacttcagctgtaacttcaagttcttcaaaggcttcagtctcacaaaaaaagaagcagaccactcaagctatgaagacatcgtcaattgagtctctttctttgtcaccacagagaaactctaacattgacaatgtctctgcctctcatagtagagtttcagtcaatgatcaatggtctagtgaacctattttggttggttcttcccgaagaaaatctgatagagataatggacaggttcagttaactcaaggtcatgcctctgatggtattcatcctgaaaggggtttgaatgaggacctgcagcctgaatctgggagaaaggattccaatataaaaaactcccatattcctaaaagttctaaccatttgcattctggtgaaaaaaataactataatacagatggctctcctatgcaaccaggaaagcatcttgttgatccaaagacaccagtcttggataaaggtgattcaagtatgcatgaaaataagaaaagtgcaaattctcttcaagatagaaatggatcaactcattgcccaccagatggaaatcctctgctcggtttaccatctggaaaagagaaatcatatctcaaaaacaacaggcaagattcacagaagcctaaaccccagatctcacctctgaaagaaagcaaattggattcccattccactccattaaaacctaatgggtcaaaattgactccacaatcaagacaatacaatgctgaaaatggagggcgacatggcactgcaaaacaagcaattcgtagtcctgctgatacttttagtccagctaggaaggacaatacttcaactgcgtatgctctcaaagaagcccgtgatttaaagcataaggctaatcgtttgaaggaagaaggaaaagagcttgaaagtacaagactctactttgactccgccttaaaatttttgcatgttgcatcacttttggaacctcctagctttgatggtttgaaacaaggcgatgcagcccagagcatgtattcagatactgcaaaactttgcaactttgttggtcacgcgtatgaaaaatgcaagaagatggctgctgctgctttagcatacaagtgtgttgaagttgcttatctgaaggctgcatactgcaagcacccaactgcaagcaaggatagacaagtgttacaggcagttgtacagactgctccaggtgaatcaccatcatcttcagcctcagacattgataatttaaataacaatggattatccaagggcccttcaagcaaggatgccaattcaccacaagtggttggaaatcatttgttgctggccactcgaaatcaaccacacttgatgcggttactagcttatacaaatgatgtcaatagtgcctttgaggctactcggaagtctcacatggcaattgcttctgcttctggcaatcacgaaaatggagttgatggtctttcttcagtaaaaacagtgctggattttaacttccgaagtgtgaatgatctactaagtagcatgaagctgaatataatccaacagtgcaaaagcataggtctttcatttgagcttgctggtcaacttgtacagagagtgatcatatttcttctttttttacgttgattacacccaattagtatatatagttgcatacccacttggatgatttagttagtgaggaacacaagtgaagatgagctttgcactgttcaatgcttctgcttggaagaaggatgctcttgtggccgcagttcgttgttatctggaaagtggcttgctactgagcattctcttactacatgatgtaaattgtgaatctccatcaaggctggcttatggctgaagagtcagtatcatagtttcctttgatgggagaggacagcaaagccagctaatctcgctatccaagaaatcggctagtagttttttcccttttgaaccttgtcacgatgccttgtcttctggataaagttcacgcaggtttcaaataagaaatcacatggactatcagacttgtatggaatatggatgctgtacaaagatttctaatgtacattagtctaactttttttttcgtgatccccgaaatgccgactatcaccagcgcatgtacatgtatatatacatacaataaaggttggggcatttttaccacgtgctggtctctatgtatgacgcctttggttccgtccaacttttagtctttcacatttttgaaattttgtgacattctagttttttgttaggatagcgtctagtactgggaatttgttgcagaatgcaaaataaattccgtgctgtacaacttgtagccgagtttcaggtcgtcgagtgaagtgatggtaactgctcgccgaatttgcactatgcggtctgtggatagctacttgaatgaaaagtttgtttccacatatcaagtcgatggtgcctgatgctgctgcactttgcaggcttcaaattgattggaac

SEQ ID NO: 22964 - DNA, 2057 bp, Zea Mays
ggttgctcgacgacgtataagcctacagaaaaaggctacggagcctacagcctagggagaagattgcgaagatcgacagagatggacagctatttctgtcggtaaaaaatgcctcaacacatttcatacgtattttctccgttgtttttttattcgtaccaacccagcaggccttgcttccattgcagacaaagaaatactactggacctgcctgccagcctgcagataccatagaaaaaccgcagccagtcgatcccgtagcggggcccactcgccgatcaaccagcaagatggccaccgagacaacgtgcgctcctcccgtaacgggacccactcgccgatcaaccagcaggatggccaccgcgccaccggacgaccctcctcatcctcctccggcggaggcgggcgccgccacgccaagccgttcggtacgcacgggcaactgcctctcgggtgatgtgatggaatccacaattctgaatttctgatccttcacttgcagagaccgtcggggttcgagcagctagacgggcgagtcaaggagctgacctcgtcgcaggcggagttgctggagaggatccagaagctgaaacatgaggtgcagaactggcgctccaatgtagagacgcaggtcaagacataccagaatgaactccaggatctcaagaaaggacttgactctgaagtggaacagctgaaatcggaaatgaaggcggttaggtctgcggtacaggaagagaaaggcaatctacctgcacaaaataccgactttagagacgaacaataaaaatgcaggacaagcttggcagacaccaggccaagcacagtattgaagagcaaacagcaacacaggcgtgaattggtgcttccttgcagaggtgaagggctgttctgctggatattcagatcctttcaatggatcaaaaggggggaaagctggcagatacacggaatcacatgaagtattcatttttttaatatataccagcaagtttccaagtgcaaatatctctataacagtgagcaatttcaagagtaatgtacaagaactgcttgttttgtaacaattccatgactactaatactactattacaaacttaatcttgaaataaaatctgcacagcctcctattgttccagtgttctaaacatgcttaaaacaaaaataaaatttgttacccaatgaggaattggaatctggaggtggccatgtaatattgcacgtcagcatgtaatcatttctgcaattttgctgcttcatcacagctagctgagatctccttatgtcatttaactgaaatgcaacagtctagtactccatcccaccttgtaaactgaataacattatggagttaattctggacttccgacctcttcagttgctacagggtaacttacaaaaacttaggttgctttcccttaaaagcgaagctgcctaagaaaccttaacatctttccggttatctgtgtgaaggcttcctacaagggcagaatatagggagtcatctgggatcaatccagctttcagcatatcatcatacagctggaacgccgcctctgatctcccttccttcgccagacctgatatcagagccgtataggccacgacattaggttccgttcccctctgcttcatctcttcgaatagcttcagcgccacatccaccttcccattgacacagtgcccatgaactagcgatgcataggtgtatacatctggaacaaaccctttcttctccatctcctttctgaacctctcagcctcacggatcctccccttcttggcgtacccatgaatcataacactgtaggtcaaaacactgggcgtcgcccctttctctgccatttctcggaacagccttctagcctccaccatgtcgccatccttgcagtgtatgctgatcagtgtagtgtaagtgacgtaatttggcacgacacccatctcgatcatgatgtgcaatagatagagtctttgcctcatccaatctattcaccctgcacagtccacaggccagtgtgttgtatgtgtagatgttcagttcgacgccaattttct

SEQ ID NO: 22965 - DNA, 2755 bp, Zea Mays
ctgccagcctgcagataccatagaaaaaccgcagccagtcgatcccgtagcggggcccactcgccgatcaaccagcaagatggccaccgagacaacgtgcgctcctcccgtaacgggacccactcgccgatcaaccagcaggatggccaccgcgccaccggacgaccctcctcatcctcctccggcggaggcgggcgccgccacgccaagccgttcgagaccgtcggggttcgagcagctagacgggcgagtcaaggagctgacctcgtcgcaggcggagttgctggagaggatccagaagctgaaacatgaggtgcagaactggcgctccaatgtagagacgcaggtcaagacataccagaatgaactccaggatctcaagaaaggacttgactctgaagtggaacagctgaaatcggcggttaggtctgcggtacaggaagagaaaggcaatctacctgcacaaaataccgactttagagacgaacaataaaaatgcaggacaagcttggcagacaccaggccaagcacagtattgaagagcaaacagcaacacagccgtgaattggtgcttccttgcagaggtgaagggctgttctgctggatattcagatcctttcaatggatcaaaaggggggaaagctggcagatacacggaatcacatgaagtattcatttttttaatatataccagcaagtttccaagtgcaaatatctctataacagtgagcaatttcaagagtaatgtacaagaactgcttgttttgtaacaattccatgactactaatactactattacaaacttaatcttgaaataaaatctgcacagcctcctattgttccagtgttctaaacatgcttaaaacaaaaataaaatttgttacccaatgaggaattggaatctggaggtggccatgtaatattgcacgtcagcatgtaatcatttctgcaattttgctgcttcatcacagctagctgagatctccttatgtcatttaactgaaatgcaacagtctagtactccatcccaccttgtaaactgaataacattatggagttaattctggacttccgacctcttcagttgctacagggtaacttacaaaaacttaggttgctttcccttaaaagcgaagctgcctaagaaaccttaacatctttccggttatctgtgtgaaggcttcctacaagggcagaatatagggagtcatctgggatcaatccagctttcagcatatcatcatacagctggaacgccgcctctgatctcccttccttcgccagacctgatatcagagccgtataggccacgacattaggttccgttcccctctgcttcatctcttcgaatagcttcagcgccacatccacctttccattgacacagtgcccatgaactagcgatgcataggtgtatacatctggaacaaaccctttcttctccatctcctttctgaacctctcagcctcacggatgctccccttcttggtgtacccatcaatcataacattgtaggtcacaacactgggcgtcgcccctttctctgccatttctcggaacagccttctagcctccaccatgtcgccatccttgcagtgtatgctgatcagtgtagtgtaagtgacgtaatttggcacgacacccatctcgatcatgatgtgcaatagagtctttgcctcatccaatctattcaccctgcacagtccacaggccagtgtgttgtatgtgtagatgtccagttcgacgcccattttctccatggccgcctttattttaagagcatcgtccaccatccctttgcgacaatagccatcaatcatggtattgaaaatgatttggttaagccctacaccttgcccttgcatgtctgccagcaacatctctgcagcctccatctgcccaatcttgcagaacccgttgatcaatacaccatatgtacgctcgtttggctcgacgccattgccaacgcattcatccaaaaccttggcggccctccgcatgttccctgctcggcaatacgcgttgatgacggcggtgtacaggtacacatcccccacaacattattcgccttcatctcattaaacagagcctcgaccttgctgatgtccctggcggtcgacaaactatccacaaggatcgtatacgtcccgaccgtcgcctcgatgccttcgttctccatgatctctagaatctcctggacccgcccgtcatccttttgtcgcacgtaacagtcaagcagcgagttgtagcacagcgcattcagactcacgccgtggcgaggcatatcgtcgagcagccggcgcgcgtcgtccacgcgccccgacttgcagagcccgtcgacgacgacggacgcggcgagcggcgagacggagcccgggcacgagccgagcgcccgctccaggaggcccgcggcgtccgcgaggcgcccggcgcggcggagcgagagcagcgaggacgtgagcgagcgcgggtcgaggctgccgaggcgggacacggcggcgtcgagcgcctcggccgcgcggcacgccgcgcccgcgtccgcgtacgcgcggaagagcatatcgtggaacgccgccacggcgtgcggcggcgcgccgcgcgggagcgacgaggcagcgaggtccgcgaacggcaccgccagtaggcgcggcgtgagcagggaccggagcgcggacctggcggcggcgaagcgccgcgcggtaaggagcgacgcgaaggcggcgagcggcggcaaggcggcggaccccgccat

SEQ ID NO: 22966 - DNA, 2764 bp, Zea Mays
ctgccagcctgcagataccatagaaaaaccgcagccagtcgatcccgtagcggggcccactcgccgatcaaccagcaagatggccaccgagacaacgtgcgctcctcccgtaacgggacccactcgccgatcaaccagcaggatggccaccgcgccaccggacgaccctcctcatcctcctccggcggaggcgggcgccgccacgccaagccgttcgagaccgtcggggttcgagcagctagacgggcgagtcaaggagctgacctcgtcgcaggcggagttgctggagaggatccagaagctgaaacatgaggtgcagaactggcgctccaatgtagagacgcaggtcaagacataccagaatgaactccaggatctcaagaaaggacttgactctgaagtggaacagctgaaatcggaaatgaaggcggttaggtctgcggtacaggaagagaaaggcaatctacctgcacaaaataccgactttagagacgaacaataaaaatgcaggacaagcttggcagacaccaggccaagcacagtattgaagagcaaacagcaacacagccgtgaattggtgcttccttgcagaggtgaagggctgttctgctggatattcagatcctttcaatggatcaaaaggggggaaagctggcagatacacggaatcacatgaagtattcatttttttaatatataccagcaagtttccaagtgcaaatatctctataacagtgagcaatttcaagagtaatgtacaagaactgcttgttttgtaacaattccatgactactaatactactattacaaacttaatcttgaaataaaatctgcacagcctcctattgttccagtgttctaaacatgcttaaaacaaaaataaaatttgttacccaatgaggaattggaatctggaggtggccatgtaatattgcacgtcagcatgtaatcatttctgcaattttgctgcttcatcacagctagctgagatctccttatgtcatttaactgaaatgcaacagtctagtactccatcccaccttgtaaactgaataacattatggagttaattctggacttccgacctcttcagttgctacagggtaacttacaaaaacttaggttgctttcccttaaaagcgaagctgcctaagaaaccttaacatctttccggttatctgtgtgaaggcttcctacaagggcagaatatagggagtcatctgggatcaatccagctttcagcatatcatcatacagctggaacgccgcctctgatctcccttccttcgccagacctgatatcagagccgtataggccacgacattaggttccgttcccctctgcttcatctcttcgaatagcttcagcgccacatccacctttccattgacacagtgcccatgaactagcgatgcataggtgtatacatctggaacaaaccctttcttctccatctcctttctgaacctctcagcctcacggatgctccccttcttggtgtacccatcaatcataacattgtaggtcacaacactgggcgtcgcccctttctctgccatttctcggaacagccttctagcctccaccatgtcgccatccttgcagtgtatgctgatcagtgtagtgtaagtgacgtaatttggcacgacacccatctcgatcatgatgtgcaatagagtctttgcctcatccaatctattcaccctgcacagtccacaggccagtgtgttgtatgtgtagatgtccagttcgacgcccattttctccatggccgcctttattttaagagcatcgtccaccatccctttgcgacaatagccatcaatcatggtattgaaaatgatttggttaagccctacaccttgcccttgcatgtctgccagcaacatctctgcagcctccatctgcccaatcttgcagaacccgttgatcaatacaccatatgtacgctcgtttggctcgacgccattgccaacgcattcatccaaaaccttggcggccctccgcatgttccctgctcggcaatacgcgttgatgacggcggtgtacaggtacacatcccccacaacattattcgccttcatctcattaaacagagcctcgaccttgctgatgtccctggcggtcgacaaactatccacaaggatcgtatacgtcccgaccgtcgcctcgatgccttcgttctccatgatctctagaatctcctggacccgcccgtcatccttttgtcgcacgtaacagtcaagcagcgagttgtagcacagcgcattcagactcacgccgtggcgaggcatatcgtcgagcagccggcgcgcgtcgtccacgcgccccgacttgcagagcccgtcgacgacgacggacgcggcgagcggcgagacggagcccgggcacgagccgagcgcccgctccaggaggcccgcggcgtccgcgaggcgcccggcgcggcggagcgagagcagcgaggacgtgagcgagcgcgggtcgaggctgccgaggcgggacacggcggcgtcgagcgcctcggccgcgcggcacgccgcgcccgcgtccgcgtacgcgcggaagagcatatcgtggaacgccgccacggcgtgcggcggcgcgccgcgcgggagcgacgaggcagcgaggtccgcgaacggcaccgccagtaggcgcggcgtgagcagggaccggagcgcggacctggcggcggcgaagcgccgcgcggtaaggagcgacgcgaaggcggcgagcggcggcaaggcggcggaccccgccat

SEQ ID NO: 22967 - DNA, 2025 bp, Zea Mays
gcccgcagaaaagaaggctggtggtcgccgctgcacgcggcccagtccacccacgagtacaaacagcggcagctcgcctccacgcgagccaagcgcccgcaaaaccctagccccgcccgccccaaaccctaggcggctacggtctccgatcccggggtcacgtcctaatggcatcttcgccggacttgttccccaacgttaccttctccgacgtctccgaagccgcagcagggcctgcggccgagggggccaccgccgcgttcggtctcggcgccgccactggagccccgcgcctcagcctcgtgaaggccgaggcggagcccacggtcgagatcgaccttgccgacgcgcaggtatttaagttgggaccgacggagtggctgtgtgtgtgcgacgagtcggaggctaaggatggcgtggaagagaagtcattttcaagagcaattaaggttgttcttaggacagaagctgagagcaaagccttctctttagcttttcaacgatggcaacaccaagttattagtggaaaagctggtgagcggctggagaatggatcaataattgcttcgaaaaacaaattcgatacaaaaattgaggcatcatcagcaaagatgtatttccactactatggccagctattacatcagcaaaacatgttacaagattttgtgcggacaggaacatactatgctgctgtgatggaaaaccgttctgacttcgagggtcgagttgtggttgatgttggggctggaagcggtattctttcgttatttgctgtccaggctggtgccagacatgtatatgcagttgaggcatctgaaatggctgaacatgctcaacgtctaatctctgggaacccatctcttggacaccggatcacggtcatcaagggcaaggttgaggaagtagtgcttccagagaaagctgacatactgatttctgaacctatgggaacccttttggttaatgagaggatgctagagtcttatgtcatagctagagacagattacttgctccagatggtaaaatgtttccaacaaccggaaggattcatatggctccattttctgacgaatacctttatgttgaaatggcaaacaaggctctcttttggcagcagcacaatttttttggtgttgatctcacacctttacatggttcagcattccagggatacttttcacagcctgttgtggatgcatttgacccaagattattaatttctccaccaacatatcatacacttgattttactagcatgaaggaagaggagctttacgagattaatattcctctgagctttgtagcttctgttggcactagagtacatggactagcttgttggtttgatgtattgtttaatgggagcactgtgcaaaggtggcttaccactgctccaggatcccctacaactcactggtaccaactacgatgtgtgctttcacagccattgtatgtcatggccggccaagaaataactggccatcttcgtctcgtagcccatagtgctcaaagctacacaatatacttgacaatgtcagctaaaatgtggggtgtgggtgcggagcaaggcggtatcctacagacatctactgggaaacttgaactgaaggagccatactacaggttgtctcagccacaatcctgcacgttgccacaagatcagcaacagcagcaattgccatctttgcaggcacagggatcggagcagcagatgcaggaagggctcagcccagccttcacgatagaccaagattgcctcaactagacagcctggagtcgcgtatgctaggattccagcaacgagctgaggtctgtacaagcacaagagtttagagtagccgatattgtcaggcgttagctgccaaaggctaatatcacgatcgaggtgtaccgtgtacgagaccattcctgagttgcgcagctggcagctaaactgcggtcgcgccttctccgagggaatcgagaaaaaggaaattataaagtgtatttggtttcaggcacgtcagttgcttcatacaact

SEQ ID NO: 22968 - DNA, 3757 bp, Zea Mays
gccgatccgaggccaaagggagggaggagacccctttccctctcgccgccgcacgatggtcgacaccaggcggagctccgcggccaagcgccggggcccgtccgaggactcctccccgtcgccgccgacgacgcaggcggacccgacgacggcgggcttgccggtggagcccgcgtcgcccccgccgtcgtccgggagccgatcgggcaagcgcgccaaggtcgcggttgcgcgggcggaggaccccggtgcgccgcgcggcaaggcggtggaccccgccgcggtcgacgtgctcgacagctccgtggcgaacctgcagggcgtggcgaggccgccggccgccaacgtggccgcgtcctccgccgtgtccaattccgtagggaggaggaagaggaatcagtctgtgagggcgatcccgacgggcgaggggacgctctggaagccgaggcccgccggtggccgcgctgaggcctggggcagattgatttcccagtcttccgagtatccctcaattccaatttatactactcatttcactattggcaatggcggaaagtgtgacttgaaactcactgagacatctcctgggccacttatttgcaaactgaagcatgttaagaggggtgctgcccttgagatctacatgaacaaagttgtccatgtcaatgggaaggccttggacaaagctgctaaagtcaccttgatcggtggtgatgaagtcatgtttgtttctcttgggacacatgcttatatatttcagcaacttctagaggaaaaagcaagcacaccatctttgtgttcaaaatgtgtcattcaacaagaacaatatccagttgtcaaagataaggagatagtcagcagtttatgtaagactgtgggggagcaaagctaccacccttctgaggaaaatatgacatttggtcgacaccaacttttgaaggatgatttgaagaaagcagctataagtgcaagtgatatatcagaatcatttgataattttccatattatcttagtgaaaataccaaaaatgttcttttgtcatcatcgtatgtaaatctatgctgcaaggaatccactaagtggacaaaggatatatcttctctttgtaaaagggtactattatctggcccaccagggtctgagatctaccaagaattactggttaaggcacttaccaaatcctttggtgctaagctgcttgtcatagattattcgctgctgtctggtgggcagccttcaaagtcaaaggaatcaaaaccatacaaaaaaggtgatagggtgaggtacattggtcctattcaatcatcagggtttatgtttgagggacagagagctcctgattatggttcacagggtgaagtgaggcttacttttgcggaaaatggatcctcaaaagttggagtcagatttgataaacagatccccgggggcattgatcttggaggcagttgtgagcttgatcatggcctattctgttcagttgattctctatgcctcgatggtccaggatgggaagatagagccaaacattcatttgatgttgtgtttgagtttgcctctgaagaaagtcaacaggtgcctgtaatcctatttctgaaggatgttgagaaaatatgtggaaataattacacctaccatggtctaaagaataagcttgaaagtttcccagctggagtttttattgttgggtcccagattcagacagatgctcggaaagataagtcaaacaatgggtctccttggctcaagttctcatatagccaagcagcaatacttgaccttgcatttcaggatagctttggtcgggcgggtgaaaaaaataaagaagcactcaagatgtcaaagcatataactaaacttttcccaaataaagtgacaattgaatcacctgaggatgaaacggaactctcccagtggaaacagctattgggtcgtgacattgaaattcttaaggcaaaggctaattttttgaaaatacaatcttttctaacccgccatggtatggaatgtactgatttagaatcagtggtttgtgttaaagatcgtaatctgacaagcgaatgtgtcgataaaatagttggttatgctttgagttatcaactcaaggatcaccctattcaaactcctggaaaggatgcgagagttgtcctttccggtgtaagccttaagtatggaattgatttgttggaaagtatccaaagtggccctaagaagaagagcacaaagaagtcactcaaggatgttgtcacagagaatgaatttgaaaaacgtcttcttccagatgtcatccctccagatgagattggtgttacctttgaggatattggagcattagaaaatgtcaaggaaactttgcaggagttagttatgcttcctttgcaaaggcctgagttgttctccaaaggacaacttatgaagccatgtaaagggatattgctttttggtccacctggcaccggtaagaccatgcttgccaaagctgttgcaacagaggctggtgctaattttatcaacatatcaatgtcaagcattgcttcaaagtggtttggagagggagaaaaatatgtgaaagctgttttttcacttgcaagcaaaatttctcctagtgttattttcgtggatgaggttgatggcatgctgggtagacgtgagaatccaggggaacatgaggccatgcgcaagatgaaaaatgagtttatggtgaactgggatggtcttaggacaaaagacaaagaacgtgttctggtacttgctgccactaataggccatttgatcttgacgaggctgttgtcaggaggctccccaggaggttgatggttaacttgccagatgcacccaacagaaagaagattcttagcgtgatactagcaaaagaagatttggcagatgatgtagatctggaggcgttagcaaacctgacagatgggtattcaggcagtgatctgaagaacctgtgtataactgcagcacatcgtcccataagggaaattcttgaaagagagaagaaggagagaaccttagctgaagcagaaaataggccagccccacctcagtgctgtagcggcgacgttcgctccctaaagtttagtgatttcaagcacgcacatgagcaggtttgtgcgagtatatcatcggattcaaaaaatatgaatgagctcgttcaatggaacgacctctacggagaaggcgggtcgaggcacaagacaccgttgagctactttatgtagcctaacgtttttttagatgatttgtacatacagaagcagcctttgtataggtgtgtttccagttaattttgctggaaacatttattcatgtcgggtttcgtttctataatcatatcagcttgtgtctgcatctagtgtagcctgagcttctgattagttattaatttatttcagtccgttggatcttgcgtcctggtatagtctgtgaaaggtctcgacggagattcatttggatttatttaatagtctggatgatatggtaatgtttgtgtgggtgtgtgcgtgacagagaaggttttacccttccctctgcactaggtatggcaaagaggaaattctccacaggtcctacgaacgcttgtggtggccatttcttttccatcttcgttattcgtggggataaatcctatcggaattccaattataattagatagtacttgatttgttattaatataaaacattgttacttatacacattatgtaaaaatctttatatatacattaaaatgagtacatttgtacaggg

SEQ ID NO: 22969 - DNA, 3917 bp, Zea Mays
gccgatccgaggccaaagggagggaggagacccctttccctctcgccgccgcacgatggtcgacaccaggcggagctccgcggccaagcgccggggcccgtccgaggactcctccccgtcgccgccgacgacgcaggcggacccgacgacggcgggcttgccggtggagcccgcgtcgcccccgccgtcgtccgggagccgatcgggcaagcgcgccaaggttgcgcgggcggaggaccccggtgcgccgcgcggcaaggcggtggaccccgccgcggtcgacgtgctcgacagctccgtggcgaacctgcagggcgtggcgaggccgccggccgccaacgtggccgcgtcctccgccgtgtccaattccgtaggtgcgttgggggttttccgcctggctgcgccgacgggatttacctttacggttgggtctgcttattcggctgcttttgtggttccagggaggaggaagaggaatcagtctgtgagggcgatcccgacgggcgaggggacgctctggaagccgaggcccgccggtggccgcgctgaggcctggggcagattgatttcccagtcttccgagtatccctcaattccaatttatactactcatttcactattggcaatggcggaaagtgtgacttgaaactcactgagacatctcctgggccacttatttgcaaactgaagcatgttaagaggggtgctgcccttgagatctacatgaacaaagttgtccatgtcaatgggaaggccttggacaaagctgctaaagtcaccttgatcggtggtgatgaagtcatgtttgtttctcttgggacacatgcttatatatttcagcaacttctagaggaaaaagcaagcacaccatctttgtgttcaaaatgtgtcattcaacaagaacaatatccagttgtcaaagataaggagatagtcagcagtttatgtaagactgtgggggagcaaagctaccacccttctgaggaaaatatgacatttggtcgacaccaacttttgaaggatgatttgaagaaagcagctataagtgcaagtgatatatcagaatcatttgataattttccatattatcttagtgaaaataccaaaaatgttcttttgtcatcatcgtatgtaaatctatgctgcaaggaatccactaagtggacaaaggatatatcttctctttgtaaaagggtactattatctggcccaccagggtctgagatctaccaagaattactggttaaggcacttaccaaatcctttggtgctaagctgcttgtcatagattattcgctgctgtctggtgggcagccttcaaagtcaaaggaatcaaaaccatacaaaaaaggtgatagggtgaggtacattggtcctattcaatcatcagggtttatgtttgagggacagagagctcctgattatggttcacagggtgaagtgaggcttacttttgcggaaaatggatcctcaaaagttggagtcagatttgataaacagatccccgggggcattgatcttggaggcagttgtgagcttgatcatggcctattctgttcagttgattctctatgcctcgatggtccaggatgggaagatagagccaaacattcatttgatgttgtgtttgagtttgcctctgaagaaagtcaacaggtgcctgtaatcctatttctgaaggatgttgagaaaatatgtggaaataattacacctaccatggtctaaagaataagcttgaaagtttcccagctggagtttttattgttgggtcccagattcagacagatgctcggaaagataagtcaaacaatgggtctccttggctcaagttctcatatagccaagcagcaatacttgaccttgcatttcaggatagctttggtcgggcgggtgaaaaaaataaagaagcactcaagatgtcaaagcatataactaaacttttcccaaataaagtgacaattgaatcacctgaggatgaaacggaactctcccagtggaaacagctattgggtcgtgacattgaaattcttaaggcaaaggctaattttttgaaaatacaatcttttctaacccgccatggtatggaatgtactgatttagaatcagtggtttgtgttaaagatcgtaatctgacaagcgaatgtgtcgataaaatagttggttatgctttgagttatcaactcaaggatcaccctattcaaactcctggaaaggatgcgagagttgtcctttccggtgtaagccttaagtatggaattgatttgttggaaagtatccaaagtggccctaagaagaagagcacaaagaagtcactcaaggatgttgtcacagagaatgaatttgaaaaacgtcttcttccagatgtcatccctccagatgagattggtgttacctttgaggatattggagcattagaaaatgtcaaggaaactttgcaggagttagttatgcttcctttgcaaaggcctgagttgttctccaaaggacaacttatgaagccatgtaaagggatattgctttttggtccacctggcaccggtaagaccatgcttgccaaagctgttgcaacagaggctggtgctaattttatcaacatatcaatgtcaagcattgcttcaaagtggtttggagagggagaaaaatatgtgaaagctgttttttcacttgcaagcaaaatttctcctagtgttattttcgtggatgaggttgatggcatgctgggtagacgtgagaatccaggggaacatgaggccatgcgcaagatgaaaaatgagtttatggtgaactgggatggtcttaggacaaaagacaaagaacgtgttctggtacttgctgccactaataggccatttgatcttgacgaggctgttgtcaggaggctccccaggaggttgatggttaacttgccagatgcacccaacagaaagaagattcttagcgtgatactagcaaaagaagatttggcagatgatgtagatctggaggcgttagcaaacctgacagatgggtattcaggcagtgatctgaaggtaggtattctattaagatatttctttcttatcctatttcctcgcttctttgtgttgttggcgacacctatttttgcagaacctgtgtataactgcagcacatcgtcccataagggaaattcttgaaagagagaagaaggagagaaccttagctgaagcagaaaataggccagccccacctcagtgctgtagcggcgacgttcgctccctaaagtttagtgatttcaagcacgcacatgagcaggtttgtgcgagtatatcatcggattcaaaaaatatgaatgagctcgttcaatggaacgacctctacggagaaggcgggtcgaggcacaagacaccgttgagctactttatgtagcctaacgtttttttagatgatttgtacatacagaagcagcctttgtataggtgtgtttccagttaattttgctggaaacatttattcatgtcgggtttcgtttctataatcatatcagcttgtgtctgcatctagtgtagcctgagcttctgattagttattaatttatttcagtccgttggatcttgcgtcctggtatagtctgtgaaaggtctcgacggagattcatttggatttatttaatagtctggatgatatggtaatgtttgtgtgggtgtgtgcgtgacagagaaggttttacccttccctctgcactaggtatggcaaagaggaaattctccacaggtcctacgaacgcttgtggtggccatttcttttccatcttcgttattcgtggggataaatcctatcggaattccaattataattagatagtacttgatttgttattaatataaaacattgttacttatacacattatgtaaaaatctttatatatacattaaaatgagtacatttgtacaggg

SEQ ID NO: 22970 - DNA, 3751 bp, Zea Mays
gccgatccgaggccaaagggagggaggagacccctttccctctcgccgccgcacgatggtcgacaccaggcggagctccgcggccaagcgccggggcccgtccgaggactcctccccgtcgccgccgacgacgcaggcggacccgacgacggcgggcttgccggtggagcccgcgtcgcccccgccgtcgtccgggagccgatcgggcaagcgcgccaaggtcgcggttgcgcgggcggaggaccccggtgcgccgcgcggcaaggcggtggaccccgccgcggtcgacgtgctcgacagctccgtggcgaacctgcagggcgtggcgaggccgccggccgccaacgtggccgcgtcctccgccgtgtccaattccgtagggaggaggaagaggaatcagtctgtgagggcgatcccgacgggcgaggggacgctctggaagccgaggcccgccggtggccgcgctgaggcctggggcagattgatttcccagtcttccgagtatccctcaattccaatttatactactcatttcactattggcaatggcggaaagtgtgacttgaaactcactgagacatctcctgggccacttatttgcaaactgaagcatgttaagaggggtgctgcccttgagatctacatgaacaaagttgtccatgtcaatgggaaggccttggacaaagctgctaaagtcaccttgatcggtggtgatgaagtcatgtttgtttctcttgggacacatgcttatatatttcagcaacttctagaggaaaaagcaagcacaccatctttgtgttcaaaatgtgtcattcaacaagaacaatatccagttgtcaaagataaggagatagtcagcagtttatgtaagactgtgggggagcaaagctaccacccttctgaggaaaatatgacatttggtcgacaccaacttttgaaggatgatttgaagaaagcagctataagtgcaagtgatatatcagaatcatttgataattttccatattatcttagtgaaaataccaaaaatgttcttttgtcatcatcgtatgtaaatctatgctgcaaggaatccactaagtggacaaaggatatatcttctctttgtaaaagggtactattatctggcccaccagggtctgagatctaccaagaattactggttaaggcacttaccaaatcctttggtgctaagctgcttgtcatagattattcgctgctgtctggtccttcaaagtcaaaggaatcaaaaccatacaaaaaaggtgatagggtgaggtacattggtcctattcaatcatcagggtttatgtttgagggacagagagctcctgattatggttcacagggtgaagtgaggcttacttttgcggaaaatggatcctcaaaagttggagtcagatttgataaacagatccccgggggcattgatcttggaggcagttgtgagcttgatcatggcctattctgttcagttgattctctatgcctcgatggtccaggatgggaagatagagccaaacattcatttgatgttgtgtttgagtttgcctctgaagaaagtcaacaggtgcctgtaatcctatttctgaaggatgttgagaaaatatgtggaaataattacacctaccatggtctaaagaataagcttgaaagtttcccagctggagtttttattgttgggtcccagattcagacagatgctcggaaagataagtcaaacaatgggtctccttggctcaagttctcatatagccaagcagcaatacttgaccttgcatttcaggatagctttggtcgggcgggtgaaaaaaataaagaagcactcaagatgtcaaagcatataactaaacttttcccaaataaagtgacaattgaatcacctgaggatgaaacggaactctcccagtggaaacagctattgggtcgtgacattgaaattcttaaggcaaaggctaattttttgaaaatacaatcttttctaacccgccatggtatggaatgtactgatttagaatcagtggtttgtgttaaagatcgtaatctgacaagcgaatgtgtcgataaaatagttggttatgctttgagttatcaactcaaggatcaccctattcaaactcctggaaaggatgcgagagttgtcctttccggtgtaagccttaagtatggaattgatttgttggaaagtatccaaagtggccctaagaagaagagcacaaagaagtcactcaaggatgttgtcacagagaatgaatttgaaaaacgtcttcttccagatgtcatccctccagatgagattggtgttacctttgaggatattggagcattagaaaatgtcaaggaaactttgcaggagttagttatgcttcctttgcaaaggcctgagttgttctccaaaggacaacttatgaagccatgtaaagggatattgctttttggtccacctggcaccggtaagaccatgcttgccaaagctgttgcaacagaggctggtgctaattttatcaacatatcaatgtcaagcattgcttcaaagtggtttggagagggagaaaaatatgtgaaagctgttttttcacttgcaagcaaaatttctcctagtgttattttcgtggatgaggttgatggcatgctgggtagacgtgagaatccaggggaacatgaggccatgcgcaagatgaaaaatgagtttatggtgaactgggatggtcttaggacaaaagacaaagaacgtgttctggtacttgctgccactaataggccatttgatcttgacgaggctgttgtcaggaggctccccaggaggttgatggttaacttgccagatgcacccaacagaaagaagattcttagcgtgatactagcaaaagaagatttggcagatgatgtagatctggaggcgttagcaaacctgacagatgggtattcaggcagtgatctgaagaacctgtgtataactgcagcacatcgtcccataagggaaattcttgaaagagagaagaaggagagaaccttagctgaagcagaaaataggccagccccacctcagtgctgtagcggcgacgttcgctccctaaagtttagtgatttcaagcacgcacatgagcaggtttgtgcgagtatatcatcggattcaaaaaatatgaatgagctcgttcaatggaacgacctctacggagaaggcgggtcgaggcacaagacaccgttgagctactttatgtagcctaacgtttttttagatgatttgtacatacagaagcagcctttgtataggtgtgtttccagttaattttgctggaaacatttattcatgtcgggtttcgtttctataatcatatcagcttgtgtctgcatctagtgtagcctgagcttctgattagttattaatttatttcagtccgttggatcttgcgtcctggtatagtctgtgaaaggtctcgacggagattcatttggatttatttaatagtctggatgatatggtaatgtttgtgtgggtgtgtgcgtgacagagaaggttttacccttccctctgcactaggtatggcaaagaggaaattctccacaggtcctacgaacgcttgtggtggccatttcttttccatcttcgttattcgtggggataaatcctatcggaattccaattataattagatagtacttgatttgttattaatataaaacattgttacttatacacattatgtaaaaatctttatatatacattaaaatgagtacatttgtacaggg

SEQ ID NO: 22971 - DNA, 3416 bp, Zea Mays
ttgcaatccattcctaacttgtttctgaatgagcaaaatgtctgaattggatactagagctaatgcggattggtgtgctgtatcacatcatgcatgagtatccctcaattccaatttatactactcatttcactattggcaatggcggaaagtgtgacttgaaactcactgagacatctcctgggccacttatttgcaaactgaagcatgttaagaggggtgctgcccttgagatctacatgaacaaagttgtccatgtcaatgggaaggccttggacaaagctgctaaagtcaccttgatcggtggtgatgaagtcatgtttgtttctcttgggacacatgcttatatatttcagcaacttctagaggaaaaagcaagcacaccatctttgtgttcaaaatgtgtcattcaacaagaacaatatccagttgtcaaagtgggtatgggaaacccgttgggtacccgaaacccgcttgggtatgagtttgggcaaaattttatacccgtcatggataaggagatagtcagcagtttatgtaagactgtgggggagcaaagctaccacccttctgaggaaaatatgacatttggtcgacaccaacttttgaaggatgatttgaagaaagcagctataagtgcaagtgatatatcagaatcatttgataattttccatattatcttagtgaaaataccaaaaatgttcttttgtcatcatcgtatgtaaatctatgctgcaaggaatccactaagtggacaaaggatatatcttctctttgtaaaagggtactattatctggcccaccagggtctgagatctaccaagaattactggttaaggcacttaccaaatcctttggtgctaagctgcttgtcatagattattcgctgctgtctggtgctgtactaatcctgctcatggtttcctcaggtgatagggtgaggtacattggtcctattcaatcatcagggtttatgtttgagggacagagagctcctgattatggttcacagggtgaagtgaggcttacttttgcggaaaatggatcctcaaaagttggagtcagatttgataaacagatccccgggggcattgatcttggaggcagttgtgagcttgatcatggcctattctgttcagttgattctctatgcctcgatggtccaggatgggaagatagagccaaacattcatttgatgttgtgtttgagtttgcctctgaagaaagtcaacaggtgcctgtaatcctatttctgaaggatgttgagaaaatatgtggaaataattacacctaccatggtctaaagaataagcttgaaagtttcccagctggagtttttattgttgggtcccagattcagacagatgctcggaaagataagtcaaacaatgggtctccttggctcaagttctcatatagccaagcagcaatacttgaccttgcatttcaggatagctttggtcgggcgggtgaaaaaaataaagaagcactcaagatgtcaaagcatataactaaacttttcccaaataaagtgacaattgaatcacctgaggatgaaacggaactctcccagtggaaacagctattgggtcgtgacattgaaattcttaaggcaaaggctaattttttgaaaatacaatcttttctaacccgccatggtatggaatgtactgatttagaatcagtggtttgtgttaaagatcgtaatctgacaagcgaatgtgtcgataaaatagttggttatgctttgagttatcaactcaaggatcaccctattcaaactcctggaaaggatgcgagagttgtcctttccggtgtaagccttaagtatggaattgatttgttggaaagtatccaaagtggccctaagaagaagagcacaaagaagtcactcaaggatgttgtcacagagaatgaatttgaaaaacgtcttcttccagatgtcatccctccagatgagattggtgttacctttgaggatattggagcattagaaaatgtcaaggaaactttgcaggagttagttatgcttcctttgcaaaggcctgagttgttctccaaaggacaacttatgaagccatgtaaagggatattgctttttggtccacctggcaccggtaagaccatgcttgccaaagctgttgcaacagaggctggtgctaattttatcaacatatcaatgtcaagcattgcttcaaagtggtttggagagggagaaaaatatgtgaaagctgttttttcacttgcaagcaaaatttctcctagtgttattttcgtggatgaggttgatggcatgctgggtagacgtgagaatccaggggaacatgaggccatgcgcaagatgaaaaatgagtttatggtgaactgggatggtcttaggacaaaagacaaagaacgtgttctggtacttgctgccactaataggccatttgatcttgacgaggctgttgtcaggaggctccccaggaggttgatggttaacttgccagatgcacccaacagaaagaagattcttagcgtgatactagcaaaagaagatttggcagatgatgtagatctggaggcgttagcaaacctgacagatgggtattcaggcagtgatctgaagaacctgtgtataactgcagcacatcgtcccataagggaaattcttgaaagagagaagaaggagagaaccttagctgaagcagaaaataggccagccccacctcagtgctgtagcggcgacgttcgctccctaaagtttagtgatttcaagcacgcacatgagcaggtttgtgcgagtatatcatcggattcaaaaaatatgaatgagctcgttcaatggaacgacctctacggagaaggcgggtcgaggcacaagacaccgttgagctactttatgtagcctaacgtttttttagatgatttgtacatacagaagcagcctttgtataggtgtgtttccagttaattttgctggaaacatttattcatgtcgggtttcgtttctataatcatatcagcttgtgtctgcatctagtgtagcctgagcttctgattagttattaatttatttcagtccgttggatcttgcgtcctggtatagtctgtgaaaggtctcgacggagattcatttggatttatttaatagtctggatgatatggtaatgtttgtgtgggtgtgtgcgtgacagagaaggttttacccttccctctgcactaggtatggcaaagaggaaattctccacaggtcctacgaacgcttgtggtggccatttcttttccatcttcgttattcgtggggataaatcctatcggaattccaattataattagatagtacttgatttgttattaatataaaacattgttacttatacacattatgtaaaaatctttatatatacattaaaatgagtacatttgtacaggg

SEQ ID NO: 22972 - DNA, 2424 bp, Zea Mays
caacgacgtaatatatttgtgaacggaggggcagccttcaaagtcaaaggaatcaaaaccatacaaaaaaggtgatagggtgaggtacattggtcctattcaatcatcagggtttatgtttgagggacagagagctcctgattatggttcacagggtgaagtgaggcttacttttgcggaaaatggatcctcaaaagttggagtcagatttgataaacagatccccgggggcattgatcttggaggcagttgtgagcttgatcatggcctattctgttcagttgattctctatgcctcgatggtccaggatgggaagatagagccaaacattcatttgatgttgtgtttgagtttgcctctgaagaaagtcaacaggtgcctgtaatcctatttctgaaggatgttgagaaaatatgtggaaataattacacctaccatggtctaaagaataagcttgaaagtttcccagctggagtttttattgttgggtcccagattcagacagatgctcggaaagataagtcaaacaatgggtctccttggctcaagttctcatatagccaagcagcaatacttgaccttgcatttcagctttggtcgggcgggtgaaaaaaataaagaagcactcaagatgtcaaagcatataactaaacttttcccaaataaagtgacaattgaatcacctgaggatgaaacggaactctcccagtggaaacagctattgggtcgtgacattgaaattcttaaggcaaaggctaattttttgaaaatacaatcttttctaacccgccatggtatggaatgtactgatttagaatcagtggtttgtgttaaagatcgtaatctgacaagcgaatgtgtcgataaaatagttggttatgctttgagttatcaactcaaggatcaccctattcaaactcctggaaaggatgcgagagttgtcctttccggtgtaagccttaagtatggaattgatttgttggaaagtatccaaagtggccctaagaagaagagcacaaagaagtcactcaaggatgttgtcacagagaatgaatttgaaaaacgtcttcttccagatgtcatccctccagatgagattggtgttacctttgaggatattggagcattagaaaatgtcaaggaaactttgcaggagttagttatgcttcctttgcaaaggcctgagttgttctccaaaggacaacttatgaaggttgatggcatgctgggtagacgtgagaatccaggggaacatgaggccatgcgcaagatgaaaaatgagtttatggtgaactgggatggtcttaggacaaaagacaaagaacgtgttctggtacttgctgccactaataggccatttgatcttgacgaggctgttgtcaggaggctccccaggaggttgatggttaacttgccagatgcacccaacagaaagaagattcttagcgtgatactagcaaaagaagatttggcagatgatgtagatctggaggcgttagcaaacctgacagatgggtattcaggcagtgatctgaaggtaggtattctattaagatatttctttcttatcctatttcctcgcttctttgtgttgttggcgacacctatttttgcagaacctgtgtataactgcagcacatcgtcccataagggaaattcttgaaagagagaagaaggagagaaccttagctgaagcagaaaataggccagccccacctcagtgctgtagcggcgacgttcgctccctaaagtttagtgatttcaagcacgcacatgagcaggtttgtgcgagtatatcatcggattcaaaaaatatgaatgagctcgttcaatggaacgacctctacggagaaggcgggtcgaggcacaagacaccgttgagctactttatgtagcctaacgtttttttagatgatttgtacatacagaagcagcctttgtataggtgtgtttccagttaattttgctggaaacatttattcatgtcgggtttcgtttctataatcatatcagcttgtgtctgcatctagtgtagcctgagcttctgattagttattaatttatttcagtccgttggatcttgcgtcctggtatagtctgtgaaaggtctcgacggagattcatttggatttatttaatagtctggatgatatggtaatgtttgtgtgggtgtgtgcgtgacagagaaggttttacccttccctctgcactaggtatggcaaagaggaaattctccacaggtcctacgaacgcttgtggtggccatttcttttccatcttcgttattcgtggggataaatcctatcggaattccaattataattagatagtacttgatttgttattaatataaaacattgttacttatacacattatgtaaaaatctttatatatacattaaaatgagtacatttgtacaggg

SEQ ID NO: 22973 - DNA, 110 bp, Zea Mays
ttcaggcggtggcaaaggagaaggtggtagtctccttgggctaggcaagcgcggtctcggtggtgatggtggttccgaaccatcaagaccatgtgactcctcccactgca

SEQ ID NO: 22974 - DNA, 1408 bp, Zea Mays
tgagaggttcgtgctgttgcgtttcgctccataaggctgtgaggtttgcctatacctggaccgttgtctttgtcattatgaatactcggacctgcagcgccacaagttgttggctgacctcctacttcagcattcaagctaactcttttttccatcctcgcagccaataactcatctgcaactgcctttgcagctggaaggggatcctccacaatgctgtggaggtcagcacagcttgctttgagcgcattcataaccttctcaacagctggtgttgaaattggatttgtgctgcaggtagatttttcaagtttgtcgagaatctcgcgcgttttttcttccccagctgtaagtttcatatcatataatcaattataggctacgaagtccacgaccttgcggacaccagaatcatagcaaattagaaaacataaaacatctagcagctaacaatgcacgtaaagacctagagctgtcccaaagagatgaaactcaaaatgctctacaaggatgcatagaattgcaaaatcaataagaagcatagatgcaggcatacaagaggatcctaaactaactgaaagcatcatcaaagatatgaacctattaaaatattgcagtggcgccatcaaaagtattcacaagattgaaaacatgtagtttgatataagataaacaagaaagtagaagcagcaaaattagcaaggatggagtacactcaaattataaggtctgtttgggatagcttcaacccatggttgcttcatagaggccaagatgaaataagacctctaaattccttctcatttttactatatcacaaaaatacagaaaagactcactacacactagtttcttgatcacaatgctgctgcaaaatccacccaaaaaacgagtcatcacccaagatgcgcaagttggcacgcatggcctcatctgcggcagcccatgtctcgacggccccatccccgacgatccgcatagccaacgcctcgagcctcgacgggccaatcgcggcccattcagcggcgaggagctcctggacccgctcctccacggcggcccggttgccccacaggcccctgagaatggtctgagaagaggacttcccgacggcagcctcgaactggtccactgtgacgatggcatcgtcggatgcgagcgcgggggaacctccgccgtggaccgcttggcgcgcgcggccgtcggggcgcgcgaagagagccctggcgacggcgtcgaagtcgggcgcggaggccgcgaggaatgccgcgacggcgatgtgggcggctgcgatgggggaggcgcagggcgggagcgaggccaggaggtggagggtttcgagagaggattggagacggggtcggcggcgaggcggcggataaggaccccgcggcggaggcgcggggtc

SEQ ID NO: 22975 - DNA, 1864 bp, Zea Mays
gacgggatgcacctgcagaagcaagccgaccacgaccgcatggagccgggatggacatactgcggtaggcgacttttgagaagtgttgacgaagccagcgttgatgaacttatcctgcgaaccgaggatggagaaatccaagatgcatcactagcacgggtcctgattgtattgcctacggattcaatgttaaaacagatgagtatcttccgatcacgacatgaacgacttcgagctagcttgccttagtttacaaacaaaagacagtcccgccaagcattgtcgaatcgaagccacgagcacaaaatatacacgcatcatctgatcatctccctcagaatcagagccgattcgtcagcacgaggttcatcagcggaaaaataatcatcatctccgcaattctgcttaaagtcgactgactgaagattgcagaggatgcgagtagagtagtgcaccatttttattttgtcatcttcagacttcagtaacataacagaagcgtcagaggactgaggtctgagcctctgaggagggggagggagagggacagagctacagaggatgctacgcctgcggttccggccagctcccctgtcactgaagctggccttcaccgtctccctcgccgtctccttctccgtctcctgctgcgcctcctcctcatactcgtcccgcacatcatccagatcgccgcaggccgtagccgcggacctcctctccgtgctcgccggccctcgcgccgcggcgcgggtaccggcggcggaggcctcgcggctccgcgcctgcctccggttcctcgccccggccaaccccacggcccaaaaggtctcgtcttggagccgcggaggcccccggaagttcctcctcgatggttgcgatgcgggggcggctgaggcggacgagatggtgatgtggccgccggccccggtcttggacctggcgcggctggccgttgactccggaggcgatcccggtgccatccaccgcgcgctcgacccaacaatgctgccggtgccagatgttgagggttcccagaagaataaatgccatctcacaagaacaccgtatgggaggcgctttgccaatgaggagatcaattcatattttgcattcttgttcgaattgattgtggcacgggcaccttcggttggattaaatgtatcactgaatcgctatgatttgttccatgggcatcttttccttgcatcggagacaggacggcttggaattctgttccatgctaaagaatacccagcatttaacaaggaattgtttccttataatttgggatattgccaggcaggatctaatgtaccatatgatgattcgatgaatttgcgcaatgtactttggttagcacctttgccatcaaaggagacaaaagcttggttagcaccaggttcggcgatactgaacactcaaccatgttcatgagtactagttgtcttggacgcacatcctgatggaattatctatcaagagatgatacgtgactatgttcagattgttagaacagtatacgaagatgatcttggggagaacacagttgatgtcaattatctgaatgtggcaaatgcagctcccgtagatagaatttacatttgttgaagtcatatgtaccgctatttgttttcccatggtgtgatttgatttgatttctgagaaccggacgtcaatgcatcatcctcatgtccaccaaagcaattgttcccgttcccatgaccgctgctgtgtatttcacatgtttatttgtttaattaaaaatgctcaacgaagcaacgatttgttgttaagttttacagtgtgctgttttgtacattccgtacacttttatctttgattgtgttgagtttgagtgtacagg

SEQ ID NO: 22976 - DNA, 1820 bp, Zea Mays
gacgggatgcacctgcagaagcaagccgaccacgaccgcatggagccgggatggacatactgcggtaggcgacttttgagaagtgttgacgaagccagcgttgatgaacttatcctgcgaaccgaggatggagaaatccaagatgcatcactagcacgggtcctgattgtattgcctacggattcaatgttaaaacagatgagtatcttccgatcacgacatgaacgacttcgagctagcttgccttagtttacaaacaaaagacagtcccgccaagcattgtcgaatcgaagccacgagcacaaaatatacacgcatcatctgatcatctccctcagaatcagagccgattcgtcagcacgaggttcatcagcggaaaaataatcatcatctccgcaattctgcttaaagtcgactgactgaagattgcagaggatgcgagtagagtagtgcaccatttttattttgtcatcttcagacttcagtaacataacagaagcgtcagaggactgaggtctgagcctctgaggagggggagggagagggacagagctacagaggatgctacgcctgcggttccggccagctcccctgtcactgaagctggccttcaccgtctccctcgccgtctccttctccgtctcctgctgcgcctcctcctcatactcgtcccgcacatcatccagatcgccgcaggccgtagccgcggacctcctctccgtgctcgccggccctcgcgccgcggcgcgggtaccggcggcggaggcctcgcggctccgcgcctgcctccggttcctcgccccggccaaccccacggcccaaaaggtctcgtcttggagccgcggaggcccccggaagttcctcctcgatggttgcgatgcgggggcggctgaggcggacgagatggtgatgtggccgccggccccggtcttggacctggcgcggctggccgttgactccggaggcgatcccggtgccatccaccgcgcgctcgacccaacaatgctgccggtgccagatgttgagggttcccagaagaataaatgccatctcacaagaacaccgtatgggaggcgctttgccaatgaggagatcaattcatattttgcattcttgttcgaattgattgtggcacgggcaccttcggttggattaaatgtatcactgaatcgctatgatttgttccatgggcatcttttccttgcatcggagacaggacggcttggaattctgttccatgctaaagaatacccagcatttaacaaggaattgtttccttataatttgggatattgccaggcaggatctaatgtaccatatgatgattcgatgaatttgcgcaatgtactttggttagcacctttgccatcaaaggagacaaaagcttggagtactagttgtcttggacgcacatcctgatggaattatctatcaagagatgatacgtgactatgttcagattgttagaacagtatacgaagatgatcttggggagaacacagttgatgtcaattatctgaatgtggcaaatgcagctcccgtagatagaatttacatttgttgaagtcatatgtaccgctatttgttttcccatggtgtgatttgatttgatttctgagaaccggacgtcaatgcatcatcctcatgtccaccaaagcaattgttcccgttcccatgaccgctgctgtgtatttcacatgtttatttgtttaattaaaaatgctcaacgaagcaacgatttgttgttaagttttacagtgtgctgttttgtacattccgtacacttttatctttgattgtgttgagtttgagtgtacagg

SEQ ID NO: 22977 - DNA, 1393 bp, Zea Mays
gatgcacctgcagaagcaagccgaccacgaccgcatggagccgggatggacatactgcggtaggcgacttttgagaagtgttgacgaagccagcgttgatgaacttatcctgcgaaccgaggatggagaaatccaagatgcatcactagcacgggtcctgattgtattgcctacggattcaatgttaaaacagatgagtatcttccgatcacgacatgaacgacttcgagctagcttgccttagtttacaaacaaaagacagtcccgccaagcattgtcgaatcgaagccacgagcacaaaatatacacgcatcatctgatcatctccctcagaatcagagccgattcgtcagcacgaggttcatcagcggaaaaataatcatcatctccgcaattctgcttaaagtcgactgactgaagattgcagaggatgcgagtagagtagtgcaccatttttattttgtcatcttcagacttcagtaacataacagaagcgtcagaggactgaggtctgagcctctgaggagggggagggagagggacagagctacagaggatgctacgcctgcggttccggccagctcccctgtcactgaagctggccttcaccgtctccctcgccgtctccttctccgtctcctgctgcgcctcctcctcatactcgtcccgcacatcatccagatcgccgcaggccgtagccgcggacctcctctccgtgctcgccggccctcgcgccgcggcgcgggtaccggcggcggaggcctcgcggctccgcgcctgcctccggttcctcgccccggccaaccccacggcccaaaaggtctcgtcttggagccgcggaggcccccggaagttcctcctcgatggttgcgatgcgggggcggctgaggcggacgagatggtgatgtggccgccggccccggtcttggacctggcgcggctggccgttgactccggaggcgatcccggtgccatccaccgcgcgctcgacccaacaatgctgccggtgccagatgttgagggttcccagaagaataaatgccatctcacaagaacaccgtatgggaggcgctttgccaatgaggagatcaattcatattttgcattcttgttcgaattgattgtggcacgggcaccttcggttggattaaatgtatcactgaatcgctatgatttgttccatgggcatcttttccttgcatcggagacaggacggcttggaattctaactaaaacctacatcagcaaactgaagctggaagatggagttgcttgtaggggaaaggatggaacttggatattctgtaaactcttattagttgagttaaccacatatggagtgaagtcaagtttgatatctaggtttccataactcatatcaatataccatctt

SEQ ID NO: 22978 - DNA, 1818 bp, Zea Mays
cacctgcagaagcaagccgaccacgaccgcatggagccgggatggacatactgcggtaggcgacttttgagaagtgttgacgaagccagcgttgatgaacttatcctgcgaaccgaggatggagaaatccaagatgcatcactagcacgggtcctgattgtattgcctacggattcaatgttaaaacagatgagtatcttccgatcacgacatgaacgacttcgagctagcttgccttagtttacaaacaaaagacagtcccgccaagcattgtcgaatcgaagccacgagcacaaaatatacacgcatcatctgatcatctccctcagaatcagagccgattcgtcagcacgaggttcatcagcggaaaaataatcatcatctccgcaattctgcttaaagtcgactgactgaagattgcagaggatgcgagtagagtagtgcaccatttttattttgtcatcttcagacttcagtaacataacagaagcgtcagaggactgaggtctgagcctctgaggagggggagggagagggacagagctacagaggatgctacgcctgcggttccggccagctcccctgtcactgaagctggccttcaccgtctccctcgccgtctccttctccgtctcctgctgcgcctcctcctcatactcgtcccgcacatcatccagatcgccgcaggccgtagccgcggacctcctctccgtgctcgccggccctcgcgccgcggcgcgggtaccggcggcggaggcctcgcggctccgcgcctgcctccggttcctcgccccggccaaccccacggcccaaaaggtctcgtcttggagccgcggaggcccccggaagttcctcctcgatggttgcgatgcgggggcggctgaggcggacgagatggtgatgtggccgccggccccggtcttggacctggcgcggctggccgttgactccggaggcgatcccggtgccatccaccgcgcgctcgacccaacaatgctgccggtgccagatgttgagggttcccagaagaataaatgccatctcacaagaacaccgtatgggaggcgctttgccaatgaggagatcaattcatattttgcattcttgttcgaattgattgtggcacgggcaccttcggttggattaaatgtatcactgaatcgctatgatttgttccatgggcatcttttccttgcatcggagacaggacggcttggaattctgttccatgctaaagaatacccagcatttaacaaggaattgtttccttataatttgggatattgccaggatctaatgtaccatatgatgattcgatgaatttgcgcaatgtactttggttagcacctttgccatcaaaggagacaaaagcttggttagcaccaggagtactagttgtcttggacgcacatcctgatggaattatctatcaagagatgatacgtgactatgttcagattgttagaacagtatacgaagatgatcttggggagaacacagttgatgtcaattatctgaatgtggcaaatgcagctcccgtagatagaatttacatttgttgaagtcatatgtaccgctatttgttttcccatggtgtgatttgatttgatttctgagaaccggacgtcaatgcatcatcctcatgtccaccaaagcaattgttcccgttcccatgaccgctgctgtgtatttcacatgtttatttgtttaattaaaaatgctcaacgaagcaacgatttgttgttaagttttacagtgtgctgttttgtacattccgtacacttttatctttgattgtgttgagtttgagtgtacagg

SEQ ID NO: 22979 - DNA, 2150 bp, Zea Mays
cgcatggagccgggatggacatactgcggtaggcgacttttgagaagtgttgacgaagccagcgttgatgaacttatcctgcgaaccgaggatggagaaatccaagatgcatcactagcacgggtcctgattgtattgcctacggattcaatgttaaaacagatgagtatcttccgatcacgacatgaacgacttcgagctagcttgccttagtttacaaacaaaagacagtcccgccaagcattgtcgaatcgaagccacgagcacaaaatatacacgcatcatctgatcatctccctcagaatcagagccgattcgtcagcacgaggttcatcagcggaaaaataatcatcatctccgcaattctgcttaaagtcgactgactgaagattgcagaggatgcgagtagagtagtgcaccatttttattttgtcatcttcagacttcagtaacataacagaagcgtcagaggactgaggtctgagcctctgaggagggggagggagagggacagagctacagaggatgctacgcctgcggttccggccagctcccctgtcactgaagctggccttcaccgtctccctcgccgtctccttctccgtctcctgctgcgcctcctcctcatactcgtcccgcacatcatccagatcgccgcaggccgtagccgcggacctcctctccgtgctcgccggccctcgcgccgcggcgcgggtaccggcggcggaggcctcgcggctccgcgcctgcctccggttcctcgccccggccaaccccacggcccaaaaggtctcgtcttggagccgcggaggcccccggaagttcctcctcgatggttgcgatgcgggggcggctgaggcggacgagatggtgatgtggccgccggccccggtcttggacctggcgcggctggccgttgactccggaggcgatcccggtgccatccaccgcgcgctcgacccaacaatgctgccggtgccagatgttgagggttcccagaagaataaatgccatctcacaagaacaccgtatgggaggcgctttgccaatgaggagatcaattcatattttgcattcttgttcgaattgattgtggcacgggcaccttcggttggattaaatgtatcactgaatcgctatgatttgttccatgggcatcttttccttgcatcggagacaggacggcttggaattctgaggagttgcgtgtcatttcattaagaggaagaaccgagtacagctagaggaaagtatcctcaaataccatacaacactctgaaaatagaataaagtaaaaaataacaacagaacaacccagatacaagactagcataggaatagatgtgtctttgatggatgtaatcctagcttgatcacagcccttatggtggctagggaagaggcggtcctctagtccatgactggagccaaggccctgtctttcctccaggtcgaagagttgctggcttaaaactcaaagaagtgggtaatgagccgaagtgtatggaaatactgatttttttactcatgatgtttctattttttatgtaggttccatgctaaagaatacccagcatttaacaaggaattgtttccttataatttgggatattgccaggcaggatctaatgtaccatatgatgattcgatgaatttgcgcaatgtactttggttagcacctttgccatcaaaggagacaaaagcttggttagcaccaggagtactagttgtcttggacgcacatcctgatggaattatctatcaagagatgatacgtgactatgttcagattgttagaacagtatacgaagatgatcttggggagaacacagttgatgtcaattatctgaatgtggcaaatgcagctcccgtagatagaatttacatttgttgaagtcatatgtaccgctatttgttttcccatggtgtgatttgatttgatttctgagaaccggacgtcaatgcatcatcctcatgtccaccaaagcaattgttcccgttcccatgaccgctgctgtgtatttcacatgtttatttgtttaattaaaaatgctcaacgaagcaacgatttgttgttaagttttacagtgtgctgttttgtacattccgtacacttttatctttgattgtgttgagtttgagtgtacagg

SEQ ID NO: 22980 - DNA, 2309 bp, Zea Mays
cctagatctatttcggcgttttgcgtgtccatttacctagagaaagccaagtaccaaaacctcttcccggcggccaaatctgatgttcccgattcaaattcccaccccggcggccgccggccttgttcgcacccttacaacgccgccgtcagctttccaatctaccacccacgcgccgtttctcagcggtgtcattaacagcgctgcagcccgcagctgccgcaagcgccgctacgccgatgcccacgagggcgcctcctcacctcgccgccgccgccgccgccgcttcctcctcgtccccaactcgttcctggccggccggtccttcgctctccgtactctcgctagcgccctccacaagcgccgccacgacgccgccacctcctcggctcgcccctccagtcgccgcctccgccttctaagccccgtccttttccccgccctccggccgcttagcccccgcgtttcgctagccaccgccccgcgtagccaccgcaagattcacgtcgacgacgcccgccgcgccgtctctactccctgtcgccgccgcagacgtagcagtctgcttcccagggtcagacacttccgcccattcgcactccgtttcctcctcacgcccggtgcattaagccctcaccgtcgccggaaacccgccgaggtagacatgggcaacctcatctcacagttactgtggaagagcaccagggacggtgtatcagaggcgcacacgaagcggctcgatgggtcgccggaagtggtggatctcacagtggagccagagcttgaaaataacgatgccgtggggaggatgtttggagaccggagcgtccctgcactggggtcatcaaagtcgccggagaagaaggcaacgttctacgaggagccgcacggtagaagattacaggagtcaggattcaagaagctcaagcttgccgagctgcctgatccgctggacaatacgtctaaggaggatctatctgaactattcacacctctaagtgacaaagacgaaagagaagtcaatgctctgttgtgtagtagtgatgacagtgataaaatcgtagtgatacatacgccttctaacatcgagattactaaagagaaacttcaatgcttgaggcctcgtgggtggttgaatgatgaggtcattaatctgtacattgaactgttaaaggagagggaaaaaagggaacccaacaggtttttgaaatgccatttcttcaatacattcttctacaagaggcttacttgcggaatagctggttatgattaccagtctgttaggagatggacaacattcaagaggctgggttatggacttgtcgagtgtgagaaaatctttgttccagtgcatagaaatgcacattggtgtttggcactaataaacatgaaggataaaacattgcagtatcttgaatctcttgttggttggggccgtgatgtactggacatactggctagatacatcgtggatgaattgaaggacaagagtaacatagaggtagaacctagttcgtggactgtagtgtcagagtctttgcccttgcagcagaacgggtgggactgtggcatgtttatgcttaaatacattgatttccatagcagaggtatcaaaccatctttcagtcaggaacacatgatgtattttaggaaacgaatagcaaaagagatcatggcattaagagccgactgaagaacaccattctgacattgtctcaagtcagatggataaacaactgtgaacctaggagcaacttcaaacttttcaggttcaaatcataaagctgtaccgagctggacacatgtctgcacttgaacaacaaaccaccaaccactacagtttctctatttctctagttagctaggagcacaaggcagaacattgaatgctgatagagggtagatcaccccatttcacaaaaacttgtggcaaaccaatagcaatcttaacaaatcgaatcatcttcccaccagtagaaatgtgactgactggctacttagatgcctaaaaatgctctgcacagtgactcccaatgctccttagccaggcgaacacgttcaactcgctccaaccgcgttctcttctaagggcttgtgcttacctgtgtctcagcagcatgttgagtgcatccaggtgcatagcgtcagaaaagaccccttgctgaacatcaactggtgtgacggatgcagcagaacagcagcataggtagcagaatatgtggccacatgaaagagagaccggatcaaacattgtgtcctgtaaataaataaaacatggaaggatgaagagtttggttatggattttaaa

SEQ ID NO: 22981 - DNA, 2410 bp, Zea Mays
cttcccggcggccaaatctgatgttcccgattcaaattcccaccccggcggccgccggccttgttcgcacccttacaacgccgccgtcagctttccaatctaccacccacgcgccgtttctcagcggtgtcattaacagcgctgcagcccgcagctgccgcaagcgccgctacgccgatgcccacgagggcgcctcctcacctcgccgccgccgccgccgccgcttcctcctcgtccccaactcgttcctggccggccggtccttcgctctccgtactctcgctagcgccctccacaagcgccgccacgacgccgccacctcctcggctcgcccctccagtcgccgcctccgccttctaagccccgtccttttccccgccctccggccgcttagcccccgcgtttcgctagccaccgccccgcgtagccaccgcaagattcacgtcgacgacgcccgccgcgccgtctctactccctgtcgccgccgcagacgtagcagtctgcttcccagggtcagacacttccgcccattcgcactccgtttcctcctcacgcccggtgcattaagccctcaccgtcgccggaaacccgccgaggtagacatgggcaacctcatctcacagttactgtggaagagcaccagggacggtgtatcagaggcgcacacgaagcggctcgatgggtcgccggaagtggtggatctcacagtggagccagagcttgaaaataacgatgccgtggggaggatgtttggagaccggagcgtccctgcactggggtcatcaaagtcgccggagaagaaggcaacgttctacgaggagccgcacggtagaagattacaggagtcaggattcaagaagctcaagcttgccgagctgcctgatccgctggacaatacgtctaaggaggatctatctgaactattcacacctctaagtgacaaagacgaaagagaagtcaatgctctgttgtgtagtagtgatgacagtgataaaatcgtagtgatacatacgccttctaacatcgagattactaaagagaaacttcaatgcttgaggcctcgtgggtggttgaatgatgaggtcattaatctgtacattgaactgttaaaggagagggaaaaaagggaacccaacagcttacttgcggaatagctggttatgattaccagtctgttaggagatggacaacattcaagaggctgggttatggacttgtcgagtgtgagaaaatctttgttccagtgcatagaaatgcacattggtgtttggcactaataaacatgaaggataaaacattgcagtatcttgaatctcttgttggttggggccgtgatgtactggacatactggctagatacatcgtggatgaattgaaggacaagagtaacatagaggtagaacctagttcgtggactgtagtgtcagagtctttgcccttgcagcagaacgggtatgccttccttctagtactaatcaccataaaatccagcatgtggcgctgattgatttgattaaggaaggaattcatataaagtattaaattccagtcaacgcattactatttttcaacgtccaagtgttttctattttgaatccgtgttgtgcacattaatgggcaagcatgagactatctttgacattattctctcgttataggtgggactgtggcatgtttatgcttaaatacattgatttccatagcagaggtatcaaaccatctttcagtcaggaacacatgatgtattttaggaaacgaatagcaaaagagatcatggcattaagagccgactgaagaacaccattctgacattgtctcaagtcagatggataaacaactgtgaacctaggagcaacttcaaacttttcaggttcaaatcataaagctgtaccgagctggacacatgtctgcacttgaacaacaaaccaccaaccactacagtttctctatttctctagttagctaggagcacaaggcagaacattgaatgctgatagagggtagatcaccccatttcacaaaaacttgtggcaaaccaatagcaatcttaacaaatcgaatcatcttcccaccagtagaaatgtgactgactggctacttagatgcctaaaaatgctctgcacagtgactcccaatgctccttagccaggcgaacacgttcaactcgctccaaccgcgttctcttctaagggcttgtgcttacctgtgtctcagcagcatgttgagtgcatccaggtgcatagcgtcagaaaagaccccttgctgaacatcaactggtgtgacggatgcagcagaacagcagcataggtagcagaatatgtggccacatgaaagagagaccggatcaaacattgtgtcctgtaaataaataaaacatggaaggatgaagagtttggttatggattttaaa

SEQ ID NO: 22982 - DNA, 2241 bp, Zea Mays
atgttcccgattcaaattcccaccccggcggccgccggccttgttcgcacccttacaacgccgccgtcagctttccaatctaccacccacgcgccgtttctcagcggtgtcattaacagcgctgcagcccgcagctgccgcaagcgccgctacgccgatgcccacgagggcgcctcctcacctcgccgccgccgccgccgccgcttcctcctcgtccccaactcgttcctggccggccggtccttcgctctccgtactctcgctagcgccctccacaagcgccgccacgacgccgccacctcctcggctcgcccctccagtcgccgcctccgccttctaagccccgtccttttccccgccctccggccgcttagcccccgcgtttcgctagccaccgccccgcgtagccaccgcaagattcacgtcgacgacgcccgccgcgccgtctctactccctgtcgccgccgcagacgtagcagtctgcttcccagggtcagacacttccgcccattcgcactccgtttcctcctcacgcccggtgcattaagccctcaccgtcgccggaaacccgccgaggtagacatgggcaacctcatctcacagttactgtggaagagcaccagggacggtgtatcagaggcgcacacgaagcggctcgatgggtcgccggaagtggtggatctcacagtggagccagagcttgaaaataacgatgccgtggggaggatgtttggagaccggagcgtccctgcactggggtcatcaaagtcgccggagaagaaggcaacgttctacgaggagccgcacggtagaagattacaggagtcaggattcaagaagctcaagcttgccgagctgcctgatccgctggacaatacgtctaaggaggatctatctgaactattcacacctctaagtgacaaagacgaaagagaagtcaatgctctgttgtgtagtagtgatgacagtgataaaatcgtagtgatacatacgccttctaacatcgagattactaaagagaaacttcaatgcttgaggcctcgtgggtggttgaatgatgaggtcattaatctgtacattgaactgttaaaggagagggaaaaaagggaacccaacaggtttttgaaatgccatttcttcaatacattcttctacaagaggcttacttgcggaatagctggttatgattaccagtctgttaggagatggacaacattcaagaggctgggttatggacttgtcgagtgtgagaaaaatttatgacacagatctttgttccagtgcatagaaatgcacattggtgtttggcactaataaacatgaaggataaaacattgcagtatcttgaatctcttgttggttggggccgtgatgtactggacatactggctagatacatcgtggatgaattgaaggacaagagtaacatagaggtagaacctagttcgtggactgtagtgtcagagtctttgcccttgcagcagaacgggtgggactgtggcatgtttatgcttaaatacattgatttccatagcagaggtatcaaaccatctttcagtcaggaacacatgatgtattttaggaaacgaatagcaaaagagatcatggcattaagagccgactgaagaacaccattctgacattgtctcaagtcagatggataaacaactgtgaacctaggagcaacttcaaacttttcaggttcaaatcataaagctgtaccgagctggacacatgtctgcacttgaacaacaaaccaccaaccactacagtttctctatttctctagttagctaggagcacaaggcagaacattgaatgctgatagagggtagatcaccccatttcacaaaaacttgtggcaaaccaatagcaatcttaacaaatcgaatcatcttcccaccagtagaaatgtgactgactggctacttagatgcctaaaaatgctctgcacagtgactcccaatgctccttagccaggcgaacacgttcaactcgctccaaccgcgttctcttctaagggcttgtgcttacctgtgtctcagcagcatgttgagtgcatccaggtgcatagcgtcagaaaagaccccttgctgaacatcaactggtgtgacggatgcagcagaacagcagcataggtagcagaatatgtggccacatgaaagagagaccggatcaaacattgtgtcctgtaaataaataaaacatggaaggatgaagagtttggttatggattttaaa

SEQ ID NO: 22983 - DNA, 2603 bp, Zea Mays
atgttcccgattcaaattcccaccccggcggccgccggccttgttcgcacccttacaacgccgccgtcagctttccaatctaccacccacgcgccgtttctcagcggtgtcattaacagcgctgcagcccgcagctgccgcaagcgccgctacgccgatgcccacgagggcgcctcctcacctcgccgccgccgccgccgccgcttcctcctcgtccccaactcgttcctggccggccggtccttcgctctccgtactctcgctagcgccctccacaagcgccgccacgacgccgccacctcctcggctcgcccctccagtcgccgcctccgccttctaagccccgtccttttccccgccctccggccgcttagcccccgcgtttcgctagccaccgccccgcgtagccaccgcaagattcacgtcgacgacgcccgccgcgccgtctctactccctgtcgccgccgcagacgtagcagtctgcttcccagggtcagacacttccgcccattcgcactccgtttcctcctcacgcccggtgcattaagccctcaccgtcgccggaaacccgccgaggtagacatgggcaacctcatctcacagttactgtggaagagcaccagggacggtgtatcagaggcgcacacgaagcggctcgatgggtcgccggaagtggtggatctcacagtggagccagagcttgaaaataacgatgccgtggggaggatgtttggagaccggagcgtccctgcactggggtcatcaaagtcgccggagaagaaggcaacgttctacgaggagccgcacggtagaagattacaggagtcaggattcaagaagctcaagcttgccgagctgcctgatccgctggacaatacgtctaaggaggatctatctgaactattcacacctctaagtgacaaagacgaaagagaagtcaatgctctgttgtgtagtagtgatgacaggtatacttagcatatcctcatgttatggaacatttttcttcatattgctagcacaatcaaaggatattctggtttctcttatttttgtagtgataaaatcgtagtgatacatacgccttctaacatcgagattactaaagagaaacttcaatgcttgaggcctcgtgggtggttgaatgatgaggtcattaatctgtacattgaactgttaaaggagagggaaaaaagggaacccaacaggtttttgaaatgccatttcttcaatacattcttctacaagaggcttacttgcggaatagctggttatgattaccagtctgttaggagatggacaacattcaagaggctgggttatggacttgtcgagtgtgagaaaatctttgttccagtgcatagaaatgcacattggtgtttggcactaataaacatgaaggataaaacattgcagtatcttgaatctcttgttggttggggccgtgatgtactggacatactggctagatacatcgtggatgaattgaaggacaagagtaacatagaggtagaacctagttcgtggactgtagtgtcagagtctttgcccttgcagcagaacgggaacacatgatgtattttaggaaacgaatagcaaaagagatcatggcattaagagccgactgaagaacaccattctgacattgtctcaagtcaggtatttgctttcaaatagcagagatgtgattcttctaaggctgttggtgtgaattcaagtccatgtcgccacaccttttgtaggcttgtatttttttaggacctgattttggtagggaaaagaggggtaaggtaaaacaatgaaaaacgtaggagttcggaaatagttcggcaaaatggccacacctatgtaattgcattgaaactgactaaagctagtgcaaggaactgacacttagttttgttttgtgtttatttcaactcatatgttgtcgtggaaactaaagctagtgattgcacgactccccagtattaacatttcgtgagcgttttatgtatttgggaagtttttggttgcagatggataaacaactgtgaacctaggagcaacttcaaacttttcaggttcaaatcataaagctgtaccgagctggacacatgtctgcacttgaacaacaaaccaccaaccactacagtttctctatttctctagttagctaggagcacaaggcagaacattgaatgctgatagagggtagatcaccccatttcacaaaaacttgtggcaaaccaatagcaatcttaacaaatcgaatcatcttcccaccagtagaaatgtgactgactggctacttagatgcctaaaaatgctctgcacagtgactcccaatgctccttagccaggcgaacacgttcaactcgctccaaccgcgttctcttctaagggcttgtgcttacctgtgtctcagcagcatgttgagtgcatccaggtgcatagcgtcagaaaagaccccttgctgaacatcaactggtgtgacggatgcagcagaacagcagcataggtagcagaatatgtggccacatgaaagagagaccggatcaaacattgtgtcctgtaaataaataaaacatggaaggatgaagagtttggttatggattttaaa

SEQ ID NO: 22984 - DNA, 3236 bp, Zea Mays
atgttcccgattcaaattcccaccccggcggccgccggccttgttcgcacccttacaacgccgccgtcagctttccaatctaccacccacgcgccgtttctcagcggtgtcattaacagcgctgcagcccgcagctgccgcaagcgccgctacgccgatgcccacgagggcgcctcctcacctcgccgccgccgccgccgccgcttcctcctcgtccccaactcgttcctggccggccggtccttcgctctccgtactctcgctagcgccctccacaagcgccgccacgacgccgccacctcctcggctcgcccctccagtcgccgcctccgccttctaagccccgtccttttccccgccctccggccgcttagcccccgcgtttcgctagccaccgccccgcgtagccaccgcaagattcacgtcgacgacgcccgccgcgccgtctctactccctgtcgccgccgcagacgtagcagtctgcttcccagggtcagacacttccgcccattcgcactccgtttcctcctcacgcccggtgcattaagccctcaccgtcgccggaaacccgccgaggtagacatgggcaacctcatctcacagttactgtggaagagcaccagggacggtgtatcagaggcgcacacgaagcggctcgatgggtcgccggaagtggtggatctcacagtggagccagagcttgaaaataacgatgccgtggggaggatgtttggagaccggagcgtccctgcactggggtcatcaaagtcgccggagaagaaggcaacgttctacgaggagccgcacggtagaagattacaggagtcaggattcaagaagctcaagcttgccgagctgcctgatccgctggacaatacgtctaaggaggatctatctgaactattcacacctctaagtgacaaagacgaaagagaagtcaatgctctgttgtgtagtagtgatgacaggtatacttagcatatcctcatgttatggaacatttttcttcatattgctagcacaatcaaaggatattctggtttctcttatttttgtagtgataaaatcgtagtgatacatacgccttctaacatcgagattactaaagagaaacttcaatgcttgaggcctcgtgggtggttgaatgatgaggtcattaatctgtacattgaactgttaaaggagagggaaaaaagggaacccaacaggtttttgaaatgccatttcttcaatacattcttctacaagagggtattggattttcgcttcacatactgcatgcataaatatcctttgaaatgctggtcctattatatcatatttgagacttatggttttatactgcataggaagcagaagcattgccatttgggatttgatatttggttaatgaatggttcagtattgccaaagatggatgttatctgatagcagcaattttgatattagaaatttacttgcaaacatataagatattaagatcatataattacttatgaagaagcatctcctatatattacttggcctcctgtcagtttaatcgattcaaatactgtgattccagacccttgccttgaatgccaggcaatgcatgagtttggtcttcttatgttaaattgaacatttttcttattcttctggagttctcagaagctaattttgatgaattagtgtcctcattcctcttttggtctctaaattcactttctttttttaacacctagtttacaagcaaaggatgataaatttgtatcctagtatccccctgagcccacttagagcacctgcatttttctggaggctaactcttccttaaagtcataataagttatttttttctcatattttctatcatatggctagcacccagcactagcagacctcatcacttctgaattattgctcagcttacttgcggaatagctggttatgattaccagtctgttaggagatggacaacattcaagaggctgggttatggacttgtcgagtgtgagaaaatctttgttccagtgcatagaaatgcacattggtgtttggcactaataaacatgaaggataaaacattgcagtatcttgaatctcttgttggttggggccgtgatgtactggacatactggtaggcttatctgaccaaactgaaagttacactattcttagactagagtgcctgaattgcatggggttgcctttgcaaattattcatgtaatacttgtatatgttttttttgaaaggtatatataattgatattcattatcaagaaagcaaaattacaaagtacgatgttcttcataaaaggacccagcacaaaattaaagggcctgcaagatttctctattgttggattgaagcactacagttaaattttctgtctggcaggctagatacatcgtggatgaattgaaggacaagagtaacatagaggtagaacctagttcgtggactgtagtgtcagagtctttgcccttgcagcagaacgggtgggactgtggcatgtttatgcttaaatacattgatttccatagcagaggtatcaaaccatctttcagtcaggaacacatgatgtattttaggaaacgaatagcaaaagagatcatggcattaagagccgactgaagaacaccattctgacattgtctcaagtcagatggataaacaactgtgaacctaggagcaacttcaaacttttcaggttcaaatcataaagctgtaccgagctggacacatgtctgcacttgaacaacaaaccaccaaccactacagtttctctatttctctagttagctaggagcacaaggcagaacattgaatgctgatagagggtagatcaccccatttcacaaaaacttgtggcaaaccaatagcaatcttaacaaatcgaatcatcttcccaccagtagaaatgtgactgactggctacttagatgcctaaaaatgctctgcacagtgactcccaatgctccttagccaggcgaacacgttcaactcgctccaaccgcgttctcttctaagggcttgtgcttacctgtgtctcagcagcatgttgagtgcatccaggtgcatagcgtcagaaaagaccccttgctgaacatcaactggtgtgacggatgcagcagaacagcagcataggtagcagaatatgtggccacatgaaagagagaccggatcaaacattgtgtcctgtaaataaataaaacatggaaggatgaagagtttggttatggattttaaa

SEQ ID NO: 22985 - DNA, 2586 bp, Zea Mays
atgttcccgattcaaattcccaccccggcggccgccggccttgttcgcacccttacaacgccgccgtcagctttccaatctaccacccacgcgccgtttctcagcggtgtcattaacagcgctgcagcccgcagctgccgcaagcgccgctacgccgatgcccacgagggcgcctcctcacctcgccgccgccgccgccgccgcttcctcctcgtccccaactcgttcctggccggccggtccttcgctctccgtactctcgctagcgccctccacaagcgccgccacgacgccgccacctcctcggctcgcccctccagtcgccgcctccgccttctaagccccgtccttttccccgccctccggccgcttagcccccgcgtttcgctagccaccgccccgcgtagccaccgcaagattcacgtcgacgacgcccgccgcgccgtctctactccctgtcgccgccgcagacgtagcagtctgcttcccagggtcagacacttccgcccattcgcactccgtttcctcctcacgcccggtgcattaagccctcaccgtcgccggaaacccgccgaggtagacatgggcaacctcatctcacagttactgtggaagagcaccagggacggtgtatcagaggcgcacacgaagcggctcgatgggtcgccggaagtggtggatctcacagtggagccagagcttgaaaataacgatgccgtggggaggatgtttggagaccggagcgtccctgcactggggtcatcaaagtcgccggagaagaaggcaacgttctacgaggagccgcacggtagaagattacaggagtcaggattcaagaagctcaagcttgccgagctgcctgatccgctggacaatacgtctaaggaggatctatctgaactattcacacctctaagtgacaaagacgaaagagaagtcaatgctctgttgtgtagtagtgatgacagtgataaaatcgtagtgatacatacgccttctaacatcgagattactaaagagaaacttcaatgcttgaggcctcgtgggtggttgaatgatgaggtcattaatctgtacattgaactgttaaaggagagggaaaaaagggaacccaacaggtttttgaaatgccatttcttcaatacattcttctacaagaggcttacttgcggaatagctggttatgattaccagtctgttaggagatggacaacattcaagaggctgggttatggacttgtcgagtgtgagaaaatctttgttccagtgcatagaaatgcacattggtgtttggcactaataaacatgaaggataaaacattgcagtatcttgaatctcttgttggttggggccgtgatgtactggacatactggctagatacatcgtggatgaattgaaggacaagagtaacatagaggtagaacctagttcgtggactgtagtgtcagagtctttgcccttgcagcagaacgggtgggactgtggcatgtttatgcttaaatacattgatttccatagcagaggtatcaaaccatctttcagtcaggaacacatgatgtattttaggaaacgaatagcaaaagagatcatggcattaagagccgactgaagaacaccattctgacattgtctcaagtcaggtatttgctttcaaatagcagagatgtgattcttctaaggctgttggtgtgaattcaagtccatgtcgccacaccttttgtaggcttgtatttttttaggacctgattttggtagggaaaagaggggtaaggtaaaacaatgaaaaacgtaggagttcggaaatagttcggcaaaatggccacacctatgtaattgcattgaaactgactaaagctagtgcaaggaactgacacttagttttgttttgtgtttatttcaactcatatgttgtcgtggaaactaaagctagtgattgcacgactccccagtattaacatttcgtgagcgttttatgtatttgggaagtttttggttgcagatggataaacaactgtgaacctaggagcaacttcaaacttttcaggttcaaatcataaagctgtaccgagctggacacatgtctgcacttgaacaacaaaccaccaaccactacagtttctctatttctctagttagctaggagcacaaggcagaacattgaatgctgatagagggtagatcaccccatttcacaaaaacttgtggcaaaccaatagcaatcttaacaaatcgaatcatcttcccaccagtagaaatgtgactgactggctacttagatgcctaaaaatgctctgcacagtgactcccaatgctccttagccaggcgaacacgttcaactcgctccaaccgcgttctcttctaagggcttgtgcttacctgtgtctcagcagcatgttgagtgcatccaggtgcatagcgtcagaaaagaccccttgctgaacatcaactggtgtgacggatgcagcagaacagcagcataggtagcagaatatgtggccacatgaaagagagaccggatcaaacattgtgtcctgtaaataaataaaacatggaaggatgaagagtttggttatggattttaaa

SEQ ID NO: 22986 - DNA, 2751 bp, Zea Mays
gcctttcctcctcttcgtcacccaccgccgacggctagccatgtccgccgagcccacctctccgcctctatcgacggcgcaggtccgcgggagcctcatcccgccgcttccagacgacttggctgtccactgcatcgctctcttgccgcgcgccgcgcacccatccctggccctcgtctcccgcgctttccacgccctcctgtgccgccacccggagccgctcctcgccgcgcgccgcaccctccgctgctccgaaccccacgtcctcctctccctccgcccaccctcctccgcgtcccctatcttcttcctcctgctcccgcaccccgggtggcccccgctcccgcttccctcccctcccgtccccgtctcgtcctccgcgtcggccgccaccgacggcgcccggctcttcctcgtcggcggatccgtatccgcggtcccctctgcgtccgtgcagatcctggacccccgggccagatcctggtccgccggcccgcgcctgtcctctacgcgggagttcgccgcggccgtcgcgcactccggggcgctgttcgtcgccggcggctgcatcccctcgtcccctttctgggccgaggctctcgacctctccactccgaacgccaagtggagagccgtcgccagcccggcccacctccgcgagaagtggatgcacggctgcgcgtcgctcgacgggaaggtcgttgtggtggcggaccgtggcggcttgtcctacgatccttcggcgccacctgcggaggcgtgggcaccggtgtcgccggtgcttgacatgggatggaagggccgagctgcagtggttgagggaatcctctactcttacgattacctgggacaggtcaaggggtatgatccgtacactgattcttggagcacagtggaggggttggagggggagctacctaagttcttgtgcggcgccacacttgccgatgttggaggattgctctacttggtttgggaaggaaagtggaaagggaaattaaaaggtaagatggaaatgaggagcatggtagtgattgaatgggccagcattcagattacaagggtccaagagggacggctaagaggaaaggttgtctctagggacactgttctgttcccggatatgccaagaggttcaacgatcacacattgcattgcattggagttgtgatgcagcagatgcagatgtaaagcaggttccaacgatgattcaggcggtttgttccacttatattggctttcaaggcttgctggctaacggaacaatattcccgaagtatcgcaatgccttcatcgcaactccttgagtgatcccatcattctaaagatatatgtaagaattggaagttcaaaattggtccgcctagaatttctgtgcatcttagagcatctccaagaggggtcttattaaacaaggttgtatattgaaatatagggcttgggacctaagagcaactccagtagttctctaaaagacttcctaaatcaataatttaggtagttaacatgaaaactattctccaacagttctctaaatgaactttctaaatttaacaacttgtcatctaacctcattttctctctacatttggcaaccatttaacaactccctaaacaaaaatgttgactgcattatatagtttttgtgacttattttttatgtggataaatacaaaacaaaattacaacctatatttagagaactattggagaactcatatttttttactctaaaagtcatttagcaacttcttaaatctgtaatttagagagctaaaatttacataactattggagttgctctaagcggtgaccctatttcatcaaaatttatcaaatgattatagggtttggcatctgaggttctaaatatagtatcacatatattgaagtcctatccttattttctcttaatctacaactatttattttcttagatagcattatttgaggccaaactgttggagtaaatttcttttgaggcactaaacactttaataatggttctatttcaattctaaggcgctattttagagttctttgttagagatgctccatgtaaaacttactccctttggtgtcctattagttgttgttttggataaggtttgagtcaaacttataaaattttgactataaataattttttgttgtttatttttgaaatctaatatttatatgcatcgatttatattaaaaagtattttttttataaaagtataaatgaattaagagtttatttgtatatttttttaaatatttgtcaaagttatattttggagaccgtctaaacgacaactaatagaacaccgaagtgagtaatctttagccaagcgtgttgctttttttacttgcagggagcagacaatgctaagcctcgtggtcacggtgtgtttcgattcgactggctacaggtgttcggacggctacaaatgcaatacataaagataaaatactaaaatagttatagccgcagtcggattaagccacagtcaggattaaaaccgtagtaaacagccatggttgagcgcttgggaaggacatcatccgcttggaatcttcaggtctttgaagtagcgaagtttgacggcaaagaaactacctggactagccactgtaaggtgtagatggatattacttgttttgtttctatattttctctccggattcggatataaatataaatattatcgagttttggcggttcgagtgactattgatattttatatatttactagtcagttgctcgt

SEQ ID NO: 22987 - DNA, 3390 bp, Zea Mays
gcctttcctcctcttcgtcacccaccgccgacggctagccatgtccgccgagcccacctctccgcctctatcgacggcgcaggtccgcgggagcctcatcccgccgcttccagacgacttggctgtccactgcatcgctctcttgccgcgcgccgcgcacccatccctggccctcgtctcccgcgctttccacgccctcctgtgccgccacccggagccgctcctcgccgcgcgccgcaccctccgctgctccgaaccccacgtcctcctctccctccgcccaccctcctccgcgtcccctatcttcttcctcctgctcccgcaccccgggtggcccccgctcccgcttccctcccctcccgtccccgtctcgtcctccgcgtcggccgccaccgacggcgcccggctcttcctcgtcggcggatccgtatccgcggtcccctctgcgtccgtgcagatcctggacccccgggccagatcctggtccgccggcccgcgcctgtcctctacgcgggagttcgccgcggccgtcgcgcactccggggcgctgttcgtcgccggcggctgcatcccctcgtcccctttctgggccgaggctctcgacctctccactccgaacgccaagtggagagccgtcgccagcccggcccacctccgcgagaagtggatgcacggctgcgcgtcgctcgacgggaaggtcgttgtggtggcggaccgtggcggcttgtcctacgatccttcggcgccacctgcggaggcgtgggcaccggtgtcgccggtgcttgacatgggatggaagggccgagctgcagtggttgagggaatcctctactcttacgattacctgggacaggtcaaggggtatgatccgtacactgattcttggagcacagtggaggggttggagggggagctacctaagttcttgtgcggcgccacacttgccgatgttggaggattgctctacttggtttgggaaggaaagtggaaagggaaattaaaaggtaagatggaaatgaggagcatggtagtgattgaatgggccagcattcagattacaagggtccaagagggacggctaagaggaaaggttgtctctagggacactgttctgttcccggatatgccaagaggttcaacgatcacacattgcattgcattggagttgtgatgcagcagatgcagatgtaaagcaggttccaacgatgattcaggcggtttgttccacttatattggctttcaaggcttgctggctaacggttgatatcatggggccattgcaacagaaaaatacttcagttgtgttgattagatatgccatcagttagtccagtcggtgctgattatgctgatacattcatgacacggttatattcagccagtgtaccatttattagtagttgtatagcaggtactctgttagtcttgcccctgttcccaaacaaactcttttagcggtcacacttgttagatattatttcggggtgtttgaatgtactagacctaatagttagtagctaaaattagttgaagagattcaaacaccctagctaatagttcaactatttgttagctaataattcaactattagttatttttagtaaattagttaatatttagctagctatttgttagctagatacttgcactagcaaatttttagccagctaactattagctctaatgcattcaaacaccctattagtgtatctgtacgaagtctcttgagttgtggcaccgataggttgcattctgaggcatcattagagtatacccacctatttttgtgccaaaatgccatgccatggatcacatctcagtactagccatgtcaaagaaacgttctttcatcctcaggcatcaaatgatggaattttagtatgtcactgaattgcaggaacaatattcccgaagtatcgcaatgccttcatcgcaactccttgagtgatcccatcattctaaagatatatgtaagaattggaagttcaaaattggtccgcctagaatttctgtgcatcttagagcatctccaagaggggtcttattaaacaaggttgtatattgaaatatagggcttgggacctaagagcaactccagtagttctctaaaagacttcctaaatcaataatttaggtagttaacatgaaaactattctccaacagttctctaaatgaactttctaaatttaacaacttgtcatctaacctcattttctctctacatttggcaaccatttaacaactccctaaacaaaaatgttgactgcattatatagtttttgtgacttattttttatgtggataaatacaaaacaaaattacaacctatatttagagaactattggagaactcatatttttttactctaaaagtcatttagcaacttcttaaatctgtaatttagagagctaaaatttacataactattggagttgctctaagcggtgaccctatttcatcaaaatttatcaaatgattatagggtttggcatctgaggttctaaatatagtatcacatatattgaagtcctatccttattttctcttaatctacaactatttattttcttagatagcattatttgaggccaaactgttggagtaaatttcttttgaggcactaaacactttaataatggttctatttcaattctaaggcgctattttagagttctttgttagagatgctccatgtaaaacttactccctttggtgtcctattagttgttgttttggataaggtttgagtcaaacttataaaattttgactataaataattttttgttgtttatttttgaaatctaatatttatatgcatcgatttatattaaaaagtattttttttataaaagtataaatgaattaagagtttatttgtatatttttttaaatatttgtcaaagttatattttggagaccgtctaaacgacaactaatagaacaccgaagtgagtaatctttagccaagcgtgttgctttttttacttgcagggagcagacaatgctaagcctcgtggtcacggtgtgtttcgattcgactggctacaggtgttcggacggctacaaatgcaatacataaagataaaatactaaaatagttatagccgcagtcggattaagccacagtcaggattaaaaccgtagtaaacagccatggttgagcgcttgggaaggacatcatccgcttggaatcttcaggtctttgaagtagcgaagtttgacggcaaagaaactacctggactagccactgtaaggtgtagatggatattacttgttttgtttctatattttctctccggattcggatataaatataaatattatcgagttttggcggttcgagtgactattgatattttatatatttactagtcagttgctcgt

SEQ ID NO: 22988 - DNA, 1654 bp, Zea Mays
gcctttcctcctcttcgtcacccaccgccgacggctagccatgtccgccgagcccacctctccgcctctatcgacggcgcaggtccgcgggagcctcatcccgccgcttccagacgacttggctgtccactgcatcgctctcttgccgcgcgccgcgcacccatccctggccctcgtctcccgcgctttccacgccctcctgtgccgccacccggagccgctcctcgccgcgcgccgcaccctccgctgctccgaaccccacgtcctcctctccctccgcccaccctcctccgcgtcccctatcttcttcctcctgctcccgcaccccgggtggcccccgctcccgcttccctcccctcccgtccccgtctcgtcctccgcgtcggccgccaccgacggcgcccggctcttcctcgtcggcggatccgtatccgcggtcccctctgcgtccgtgcagatcctggacccccgggccagatcctggtccgccggcccgcgcctgtcctctacgcgggagttcgccgcggccgtcgcgcactccggggcgctgttcgtcgccggcggctgcatcccctcgtcccctttctgggccgaggctctcgacctctccactccgaacgccaagtggagagccgtcgccagcccggcccacctccgcgagaagtggatgcacggctgcgcgtcgctcgacgggaaggtcgttgtggtggcggaccgtggcggcttgtcctacgatccttcggcgccacctgcggaggcgtgggcaccggtgtcgccggtgcttgacatgggatggaagggccgagctgcagtggttgagggaatcctctactcttacgattacctgggacaggtcaaggggtatgatccgtacactgattcttggagcacagtggaggggttggagggggagctacctaagttcttgtgcggcgccacacttgccgatgttggaggattgctctacttggtttgggaaggaaagtggaaagggaaattaaaaggtaagatggaaatgaggagcatggtagtgattgaatgggccagcattcagattacaagggtccaagagggacggctaagaggaaaggttgtctctagggacactgttctgttcccggatatgccaagaggttcaacgatcacacattgcattgcattggagttgtgatgcagcagatgcagatgtaaagcaggttccaacgatgattcaggcggtttgttccacttatattggctttcaaggcttgctggctaacgggagcagacaatgctaagcctcgtggtcacggtgtgtttcgattcgactggctacaggtgttcggacggctacaaatgcaatacataaagataaaatactaaaatagttatagccgcagtcggattaagccacagtcaggattaaaaccgtagtaaacagccatggttgagcgcttgggaaggacatcatccgcttggaatcttcaggtctttgaagtagcgaagtttgacggcaaagaaactacctggactagccactgtaaggtgtagatggatattacttgttttgtttctatattttctctccggattcggatataaatataaatattatcgagttttggcggttcgagtgactattgatattttatatatttactagtcagttgctcgt

SEQ ID NO: 22989 - DNA, 3567 bp, Zea Mays
gcctttcctcctcttcgtcacccaccgccgacggctagccatgtccgccgagcccacctctccgcctctatcgacggcgcaggtccgcgggagcctcatcccgccgcttccagacgacttggctgtccactgcatcgctctcttgccgcgcgccgcgcacccatccctggccctcgtctcccgcgctttccacgccctcctgtgccgccacccggagccgctcctcgccgcgcgccgcaccctccgctgctccgaaccccacgtcctcctctccctccgcccaccctcctccgcgtcccctatcttcttcctcctgctcccgcaccccgggtggcccccgctcccgcttccctcccctcccgtccccgtctcgtcctccgcgtcggccgccaccgacggcgcccggctcttcctcgtcggcggatccgtatccgcggtcccctctgcgtccgtgcagatcctggacccccgggccagatcctggtccgccggcccgcgcctgtcctctacgcgggagttcgccgcggccgtcgcgcactccggggcgctgttcgtcgccggcggctgcatcccctcgtcccctttctgggccgaggctctcgacctctccactccgaacgccaagtggagagccgtcgccagcccggcccacctccgcgagaagtggatgcacggctgcgcgtcgctcgacgggaaggtcgttgtggtggcggaccgtggcggcttgtcctacgatccttcggcgccacctgcggaggcgtgggcaccggtgtcgccggtgcttgacatgggatggaagggccgagctgcagtggttgagggaatcctctactcttacgattacctgggacaggtcaaggggtatgatccgtacactgattcttggagcacagtggaggggttggagggggagctacctaagttcttgtgcggcgccacacttgccgatgttggaggattgctctacttggtttgggaaggaaagtggaaagggaaattaaaaggtaagatggaaatgaggagcatggtagtgattgaatgggccagcattcagattacaagggtccaagagggacggctaagaggaaaggttgtctctagggacactgttctgttcccggatatgccaagaggttcaacgatcacacattgcattgcattggagttgtgatgcagcagatgcagatgtaaagcagctgtactgctgcctgcttgcgagaagtgagctagttcttggtcactggaatgcccttcagcgtcagtaaatagtcacctattctcgttactgctgtaggttccaacgatgattcaggcggtttgttccacttatattggctttcaaggcttgctggctaacggtaatttgtcattgttttatgcgaataagtttgctgcaatgctttagcactgtgtataattaagctgttttgctaataggttgatatcatggggccattgcaacagaaaaatacttcagttgtgttgattagatatgccatcagttagtccagtcggtgctgattatgctgatacattcatgacacggttatattcagccagtgtaccatttattagtagttgtatagcaggtactctgttagtcttgcccctgttcccaaacaaactcttttagcggtcacacttgttagatattatttcggggtgtttgaatgtactagacctaatagttagtagctaaaattagttgaagagattcaaacaccctagctaatagttcaactatttgttagctaataattcaactattagttatttttagtaaattagttaatatttagctagctatttgttagctagatacttgcactagcaaatttttagccagctaactattagctctaatgcattcaaacaccctattagtgtatctgtacgaagtctcttgagttgtggcaccgataggttgcattctgaggcatcattagagtatacccacctatttttgtgccaaaatgccatgccatggatcacatctcagtactagccatgtcaaagaaacgttctttcatcctcaggcatcaaatgatggaattttagtatgtcactgaattgcaggaacaatattcccgaagtatcgcaatgccttcatcgcaactccttgagtgatcccatcattctaaagatatatgtaagaattggaagttcaaaattggtccgcctagaatttctgtgcatcttagagcatctccaagaggggtcttattaaacaaggttgtatattgaaatatagggcttgggacctaagagcaactccagtagttctctaaaagacttcctaaatcaataatttaggtagttaacatgaaaactattctccaacagttctctaaatgaactttctaaatttaacaacttgtcatctaacctcattttctctctacatttggcaaccatttaacaactccctaaacaaaaatgttgactgcattatatagtttttgtgacttattttttatgtggataaatacaaaacaaaattacaacctatatttagagaactattggagaactcatatttttttactctaaaagtcatttagcaacttcttaaatctgtaatttagagagctaaaatttacataactattggagttgctctaagcggtgaccctatttcatcaaaatttatcaaatgattatagggtttggcatctgaggttctaaatatagtatcacatatattgaagtcctatccttattttctcttaatctacaactatttattttcttagatagcattatttgaggccaaactgttggagtaaatttcttttgaggcactaaacactttaataatggttctatttcaattctaaggcgctattttagagttctttgttagagatgctccatgtaaaacttactccctttggtgtcctattagttgttgttttggataaggtttgagtcaaacttataaaattttgactataaataattttttgttgtttatttttgaaatctaatatttatatgcatcgatttatattaaaaagtattttttttataaaagtataaatgaattaagagtttatttgtatatttttttaaatatttgtcaaagttatattttggagaccgtctaaacgacaactaatagaacaccgaagtgagtaatctttagccaagcgtgttgctttttttacttgcagggagcagacaatgctaagcctcgtggtcacggtgtgtttcgattcgactggctacaggtgttcggacggctacaaatgcaatacataaagataaaatactaaaatagttatagccgcagtcggattaagccacagtcaggattaaaaccgtagtaaacagccatggttgagcgcttgggaaggacatcatccgcttggaatcttcaggtctttgaagtagcgaagtttgacggcaaagaaactacctggactagccactgtaaggtgtagatggatattacttgttttgtttctatattttctctccggattcggatataaatataaatattatcgagttttggcggttcgagtgactattgatattttatatatttactagtcagttgctcgt

SEQ ID NO: 22990 - DNA, 2366 bp, Zea Mays
gcctttcctcctcttcgtcacccaccgccgacggctagccatgtccgccgagcccacctctccgcctctatcgacggcgcaggtccgcgggagcctcatcccgccgcttccagacgacttggctgtccactgcatcgctctcttgccgcgcgccgcgcacccatccctggccctcgtctcccgcgctttccacgccctcctgtgccgccacccggagccgctcctcgccgcgcgccgcaccctccgctgctccgaaccccacgtcctcctctccctccgcccaccctcctccgcgtcccctatcttcttcctcctgctcccgcaccccgggtggcccccgctcccgcttccctcccctcccgtccccgtctcgtcctccgcgtcggccgccaccgacggcgcccggctcttcctcgtcggcggatccgtatccgcggtcccctctgcgtccgtgcagatcctggacccccgggccagatcctggtccgccggcccgcgcctgtcctctacgcgggagttcgccgcggccgtcgcgcactccggggcgctgttcgtcgccggcggctgcatcccctcgtcccctttctgggccgaggctctcgacctctccactccgaacgccaagtggagagccgtcgccagcccggcccacctccgcgagaagtggatgcacggctgcgcgtcgctcgacgggaaggtcgttgtggtggcggaccgtggcggcttgtcctacgatccttcggcgccacctgcggaggcgtgggcaccggtgtcgccggtgcttgacatgggatggaagggccgagctgcagtggttgagggaatcctctactcttacgattacctgggacaggtcaaggggtatgatccgtacactgattcttggagcacagtggaggggttggagggggagctacctaagttcttgtgcggcgccacacttgccgatgttggaggattgctctacttggtttgggaaggaaagtggaaagggaaattaaaaggtaagatggaaatgaggagcatggtagtgattgaatgggccagcattcagattacaagggtccaagagggacggctaagaggaaaggttgtctctagggacactgttctgttcccggatatgccaagaggttcaacgatcacacattgcattgcattggagttgtgatgcagcagatgcagatgtaaagcaggttccaacgatgattcaggcggtttgttccacttatattggctttcaaggcttgctggctaacggttgatatcatggggccattgcaacagaaaaatacttcagttgtgttgattagatatgccatcagttagtccagtcggtgctgattatgctgatacattcatgacacggttatattcagccagtgtaccatttattagtagttgtatagcaggtactctgttagtcttgcccctgttcccaaacaaactcttttagcggtcacacttgttagatattatttcggggtgtttgaatgtactagacctaatagttagtagctaaaattagttgaagagattcaaacaccctagctaatagttcaactatttgttagctaataattcaactattagttatttttagtaaattagttaatatttagctagctatttgttagctagatacttgcactagcaaatttttagccagctaactattagctctaatgcattcaaacaccctattagtgtatctgtacgaagtctcttgagttgtggcaccgataggttgcattctgaggcatcattagagtatacccacctatttttgtgccaaaatgccatgccatggatcacatctcagtactagccatgtcaaagaaacgttctttcatcctcaggcatcaaatgatggaattttagtatgtcactgaattgcaggaacaatattcccgaagtatcgcaatgccttcatcgcaactccttgagtgatcccatcattctaaagatatatggagcagacaatgctaagcctcgtggtcacggtgtgtttcgattcgactggctacaggtgttcggacggctacaaatgcaatacataaagataaaatactaaaatagttatagccgcagtcggattaagccacagtcaggattaaaaccgtagtaaacagccatggttgagcgcttgggaaggacatcatccgcttggaatcttcaggtctttgaagtagcgaagtttgacggcaaagaaactacctggactagccactgtaaggtgtagatggatattacttgttttgtttctatattttctctccggattcggatataaatataaatattatcgagttttggcggttcgagtgactattgatattttatatatttactagtcagttgctcgt

SEQ ID NO: 22991 - DNA, 2903 bp, Zea Mays
gcctttcctcctcttcgtcacccaccgccgacggctagccatgtccgccgagcccacctctccgcctctatcgacggcgcaggtccgcgggagcctcatcccgccgcttccagacgacttggctgtccactgcatcgctctcttgccgcgcgccgcgcacccatccctggccctcgtctcccgcgctttccacgccctcctgtgccgccacccggagccgctcctcgccgcgcgccgcaccctccgctgctccgaaccccacgtcctcctctccctccgcccaccctcctccgcgtcccctatcttcttcctcctgctcccgcaccccgggtggcccccgctcccgcttccctcccctcccgtccccgtctcgtcctccgcgtcggccgccaccgacggcgcccggctcttcctcgtcggcggatccgtatccgcggtcccctctgcgtccgtgcagatcctggacccccgggccagatcctggtccgccggcccgcgcctgtcctctacgcgggagttcgccgcggccgtcgcgcactccggggcgctgttcgtcgccggcggctgcatcccctcgtcccctttctgggccgaggctctcgacctctccactccgaacgccaagtggagagccgtcgccagcccggcccacctccgcgagaagtggatgcacggctgcgcgtcgctcgacgggaaggtcgttgtggtggcggaccgtggcggcttgtcctacgatccttcggcgccacctgcggaggcgtgggcaccggtgtcgccggtgcttgacatgggatggaagggccgagctgcagtggttgagggaatcctctactcttacgattacctgggacaggtcaaggggtatgatccgtacactgattcttggagcacagtggaggggttggagggggagctacctaagttcttgtgcggcgccacacttgccgatgttggaggattgctctacttggtttgggaaggaaagtggaaagggaaattaaaaggtaagatggaaatgaggagcatggtagtgattgaatgggccagcattcagattacaagggtccaagagggacggctaagaggaaaggttgtctctagggacactgttctgttcccggatatgccaagaggttcaacgatcacacattgcattgcattggagttgtgatgcagcagatgcagatgtaaagcaggttccaacgatgattcaggcggtttgttccacttatattggctttcaaggcttgctggctaacggttgatatcatggggccattgcaacagaaaaatacttcagttgtgttgattagatatgccatcagttagtccagtcggtgctgattatgctgatacattcatgacacggttatattcagccagtgtaccatttattagtagttgtatagcaggaacaatattcccgaagtatcgcaatgccttcatcgcaactccttgagtgatcccatcattctaaagatatatgtaagaattggaagttcaaaattggtccgcctagaatttctgtgcatcttagagcatctccaagaggggtcttattaaacaaggttgtatattgaaatatagggcttgggacctaagagcaactccagtagttctctaaaagacttcctaaatcaataatttaggtagttaacatgaaaactattctccaacagttctctaaatgaactttctaaatttaacaacttgtcatctaacctcattttctctctacatttggcaaccatttaacaactccctaaacaaaaatgttgactgcattatatagtttttgtgacttattttttatgtggataaatacaaaacaaaattacaacctatatttagagaactattggagaactcatatttttttactctaaaagtcatttagcaacttcttaaatctgtaatttagagagctaaaatttacataactattggagttgctctaagcggtgaccctatttcatcaaaatttatcaaatgattatagggtttggcatctgaggttctaaatatagtatcacatatattgaagtcctatccttattttctcttaatctacaactatttattttcttagatagcattatttgaggccaaactgttggagtaaatttcttttgaggcactaaacactttaataatggttctatttcaattctaaggcgctattttagagttctttgttagagatgctccatgtaaaacttactccctttggtgtcctattagttgttgttttggataaggtttgagtcaaacttataaaattttgactataaataattttttgttgtttatttttgaaatctaatatttatatgcatcgatttatattaaaaagtattttttttataaaagtataaatgaattaagagtttatttgtatatttttttaaatatttgtcaaagttatattttggagaccgtctaaacgacaactaatagaacaccgaagtgagtaatctttagccaagcgtgttgctttttttacttgcagggagcagacaatgctaagcctcgtggtcacggtgtgtttcgattcgactggctacaggtgttcggacggctacaaatgcaatacataaagataaaatactaaaatagttatagccgcagtcggattaagccacagtcaggattaaaaccgtagtaaacagccatggttgagcgcttgggaaggacatcatccgcttggaatcttcaggtctttgaagtagcgaagtttgacggcaaagaaactacctggactagccactgtaaggtgtagatggatattacttgttttgtttctatattttctctccggattcggatataaatataaatattatcgagttttggcggttcgagtgactattgatattttatatatttactagtcagttgctcgt

SEQ ID NO: 22992 - DNA, 2599 bp, Zea Mays
aagtcaaaatctctactaattttttccaatctcatctaatccatgtgatataggaataaccgaacaaaaccttagcggacagggatgggagcaatttaatctccacggggattgaaacagcaaaaagttagtccctgttaaatatatattggacggatgatatttatgtttggaaccaagcttgtatcattattcagtttgtgttcttgaatgtctggatcacagtcattgataaatgacttgtcagcatttcacctgcacaggtcaccttgatcagcattttaaaagttccaatttcttcattcagctgtactgctgcctgcttgcgagaagtgagctagttcttggtcactggaatgcccttcagcgtcagtaaatagtcacctattctcgttactgctgtaggttccaacgatgattcaggcggtttgttccacttatattggctttcaaggcttgctggctaacggttgatatcatggggccattgcaacagaaaaatacttcagttgtgttgattagatatgccatcagttagtccagtcggtgctgattatgctgatacattcatgacacggttatattcagccagtgtaccatttattagtagttgtatagcaggtactctgttagtcttgcccctgttcccaaacaaactcttttagcggtcacacttgttagatattatttcggggtgtttgaatgtactagacctaatagttagtagctaaaattagttgaagagattcaaacaccctagctaatagttcaactatttgttagctaataattcaactattagttatttttagtaaattagttaatatttagctagctatttgttagctagatacttgcactagcaaatttttagccagctaactattagctctaatgcattcaaacaccctattagtgtatctgtacgaagtctcttgagttgtggcaccgataggttgcattctgaggcatcattagagtatacccacctatttttgtgccaaaatgccatgccatggatcacatctcagtactagccatgtcaaagaaacgttctttcatcctcaggcatcaaatgatggaattttagtatgtcactgaattgcaggaacaatattcccgaagtatcgcaatgccttcatcgcaactccttgagtgatcccatcattctaaagatatatgtaagaattggaagttcaaaattggtccgcctagaatttctgtgcatcttagagcatctccaagaggggtcttattaaacaaggttgtatattgaaatatagggcttgggacctaagagcaactccagtagttctctaaaagacttcctaaatcaataatttaggtagttaacatgaaaactattctccaacagttctctaaatgaactttctaaatttaacaacttgtcatctaacctcattttctctctacatttggcaaccatttaacaactccctaaacaaaaatgttgactgcattatatagtttttgtgacttattttttatgtggataaatacaaaacaaaattacaacctatatttagagaactattggagaactcatatttttttactctaaaagtcatttagcaacttcttaaatctgtaatttagagagctaaaatttacataactattggagttgctctaagcggtgaccctatttcatcaaaatttatcaaatgattatagggtttggcatctgaggttctaaatatagtatcacatatattgaagtcctatccttattttctcttaatctacaactatttattttcttagatagcattatttgaggccaaactgttggagtaaatttcttttgaggcactaaacactttaataatggttctatttcaattctaaggcgctattttagagttctttgttagagatgctccatgtaaaacttactccctttggtgtcctattagttgttgttttggataaggtttgagtcaaacttataaaattttgactataaataattttttgttgtttatttttgaaatctaatatttatatgcatcgatttatattaaaaagtattttttttataaaagtataaatgaattaagagtttatttgtatatttttttaaatatttgtcaaagttatattttggagaccgtctaaacgacaactaatagaacaccgaagtgagtaatctttagccaagcgtgttgctttttttacttgcagggagcagacaatgctaagcctcgtggtcacggtgtgtttcgattcgactggctacaggtgttcggacggctacaaatgcaatacataaagataaaatactaaaatagttatagccgcagtcggattaagccacagtcaggattaaaaccgtagtaaacagccatggttgagcgcttgggaaggacatcatccgcttggaatcttcaggtctttgaagtagcgaagtttgacggcaaagaaactacctggactagccactgtaaggtgtagatggatattacttgttttgtttctatattttctctccggattcggatataaatataaatattatcgagttttggcggttcgagtgactattgatattttatatatttactagtcagttgctcgt

SEQ ID NO: 22993 - DNA, 505 bp, Zea Mays
gagaactctcaaccttgtgcttccgacgaacgaaattgatgctgcatgctcaggctctcacgctggctgccttggctgggtccgcgctggtggagtactacgaccaccagcaagggtcaggatcgaaagttcaccaatatgcaaagcagttcctttcatctgatagcaatagcggccaacaaaaggagtagctagccagtgtccttgcgaagtgcaagcagcggagtgggcgttatttcctgatcaaataattttgcctatggcacattctgtggaaactttgacggatctttgcctgcttttctatgcgatgtaagctgctgaaacctgcactcatcaaatgttgtgtatgcagatggtaccatgcatttgtttccctgaatggcttcaaatgaaatgaatgtttttttttatcggtatgcatcatgggacgtcacaacgattttagctgtttgtctaagtcgagttcagcagaatgttctctgtttacacaacatctgagtgc

SEQ ID NO: 22994 - DNA, 2876 bp, Zea Mays
gagagagagcacacgcaagacgagcgtcgccttctccgaatcccctccttgccaaacacgagctgcctaaccaaatccgtccacgctgtctcgtcccctcggcatcgcagtctcctacccaaatcgtcctcgtttcctcctccccgaactgacccgctgttgccgacggctagtaggatgacgaagctgacctcggagctactgcggccggtggttccggcggcggcgctggacgaggcggcgctgctgcgctacctggtggccaacgtcccgggcttcccgggccccgcgcccgcgctatcgctgacccagttcgggcacggccagtccaaccccacctactgcatccacgcctccgcgcccggcggggggcagcccaggcgctacgtgctcaggaagaagccgcccggggccatcctccagtccgcgcacgccgtcgagcgcgagtaccaggttctcaaagctctgggggatcacacagatgttcctgtcccgaaggtttattgtctctgcacagatgcaagtgtaattggaactcctttctatataatggagtatctggaaggaataatatatcctgatagcgcgttgccgggggtaactccatctaaaaggcgggctatatatttgtctactgccaaaactttggctgctatacacaaagttgatattaatgccattggattacaaaagtatgggagaagagacaattattgcaaaagacaggtagaaagatgggagaggcaatatcttgcatccactggcgaagggaagcctgcacgttaccagaggatgcttgatctagctcgttggttgaaagaacatgtaccagaagaagattcctcaccaggaccaggaacaggccttgtgcatggtgattaccgccctgataatctagtttttcatccaacagaggaccgagtaattggcgttattgattgggaactatctactttggggaatcagatgtgtgatgttgcttatagctgcttgccatatattatcgatgcagcacccagtgcaaggacttcttatggagggtttcaagatactggcattccagatggaattcctcaactggaagagtacctttctatatactgctcttttgctgcaagaccctggcctgctgcaaattggaagttctacattgctttttctttgtttcgtggggcatctatctatgcaggagtatatcacagatggactatgggtaatgcatcaggtggtgagcgcgctaaatttgctggcagggttgctaacgctatgattgactgtgcctgggacttcataaatagagtaaatgtcctgcaagaactgccttctaagggttctcaagtcttaggagcatcgtggcaagaatttcacagagaggaagaaagttcaacttctgaaaagaatcaaggaaaatttgttcctagtgaaaaggttatgcagcttcgaaagaaactaataaagtttatcgaagatcacatatacccaatggaggctgagttctacaaacatgcacaatcaacctcaagatggacaattcatccagaagaagaaaatcttaaagcattggcaaagaaggagggcctatggaacttgtttattccgctagacagtgcagcgagagctagaaagctattgtttgaagaccattctcaaatttcccttggaagttcgaataatcttttgctgggcgcgggtcttacaaatcttgaatatggatatctgtgtgagattatgggacgttcagtttgggctccacaaatatttaactgtggtgcacctgatacaggtaacatggaggtcctgttgaggtatggcactaaggagcaacagaagcaatggttagttcctttattggaagggacaattcgttctggatttgcaatgacagaaccacaagttgcatcttcagacgcgacaaatatagaatgctcaatatccaggcaaggagatttttatgtgataaatggaaggaagtggtggaccagtggagctatggatcctaggtgcaaaatcctgatattaatgggaaagacagatttttctgcacctaagcataagcagcagtccatgattttagtggacatcaacactcctggggtgcagataaagagaccattgttagtctttggttttgatgatgcacctcatggacacgcagagattacatttgaaaacgtgcgtgttccagtaacaaatatcctgcttggagaagggcgtggttttgagattgctcaaggaagacttggtcctggaaggttacatcattgcatgaggctagtaggagcagcagaacgtggcatgaatctgatggtagagagggccttaaacaggaccgcatttggaaagaggattgcacagcatggttcctttttatcagatcttgcaaagtgtcggattgaactggagcaggcaaggcttttagtccttgaagctgccgatcaactcgatcgacatgggaacaagaaagcacgtggtatcctcgcgatggccaaggttgcagctccaaatatggccctgaaggtgcttgacatggcgatgcaagttcacggcgcagctggtgtctcgtctgacacggtcttgtcgcacctatgggcaacggctaggacactgcggattgcagacggccccgacgaggtccatctcgggacaatcgccaagctggaactgcggagggctaggttgtaactcgagggcgatgtacagctcgcccgtcttgcgaatgaataaagaaggaacatcacccgtcgtcatttaacgtccatgtgaatacttagatgaataaataaatcctactttcagtagcagttactcttattttcaataaaccatatataatatcaatctttaataaatcatatcatttactcatcttcattaaa

SEQ ID NO: 22995 - DNA, 2869 bp, Zea Mays
gagagagagcacacgcaagacgagcgtcgccttctccgaatcccctccttgccaaacacgagctgcctaaccaaatccgtccacgctgtctcgtcccctcggcatcgcagtctcctacccaaatcgtcctcgtttcctcctccccgaactgacccgctgttgccgacggctagtaggatgacgaagctgacctcggagctactgcggccggtggttccggcggcggcgctggacgaggcggcgctgctgcgctacctggtggccaacgtcccgggcttcccgggccccgcgcccgcgctatcgctgacccagttcgggcacggccagtccaaccccacctactgcatccacgcctccgcgcccggcggggggcagcccaggcgctacgtgctcaggaagaagccgcccggggccatcctccagtccgcgcacgccgtcgagcgcgagtaccaggttctcaaagctctgggggatcacacagatgttcctgtcccgaaggtttattgtctctgcacagatgcaagtgtaattggaactcctttctatataatggagtatctggaaggaataatatatcctgatagcgcgttgccgggggtaactccatctaaaaggcgggctatatatttgtctactgccaaaactttggctgctatacacaaagttgatattaatgccattggattacaaaagtatgggagaagagacaattattgcaaaagacaggtagaaagatgggagaggcaatatcttgcatccactggcgaagggaagcctgcacgttaccagaggatgcttgatctagctcgttggttgaaagaacatgtaccagaagaagattcctcaccaggaccaggaacaggccttgtgcatggtgattaccgccctgataatctagtttttcatccaacagaggaccgagtaattggcgttattgattgggaactatctactttggggaatcagatgtgtgatgttgcttatagctgcttgccatatattatcgatgcagcacccagtgcaaggacttcttatggagggtttcaagatactggcattccagatggaattcctcaactggaagagtacctttctatatactgctcttttgctgcaagaccctggcctgctgcaaattggaagttctacattgctttttctttgtttcgtggggcatctatctatgcaggagtatatcacagatggactatgggtaatgcatcaggtggtgagcgcgctaaatttgctggcagggttgctaacgctatgattgactgtgcctgggacttcataaatagagtaaatgtcctgcaagaactgccttctaagggttctcaagtcttaggagcatcgtggcaagaatttcacagagaggaagaaagttcaacttctgaaaagaatcaaggaaaatttgttcctagtgaaaaggttatgcagcttcgaaagaaactaataaagtttatcgaagatcacatatacccaatggaggctgagttctacaaacatgcacaatcaacctcaagatggacaattcatccagaagaagaaaatcttaaagcattggcaaagaaggagggcctatggaacttgtttattccgctagacagtgcagcgagagctagaaagctattgtttgaagaccattctcaaatttcccttggaagttcgaataatcttttgctgggcgcgggtcttacaaatcttgaatatggatatctgtgtgagattatgggacgttcagtttgggctccacaaatatttaactgtggtgcacctgatacaggtaacatggaggtcctgttgaggtatggcactaaggagcaacagaagcaatggttagttcctttattggaagggacaattcgttctggatttgcaatgacagaaccacaagttgcatcttcagacgcgacaaatatagaatgctcaatatccaggcaaggagatttttatgtgataaatggaaggaagtggtggaccagtggagctatggatcctaggtgcaaaatcctgatattaatgggaaagacagatttttctgcacctaagcataagcagcagtccatgattttagtggacatcaacactcctggggtgcagataaagagaccattgttagtctttggttttgatgatgcacctcatggacacgcagagattacatttgaaaacgtgcgtgttccagtaacaaatatcctgcttggagaagggcgtggttttgagattgctcaaggaagacttggtcctggaaggttacatcattgcatgaggctagtaggagcagcagaacgtggcatgaatctgatggtagagagggccttaaacaggaccgcatttggaaagaggattgcacagcatggttcctttttatcagatcttgcaaagtgtcggattgaactggagcaggcaaggcttttagtccttgaagctgccgatcaactcgatcgacatgggaacaagaaagcacgtggtatcctcgcgatggccaagctccaaatatggccctgaaggtgcttgacatggcgatgcaagttcacggcgcagctggtgtctcgtctgacacggtcttgtcgcacctatgggcaacggctaggacactgcggattgcagacggccccgacgaggtccatctcgggacaatcgccaagctggaactgcggagggctaggttgtaactcgagggcgatgtacagctcgcccgtcttgcgaatgaataaagaaggaacatcacccgtcgtcatttaacgtccatgtgaatacttagatgaataaataaatcctactttcagtagcagttactcttattttcaataaaccatatataatatcaatctttaataaatcatatcatttactcatcttcattaaa

SEQ ID NO: 22996 - DNA, 3915 bp, Zea Mays
agaaagaaacgaccaaattagcaagcaggcagttacagacgcggccgcgacggcacatcgccgccgtagtccttgaccttgctccacaaccccggcccgactcggcgtcctccgccaccctcctcctgggcagcgccgacggggggatatggcatcggaggacgtggtgggcaagagcaggggcgacacggccgtcaccaccatcgtcaacctggcggaggaggccaagctcgcgcgcgagggggtcaaggcgcccggccaccagatcctcaccatctgcaagtcgctcgtcgccggcggctcagcaggcggagtgtgagtccccttctcttggctcgcctccacccctgccccgatcctctgtctctcgtcgtcagtcgtcaccgtcccgctcctccagacctcctgggcttcgatttgtcctcacgtgcgtctgccactccgttggtctaccctgattgggttcggcttcctggggattttgttgtcgtaggctacctagagtttcgatccgtgtaggtgttctcaggctcctggtacagggaattgggggtttccgtgatgcttggcacggggtgtgcgtgcttggcctggcttctctcagctttatgcccgatcgttgggcgccgcccgtgtgatctgggttggattcgcaccggtcttaaaccctgcacgcgagccaccactcagatctcggtccgttgactggtcccttggtttgattcgctgagaagccacatgaggaaatacctcgacatcgggcgattaaataaatttgccagggggatgctccagttttggttgatctattattaattctctggacaagattccattcccccaaaaataatgcgtatgcgtctttgccagttgccatattggtccccttttcacctttttaattgtgtgttttgttccttctcaatattgctgttaaataaattgctaggcgatgcgttcagtattctgcacagagtcccctgaccaggggatgaatttgcttctgcgaaggaaattgtaaatctgtgacataatgacctgtctttctggtttggtcagtgctctgtaataaccaacagatccacctgaaatggaacaattcgccactgacttcatgcatcagaattttgctgttgatgtctctatccagccaccttaactaattggtattagtttagatatattcagcttttttgagtagtatactgttcttcctgttgtcacctgtcatcactgccatcatctacatcaccaacactgaaggcctaccagcatttactttatttgatacactttgttggtacaagactatggtgacttgatcttgtcttcctttgctacttggaatatcttctcctaggggaggggcactagcggacagctcggcaacggtgaaatagtcgacaggtggttcttaccccgcgcgcgagctcagtgtctatgtcttcccccgccccttgtaggaacacacctgtgctgatctgatctgatctaacaacttacgtctcaccatcctgaggacacgcctgtgctgatcgatgccctgagctcagacggttctgcctgcaagaagctggagtcatccacgacagccccgttcgcagattgcaatccccattgtgccaacagtgagggtggttatcactttcaccaagtttgtccccctcatcgagcctgaggagttcttcactattgactaatgaagttatttttagaaacaatggtcaaggaccccactctggctctatagtatataacagaagctcaccacacaagatcgataaccctttcagatcatactataccaagctgctacttcacttcagtagaacaattgatcacacacaagaagttcagatcagaaaatgcaggctgtcgctactcccatcaggttctcggatgtgttcccatcaagggctgaccgtggagaagagcacggtggtggttagtgtccctgttgttgtcacggcggtggttccgtgaagatcaagaggagcaaggatgttgtcaagttcaaggtgcgcccgttgcaactccaacctgttcccccccaattcagcaccaaagacagattcgttgtaaggaacttcaaaatctggaggcgcttaggatgccccagcccgctgcttttgtctccgtgcagccgtccgatggtcaacccacgccgagcaacgtctcgaacaagaatatgaagcacggtggcaaggtgttgttcttggatggcgccggggaggtcgccatcaccatcagtcgcaactcgcaacagcctctctccacagtccctgcacccggtgaatcttccggtgaatatgcggtctgtgacttattcgcagagccaaaattaccaacaagatgatttccataaaactgttgcacggaccttgagccaaggatcaacaccgatgagcatggattttcatccacttcaacaaactcttcttcttgacaatggccacttctccccaagcgaaaaaaatctgctagaagaccttagagggctttaacattgggatggatatttgggcccttaccttgctttaagtggagattcagttttctgttttcacttaatatgacaactgaagagcgaaagactttgaagggcacagagtcttcagctccttctgttcctcctgatggaggagtcagcaaggaacctaaaaaagggggagattacccaatgggaggacaactggtccagcacgccgctcatccaagggcaactggactctagaaaaggtaaagttggcactctggtttcctaaattcgttaatagcatgcattttcagtacaacatttgaataatgatgtaaataacctatcttagttagctttgttgaatgttatgcatttttagttaggctcatttgctcattacttttttattttgcttgatctgttaatgaaataaaaagtaccctgtccttaaggtgcgtgaactctgtaatccttgttgatttccgaccatgaatcagctgaattgttattttttatcatgtattgttaggtacagagttcatgcccataccatttatattattcttagcctgcccataccactttgatttcatttttcgtccatgtttcagttgaattttcctaacaaactatggtgttaatgccatggatgcttgtgtgtattggtggtttgctattctcacgtgtggtttccttgtggtgttgttctgaggtctacttaacacttttgtcgtggttgtatggtgttgggattcactaggaggtctacttaacacttttgtcgtggttgtatggtgttgggattcactaggaggtctacttaacacttttgtcgtggttgtatggtgttgggattcactaggaatgcgatcgtagcggctcgagctcttccttaccaagaggaacacaaacagagctcaggtttttttttattttgctctgcattatctactgcttctccatttgataagtaaccgatcaattttttgaatattttgagcacatcggaggtgtaggagttggtgaacacccatgatctgtagatgtcgcagttggaagggtccaggaagatttatgcacagggagatgattatcacgagtacttcaagcgctcatttgaggaagacatcgctgcgcaagtgcctcaaggagtggaatggggttacaactattgattgggggaaatcaggcagaggagggcatgttgacggaccaagtggcgaggcaaaattttctaatgattttgaagttcattatattggcagtagctgatgatcccttctgtgatggaccgagtaaaccaagcaattcgggatattcaactccactttgatgactgtgtgtaccagcatgagatgttgattacaattcacgacatatttattgttgtttattttttatttttcatattatagtgatgtttgttgttccgtatc

SEQ ID NO: 22997 - DNA, 4155 bp, Zea Mays
agaaagaaacgaccaaattagcaagcaggcagttacagacgcggccgcgacggcacatcgccgccgtagtccttgaccttgctccacaaccccggcccgactcggcgtcctccgccaccctcctcctgggcagcgccgacggggggatatggcatcggaggacgtggtgggcaagagcaggggcgacacggccgtcaccaccatcgtcaacctggcggaggaggccaagctcgcgcgcgagggggtcaaggcgcccggccaccagatcctcaccatctgcaagtcgctcgtcgccggcggctcagcaggcggagtgtgagtccccttctcttggctcgcctccacccctgccccgatcctctgtctctcgtcgtcagtcgtcaccgtcccgctcctccagacctcctgggcttcgatttgtcctcacgtgcgtctgccactccgttggtctaccctgattgggttcggcttcctggggattttgttgtcgtaggctacctagagtttcgatccgtgtaggtgttctcaggctcctggtacagggaattgggggtttccgtgatgcttggcacggggtgtgcgtgcttggcctggcttctctcagctttatgcccgatcgttgggcgccgcccgtgtgatctgggttggattcgcaccggtcttaaaccctgcacgcgagccaccactcagatctcggtccgttgactggtcccttggtttgattcgctgagaagccacatgaggaaatacctcgacatcgggcgattaaataaatttgccagggggatgctccagttttggttgatctattattaattctctggacaagattccattcccccaaaaataatgcgtatgcgtctttgccagttgccatattggtccccttttcacctttttaattgtgtgttttgttccttctcaatattgctgttaaataaattgctaggcgatgcgttcagtattctgcacagagtcccctgaccaggggatgaatttgcttctgcgaaggaaattgtaaatctgtgacataatgacctgtctttctggtttggtcagtgctctgtaataaccaacagatccacctgaaatggaacaattcgccactgacttcatgcatcagaattttgctgttgatgtctctatccagccaccttaactaattggtattagtttagatatattcagcttttttgagtagtatactgttcttcctgttgtcacctgtcatcactgccatcatctacatcaccaacactgaaggcctaccagcatttactttatttgatacactttgttggtacaagactatggtgacttgatcttgtcttcctttgctacttggaatatcttctcctaggggaggggcactagcggacagctcggcaacggtgaaatagtcgacaggtggttcttaccccgcgcgcgagctcagtgtctatgtcttcccccgccccttgtaggaacacacctgtgctgatctgatctgatctaacaacttacgtctcaccatcctgaggacacgcctgtgctgatcgatgccctgagctcagacggttctgcctgcaagaagctggagtcatccacgacagccccgttcgcaggtctggttcgtcgtcagactctgactctctctactctcttaacaaatagcaaatggttcctcattgtaatctacgcaatattcgggtgtcctctttcatacatgctttggtaaagactgttgtaccatgcgatgaggtttctcttcaatctattccaggtttcgatcattattgaacaacagttcatggatatgcaaattttgaatttgattctctgatgcccacagaactgaaagcgtgattgcaatccccattgtgccaacagtgagggtggttatcactttcaccaagtttgtccccctcatcgagcctgaggagttcttcactattgactaatgaagttatttttagaaacaatggtcaaggaccccactctggctctatagtatataacagaagctcaccacacaagatcgataaccctttcagatcatactataccaagctgctacttcacttcagtagaacaattgatcacacacaagaagttcagatcagaaaatgcaggctgtcgctactcccatcaggttctcggatgtgttcccatcaagggctgaccgtggagaagagcacggtggtggttagtgtccctgttgttgtcacggcggtggttccgtgaagatcaagaggagcaaggatgttgtcaagttcaaggtgcgcccgttgcaactccaacctgttcccccccaattcagcaccaaagacagattcgttgtaaggaacttcaaaatctggaggcgcttaggatgccccagcccgctgcttttgtctccgtgcagccgtccgatggtcaacccacgccgagcaacgtctcgaacaagaatatgaagcacggtggcaaggtgttgttcttggatggcgccggggaggtcgccatcaccatcagtcgcaactcgcaacagcctctctccacagtccctgcacccggtgaatcttccggtgaatatgcggtctgtgacttattcgcagagccaaaattaccaacaagatgatttccataaaactgttgcacggaccttgagccaaggatcaacaccgatgagcatggattttcatccacttcaacaaactcttcttcttgacaatggccacttctccccaagcgaaaaaaatctgctagaagaccttagagggctttaacattgggatggatatttgggcccttaccttgctttaagtggagattcagttttctgttttcacttaatatgacaactgaagagcgaaagactttgaagggcacagagtcttcagctccttctgttcctcctgatggaggagtcagcaaggaacctaaaaaagggggagattacccaatgggaggacaactggtccagcacgccgctcatccaagggcaactggactctagaaaaggtaaagttggcactctggtttcctaaattcgttaatagcatgcattttcagtacaacatttgaataatgatgtaaataacctatcttagttagctttgttgaatgttatgcatttttagttaggctcatttgctcattacttttttattttgcttgatctgttaatgaaataaaaagtaccctgtccttaaggtgcgtgaactctgtaatccttgttgatttccgaccatgaatcagctgaattgttattttttatcatgtattgttaggtacagagttcatgcccataccatttatattattcttagcctgcccataccactttgatttcatttttcgtccatgtttcagttgaattttcctaacaaactatggtgttaatgccatggatgcttgtgtgtattggtggtttgctattctcacgtgtggtttccttgtggtgttgttctgaggtctacttaacacttttgtcgtggttgtatggtgttgggattcactaggaggtctacttaacacttttgtcgtggttgtatggtgttgggattcactaggaggtctacttaacacttttgtcgtggttgtatggtgttgggattcactaggaatgcgatcgtagcggctcgagctcttccttaccaagaggaacacaaacagagctcaggtttttttttattttgctctgcattatctactgcttctccatttgataagtaaccgatcaattttttgaatattttgagcacatcggaggtgtaggagttggtgaacacccatgatctgtagatgtcgcagttggaagggtccaggaagatttatgcacagggagatgattatcacgagtacttcaagcgctcatttgaggaagacatcgctgcgcaagtgcctcaaggagtggaatggggttacaactattgattgggggaaatcaggcagaggagggcatgttgacggaccaagtggcgaggcaaaattttctaatgattttgaagttcattatattggcagtagctgatgatcccttctgtgatggaccgagtaaaccaagcaattcgggatattcaactccactttgatgactgtgtgtaccagcatgagatgttgattacaattcacgacatatttattgttgtttattttttatttttcatattatagtgatgtttgttgttccgtatc

SEQ ID NO: 22998 - DNA, 2901 bp, Zea Mays
agaaagaaacgaccaaattagcaagcaggcagttacagacgcggccgcgacggcacatcgccgccgtagtccttgaccttgctccacaaccccggcccgactcggcgtcctccgccaccctcctcctgggcagcgccgacggggggatatggcatcggaggacgtggtgggcaagagcaggggcgacacggccgtcaccaccatcgtcaacctggcggaggaggccaagctcgcgcgcgagggggtcaaggcgcccggccaccagatcctcaccatctgcaagtcgctcgtcgccggcggctcagcaggcggagtgggaggggcactagcggacagctcggcaacggtgaaatagtcgacaggtggttcttaccccgcgcgcgagctcagtgtctatgtcttcccccgccccttgtaggaacacacctgtgctgatctgatctgatctaacaacttacgtctcaccatcctgaggacacgcctgtgctgatcgatgccctgagctcagacggttctgcctgcaagaagctggagtcatccacgacagccccgttcgcaggtttcgatcattattgaacaacagttcatggatatgcaaattttgaatttgattctctgatgcccacagaactgaaagcgtgattgcaatccccattgtgccaacagtgagggtggttatcactttcaccaagtttgtccccctcatcgagcctgaggagttcttcactattgactaatgaagttatttttagaaacaatggtcaaggaccccactctggctctatagtatataacagaagctcaccacacaagatcgataaccctttcagatcatactataccaagctgctacttcacttcagtagaacaattgatcacacacaagaagttcagatcagaaaatgcaggctgtcgctactcccatcaggttctcggatgtgttcccatcaagggctgaccgtggagaagagcacggtggtggttagtgtccctgttgttgtcacggcggtggttccgtgaagatcaagaggagcaaggatgttgtcaagttcaaggtgcgcccgttgcaactccaacctgttcccccccaattcagcaccaaagacagattcgttgtaaggaacttcaaaatctggaggcgcttaggatgccccagcccgctgcttttgtctccgtgcagccgtccgatggtcaacccacgccgagcaacgtctcgaacaagaatatgaagcacggtggcaaggtgttgttcttggatggcgccggggaggtcgccatcaccatcagtcgcaactcgcaacagcctctctccacagtccctgcacccggtgaatcttccggtgaatatgcggtctgtgacttattcgcagagccaaaattaccaacaagatgatttccataaaactgttgcacggaccttgagccaaggatcaacaccgatgagcatggattttcatccacttcaacaaactcttcttcttgacaatggccacttctccccaagcgaaaaaaatctgctagaagaccttagagggctttaacattgggatggatatttgggcccttaccttgctttaagtggagattcagttttctgttttcacttaatatgacaactgaagagcgaaagactttgaagggcacagagtcttcagctccttctgttcctcctgatggaggagtcagcaaggaacctaaaaaagggggagattacccaatgggaggacaactggtccagcacgccgctcatccaagggcaactggactctagaaaaggtaaagttggcactctggtttcctaaattcgttaatagcatgcattttcagtacaacatttgaataatgatgtaaataacctatcttagttagctttgttgaatgttatgcatttttagttaggctcatttgctcattacttttttattttgcttgatctgttaatgaaataaaaagtaccctgtccttaaggtgcgtgaactctgtaatccttgttgatttccgaccatgaatcagctgaattgttattttttatcatgtattgttaggtacagagttcatgcccataccatttatattattcttagcctgcccataccactttgatttcatttttcgtccatgtttcagttgaattttcctaacaaactatggtgttaatgccatggatgcttgtgtgtattggtggtttgctattctcacgtgtggtttccttgtggtgttgttctgaggtctacttaacacttttgtcgtggttgtatggtgttgggattcactaggaggtctacttaacacttttgtcgtggttgtatggtgttgggattcactaggaatgcgatcgtagcggctcgagctcttccttaccaagaggaacacaaacagagctcaggtttttttttattttgctctgcattatctactgcttctccatttgataagtaaccgatcaattttttgaatattttgagcacatcggaggtgtaggagttggtgaacacccatgatctgtagatgtcgcagttggaagggtccaggaagatttatgcacagggagatgattatcacgagtacttcaagcgctcatttgaggaagacatcgctgcgcaagtgcctcaaggagtggaatggggttacaactattgattgggggaaatcaggcagaggagggcatgttgacggaccaagtggcgaggcaaaattttctaatgattttgaagttcattatattggcagtagctgatgatcccttctgtgatggaccgagtaaaccaagcaattcgggatattcaactccactttgatgactgtgtgtaccagcatgagatgttgattacaattcacgacatatttattgttgtttattttttatttttcatattatagtgatgtttgttgttccgtatc

SEQ ID NO: 22999 - DNA, 2016 bp, Zea Mays
cacccatggcgataaaaaataaaaaatagaaatccatccaaaacccagctctgaaccgaaccgaaccgaaccccgccgtgctcgcttccactgccttcgattcctttggctctctctgtcgttggtcgtcctcgcccaccccaaccaaaaccccacggacggaacccaagaaagaagagaggggcacgagtccccatgaacgacgccggcgaggccgaggcgcaagaactcgccccacccggcgcctccgccgccgccggcctgcaaggcagggcggaggtcgacacctcgacgcccttcaagtcggtgcgcgaggccgtcgaccgcttcggcggcagcgccgcctggagctccgacctcatcaagcgtatgttcgcgctgcccccgagcccaaagaagcaggaggggggcgacgaactggccgatctggaggagcagaccgcgcagctagagaaggagctcggcgtcaaggaaagggagacgcttgatgtgctcaaagagttggagtccaccaagaaggtggtcgcagatttgaagctaaagatacagaacgaaggtgccggtgcattttgcatccctgaagagagtgttcggggtcaagccgagctgcccactgccgctgaagaggttgcagaagtgcagcctgagaatgctgaaactgatgtggttatgggcgcgcttcatgtgcagctgcaccagtctcctggtacttcagtgctgaagggccttgagcaggcaaaagccaatctaaacaggaccacgagtgatcttgcagctataagggcctccgtcgagtcgctgcggaacgacattgcgaaagagagaatcttggtggagagaagccgagagaaggtatgtgccaacacgacactgattgcttctctggaggatgagctgaaccggactgcacagaagctgcagacgctgcgggatctgcagaggaggcgtgacgatcaatcggacatcttcatagagatcaagaagatgacatctgagctagagcagctcaggaatgcagcgagtgctgccaaatcggaagctgctatgctgtctgccgaaattgagcagatgagagctagcaggacagaatctgactccctcagaaagctggaggaagctcgattacaggttgaggaatgtaagaaggcgctacaggatgcccagaagagggtggatgctgctaaccgagggaagagcgcagtagaagaggctcttcgcagatgtcgatccacgactggacacaggaggaggtcggtccatgaccctcccaggttcaaacatccagctccccgttccagagattctcagaatatggatatcgtcggtgtttcaaagggtcccttgaaaccaacgttgtcaatagggcagatactgagtatgaagctaatgggaccagatgggtatgacaaaagcgtctgggacgacgcaagcgaagcttctactatgtcgctcggacatatcctgaaccgcaggcatgcagtcgtgtatagcagcgatgcaactgctcagaagaaattcccagggaagaggaagaagtttgcctttacaggactctctattttcttggcgagacaggccaagaggaagaaggaaaagggatcgcattagaaactgctgaagccaacttgggctgggaaaagagaagcattgtagtctaccttgctagctgttaactcagaccctagtgttactgttcttgtaatttactagtatgtgtcgttgataggtgcctagatcattggtttttccatagcaggctagtaagttgtagctgatatttctgtctagtggttatttcaggtgctgtgtgaacttgcaatgtagcagtatgactagtagctgatatcaagtatatgaggcatatgtggttcactgagattggaatcttcttctctgctacatgatttcacaactgatacctctctgttttgtgaacttggtcttttcaaccatggttctaacctgtcttgatgaaacgcgtgcttgcatgtccttcaagaaaataagaaaaaaaaa

SEQ ID NO: 23000 - DNA, 705 bp, Zea Mays
cttttatgcctctggttggggtggtttctcgaagaaagttttcttaatccagtcaaatggctgcaaaacagttaagtccaaaaagagtttcagaatccattgatccaaaagaatgtattaaatagagtaacgtcaaatggtagtttcaggccaaatcacatgtctccagccaataagttgagagggagataagagttattagatcgctaaaagaagggaaacatcattacaaacccaaatcacctaccgtaacacatgcattatcaggaataaagacaacctgttggtgagacctacatgagcacttaattttcattataaaaacacatattcttatttctccaaataccctcaataagttcctcaaacaagagcattgcagcacaagatttaacgtggctataaaaagaaccaggtgatgcaaatcaaggcacccaccaaaaaaaaatagatgaaggtgaaagcaaaatgatgccaccacatgaccacgtaggttaactaagaacttatattacaataccaatgtgttacgaatttaaccattagtcagaattatgttagatttctacattctaccatgtgatagcagaaatcggtgtacttccataaactacagtctactgtataatcctggtccaacttatttttttgacaatgggatacccctatttcattaagaaatagaaaccaaacacagttcttaca

SEQ ID NO: 23001 - DNA, 4486 bp, Zea Mays
agctaaaatatggattgagataactgctcacaacggcagggtcaaccgggatccccttttcatttcacacgaacccaatgcgcgtcgcaggccagaccgccagagagagagggaaggtgaccgggatagagaaagaaaagtagaaacccaaacccccggcgaggacgccaccgtggcgacggcggatgcggcggggctggtccccgcggacctggagagtcgggtgatggaggcggtgaaggcgtcggaggcgcgccgcgacccgccgctgctgcgggcggtggagctgtcccgcgtcgtcgccgaagagggcgcgggcgccgagctggccgggatcctcgtctccaacctctgtttcgcgcacaactcgccctcgctctggaagctcctgggccaagccgtcgcgtcccgcctcctctgcccgctccacgtcctcgcgctcctcacccctagggtgttgccgcagcggcgagcgcagcctgaggcgtatcggctgtatctggagctcctcaagtgtcacgccacgtcgtcgttgctggcgatggaggctgggcctaaccgtgacaagatagggaagtccattgctgaagctttgcaactatccaaggtttatggattttctggaacagagtttggacatgttgtcattctgtttgtgttggctgttgtcaataaactgattgatagcatactcgaggattgtggctttccatctgtgatggcagaggggcaagagagtgtatatgccattgaggggccacagcctatggacttagacattaaaaggggatctactgagaaccaaaatgagcatcgcgaacagttacgccggaagaacactttcatggctttggacgtgttgcatatgatggctgctgatagaaagattcaatcatttctgagcttgatattcctgaacatgcctgaaaagttcagttctctacgccagaggttgagttctattgaagcacacaaggtgaccttggagactctactgccttctggacacaaaattaatgacttgttaataaacatctggagagtttgcaaagcaggctatcaaccaaataacaaacacattctgggtgttcttggtaatatgggatccggtggctcccttctgggccagcttactggagctgggaggcctgcctgctggataatatttgatatatatgtggagaatgcaattgatgggaagcatctaagtgttacatcagctatcgggattataaaagaaatgaccaagacaatgcaagtgcttaatgaagcaagctggcaggaaacatttaaagctctttggatttccacccttcgtcttgtacaacgggctagagaacctcttgaaggaccgattcctcatctagatgcaaggttatgcatgttgttagctcttataccattatcaattgccgcgattcttcaagaggaaagtgatatgtttggagttgaagggaacaaaattcttccacaaagacaagggcttatatcatctctccaggatctgatccagtattcaggacttcttgtaccaccttcatcagtggtgaatgcagctaatgctgcagcctcaaaagcagcaatatttaaggccaactataaggctggggctggcaacactagcatgatggaccagactgactcttcaatgaaagctgctgggaacatgctccatctcattatcgaagcctgtatctcgagaaagttgattgatacatctgcttacttatggcatggttatgttgtaccatctaggactttaaaagatacagctttgccccaagaatccccctggctgaactttatgaaagggtctcaactttcagaaccccttattgatgctctggtcgcaactcctgcttcaagtgttgcggaattggacaagttatacagtgtagcaacaaatggttcagaagaagaaaaaacagctgctgcaaagattctttgtggcgcatcacttgttcgtggctggaacattcaggaacatgtggtcagtatggtggtcaagctattatcagcttctttaccctcagattcctcaacttcaactcctgggagcatgagccactaccttgctcatatgtctacgttgaacgaaatcttactcggtgtgtcttatggtgatgtcatccacattctttcgttgtatggaatggttccagatgttgccgtggctttaatgccactatgtgaggcttttgggtcaatagcaccgccacctaatcacaagtctaccattcttggtgaaacatctgtttatttggtcttctcctgtgcatttctttgtcttcttcgcttgtggaagttttatagaccccctcaagagtattgtcttactggtcgtggaggctcagtaaagctggaactgactctggactatctgttgttgatgcacaataatcgcattttctcaaattcgtctgcccctaatagggattcttacaacagtatgggctcagtcaatgaggtctctgctcagccgatttatattgattctttccccaagctaagtgcttggtatttccagaatcaagcttgcatcgcctctacactttctggtctttgcaacaaaaaccctgtccatcaagttgcgaacaaaattttgaatatgatttgccgaaaaatgaataaaggtggagtatcatctagtaatctttcatctacttctagtagtagcgttagtggttcttctgtaagtgcatcggatgattcttaccaaaggcctgctgttcctgcttgggaatttttagaagctgttccttttgtacttgaagctgttctgacagcatgtgctcatgggcggctttccagccgagacttgactacaagcttaagggatcttgtggactttttgcctgcttctcttgctgcaattgtaagctacttctcagcagaaattacacggggaatctggaaacctgttccaatgaatggaactgaatggcccagtcctggtgcttctcttcattccattgaagctgaagtaaaggaaattcttgcatctgctggtgttcagattaacagctgctatccacgtggtgtgccgccaatgcttcctttgcctatggctgcacttgtcagcttgacaattacatttaagctagataggagtttggagtacattcaaggggtcattggacatgcactagagaactgcgcagggggaagttcctggccaagcatgcccattatcggggcattgtggacacagaaagtgcgaagatggcatgacttcattgtcctctcttgtatgcgttctccatttggcagagacaaagatgcagttgcgcagctcatccgaagctgcttttcgtcctttctgcagtcatcatccagtggttctgacataatcgcaaaccgtggagttggggctttattaggggactcaatcacggatcaaggtcttaggctcccaatggcacctggtttcgtctacctgagaacatgtcgaactttccatgacacatacttcgttagtgaagtgatcctcaagcaagtgattgaatgggctcacaaacttgcaaatggatggtctttcaatgggcctccgcagttgaaatcaggccggacaccactatcttgtgcagcatctatggcgcatcaggtcgcgatgcttggtggtggtctcctatgcatagcaggtggaccacttgtggtccaggtgttgtatgaagacacactaccgacactgctgctgtcagccagagaacagagtttgaaagaccctgggccagtttctagcacactccaaggttacgccatggccaacatgctcttttactgtggtagcctactttggggagcggacaggagttctcctgtcatgaaattgtctttcctctcgaggcggccacgggtggtgagaaaccacatggatttcatagctggtgtactggacggacacattcttctgggctgtgacccgggtacctggaaagcgtatgtttctcagtttatgttcctggtggtgaagtttgttccatcatggttgccggacataaagctggacacgctaaagaagatagcagctggacttcggagttggcatgaacatgaccttgctctatcccttcttgagcgaggaggaccacaagcaatctctgttgtagtcgagacctttctgtgatcctgccatttggacattttgccccccacctgacatcgcagccgctgttagggtttgaagtcggtggtctgaggtctagctgaagtaatcaggatgacccttccagaattccacttgagcaaccaggataactgatgtttttctcatgtatggcgaacccattttgtttttgtgaattcaatacggaagaacattcaacctactagagtctagagtgtattgacatcagccctaacatgtaacctatgggaatttcattaactttattgcactgacttcagccctaacttgtaacatacgggaatactctatcgtgttttatatcggcgttttagttgggataaccgaactttactctcc

SEQ ID NO: 23002 - DNA, 4132 bp, Zea Mays
agctaaaatatggattgagataactgctcacaacggcagggtcaaccgggatccccttttcatttcacacgaacccaatgcgcgtcgcaggccagaccgccagagagagagggaaggtgaccgggatagagaaagaaaagtagaaacccaaacccccggcgaggacgccaccgtggcgacggcggatgcggcggggctggtccccgcggacctggagagtcgggtgatggaggcggtgaaggcgtcggaggcgcgccgcgacccgccgctgctgcgggcggtggagctgtcccgcgtcgtcgccgaagagggcgcgggcgccgagctggccgggatcctcgtctccaacctctgtttcgcgcacaactcgccctcgctctggaagctcctgggccaagccgtcgcgtcccgcctcctctgcccgctccacgtcctcgcgctcctcacccctagggtgttgccgcagcggcgagcgcagcctgaggcgtatcggctgtatctggagctcctcaagtgtcacgccacgtcgtcgttgctggcgatggaggctgggcctaaccgtgacaagcctgaaaagttcagttctctacgccagaggttgagttctattgaagcacacaaggtgaccttggagactctactgccttctggacacaaaattaatgacttgttaataaacatctggagagtttgcaaagcaggctatcaaccaaataacaaacacattctgggtgttcttggtaatatgggatccggtggctcccttctgggccagcttactggagctgggaggcctgcctgctggataatatttgatatatatgtggagaatgcaattgatgggaagcatctaagtgttacatcagctatcgggattataaaagaaatgaccaagacaatgcaagtgcttaatgaagcaagctggcaggaaacatttaaagctctttggatttccacccttcgtcttgtacaacgggctagagaacctcttgaaggaccgattcctcatctagatgcaaggttatgcatgttgttagctcttataccattatcaattgccgcgattcttcaagaggaaagtgatatgtttggagttgaagggaacaaaattcttccacaaagacaagggcttatatcatctctccaggatctgatccagtattcaggacttcttgtaccaccttcatcagtggtgaatgcagctaatgctgcagcctcaaaagcagcaatatttaaggccaactataaggctggggctggcaacactagcatgatggaccagactgactcttcaatgaaagctgctgggaacatgctccatctcattatcgaagcctgtatctcgagaaagttgattgatacatctgcttacttatggcatggttatgttgtaccatctaggactttaaaagatacagctttgccccaagaatccccctggctgaactttatgaaagggtctcaactttcagaaccccttattgatgctctggtcgcaactcctgcttcaagtgttgcggaattggacaagttatacagtgtagcaacaaatggttcagaagaagaaaaaacagctgctgcaaagattctttgtggcgcatcacttgttcgtggctggaacattcaggaacatgtggtcagtatggtggtcaagctattatcagcttctttaccctcagattcctcaacttcaactcctgggagcatgagccactaccttgctcatatgtctacgttgaacgaaatcttactcggtgtgtcttatggtgatgtcatccacattctttcgttgtatggaatggttccagatgttgccgtggctttaatgccactatgtgaggcttttgggtcaatagcaccgccacctaatcacaagtctaccattcttggtgaaacatctgtttatttggtcttctcctgtgcatttctttgtcttcttcgcttgtggaagttttatagaccccctcaagagtattgtcttactggtcgtggaggctcagtaaagctggaactgactctggactatctgttgttgatgcacaataatcgcattttctcaaattcgtctgcccctaatagggattcttacaacagtatgggctcagtcaatgaggtctctgctcagccgatttatattgattctttccccaagctaagtgcttggtatttccagaatcaagcttgcatcgcctctacactttctggtctttgcaacaaaaaccctgtccatcaagttgcgaacaaaattttgaatatgatttgccgaaaaatgaataaaggtggagtatcatctagtaatctttcatctacttctagtagtagcgttagtggttcttctgtaagtgcatcggatgattcttaccaaaggcctgctgttcctgcttgggaatttttagaagctgttccttttgtacttgaagctgttctgacagcatgtgctcatgggcggctttccagccgagacttgactacaagcttaagggatcttgtggactttttgcctgcttctcttgctgcaattgtaagctacttctcagcagaaattacacggggaatctggaaacctgttccaatgaatggaactgaatggcccagtcctggtgcttctcttcattccattgaagctgaagtaaaggaaattcttgcatctgctggtgttcagattaacagctgctatccacgtggtgtgccgccaatgcttcctttgcctatggctgcacttgtcagcttgacaattacatttaagctagataggagtttggagtacattcaaggggtcattggacatgcactagagaactgcgcagggggaagttcctggccaagcatgcccattatcggggcattgtggacacagaaagtgcgaagatggcatgacttcattgtcctctcttgtatgcgttctccatttggcagagacaaagatgcagttgcgcagctcatccgaagctgcttttcgtcctttctgcagtcatcatccagtggttctgacataatcgcaaaccgtggagttggggctttattaggggactcaatcacggatcaaggtcttaggctcccaatggcacctggtttcgtctacctgagaacatgtcgaactttccatgacacatacttcgttagtgaagtgatcctcaagcaagtgattgaatgggctcacaaacttgcaaatggatggtctttcaatgggcctccgcagttgaaatcaggccggacaccactatcttgtgcagcatctatggcgcatcaggtcgcgatgcttggtggtggtctcctatgcatagcaggtggaccacttgtggtccaggtgttgtatgaagacacactaccgacactgctgctgtcagccagagaacagagtttgaaagaccctgggccagtttctagcacactccaaggttacgccatggccaacatgctcttttactgtggtagcctactttggggagcggacaggagttctcctgtcatgaaattgtctttcctctcgaggcggccacgggtggtgagaaaccacatggatttcatagctggtgtactggacggacacattcttctgggctgtgacccgggtacctggaaagcgtatgtttctcagtttatgttcctggtggtgaagtttgttccatcatggttgccggacataaagctggacacgctaaagaagatagcagctggacttcggagttggcatgaacatgaccttgctctatcccttcttgagcgaggaggaccacaagcaatctctgttgtagtcgagacctttctgtgatcctgccatttggacattttgccccccacctgacatcgcagccgctgttagggtttgaagtcggtggtctgaggtctagctgaagtaatcaggatgacccttccagaattccacttgagcaaccaggataactgatgtttttctcatgtatggcgaacccattttgtttttgtgaattcaatacggaagaacattcaacctactagagtctagagtgtattgacatcagccctaacatgtaacctatgggaatttcattaactttattgcactgacttcagccctaacttgtaacatacgggaatactctatcgtgttttatatcggcgttttagttgggataaccgaactttactctcc

SEQ ID NO: 23003 - DNA, 3963 bp, Zea Mays
agctaaaatatggattgagataactgctcacaacggcagggtcaaccgggatccccttttcatttcacacgaacccaatgcgcgtcgcaggccagaccgccagagagagagggaaggtgaccgggatagagaaagaaaagtagaaacccaaacccccggcgaggacgccaccgtggcgacggcggatgcggcggggctggtccccgcggacctggagagtcgggtgatggaggcggtgaaggcgtcggaggcgcgccgcgacccgccgctgctgcgggcggtggagctgtcccgcgtcgtcgccgaagagggcgcgggcgccgagctggccgggatcctcgtctccaacctctgtttcgcgcacaactcgccctcgctctggaagctcctgggccaagccgtcgcgtcccgcctcctctgcccgctccacgtcctcgcgctcctcacccctagggtgttgccgcagcggcgagcgcagcctgaggcgtatcggctgtatctggagctcctcaagtgtcacgccacgtcgtcgttgctggcgatggaggctgggcctaaccgtgacaagttaggcctgaaaagttcagttctctacgccagaggttgagttctattgaagcacacaaggtgaccttggagactctactgccttctggacacaaaattaatgacttgttaataaacatctggagagtttgcaaagcaggctatcaaccaaataacaaacacattctgggtgttcttggtaatatgggatccggtggctcccttctgggccagcttactggagctgggaggcctgcctgctggataatatttgatatatatgtggagaatgcaattgatgggaagcatctaagtgttacatcagctatcgggattataaaagaaatgaccaagacaatgcaagtgcttaatgaagcaagctggcaggaaacatttaaagctctttggatttccacccttcgtcttgtacaacgggctagagaacctcttgaaggaccgattcctcatctagatgcaaggttatgcatgttgttagctcttataccattatcaattgccgcgattcttcaagaggaaagtgatatgtttggagttgaagggaacaaaattcttccacaaagacaagggcttatatcatctctccaggatctgatccagtattcaggacttcttgtaccaccttcatcagtggtgaatgcagctaatgctgcagcctcaaaagcagcaatatttaaggccaactataaggctggggctggcaacactagcatgatggaccagactgactcttcaatgaaagctgctgggaacatgctccatctcattatcgaagcctgtatctcgagaaagttgattgatacatctgcttacttatggcatggttatgttgtaccatctaggactttaaaagatacagctttgccccaagaatccccctggctgaactttatgaaagggtctcaactttcagaaccccttattgatgctctggtcgcaactcctgcttcaagtgttgcggaattggacaagttatacagtgtagcaacaaatggttcagaagaagaaaaaacagctgctgcaaagattctttgtggcgcatcacttgttcgtggctggaacattcaggttccagatgttgccgtggctttaatgccactatgtgaggcttttgggtcaatagcaccgccacctaatcacaagtctaccattcttggtgaaacatctgtttatttggtcttctcctgtgcatttctttgtcttcttcgcttgtggaagttttatagaccccctcaagagtattgtcttactggtcgtggaggctcagtaaagctggaactgactctggactatctgttgttgatgcacaataatcgcattttctcaaattcgtctgcccctaatagggattcttacaacagtatgggctcagtcaatgaggtctctgctcagccgatttatattgattctttccccaagctaagtgcttggtatttccagaatcaagcttgcatcgcctctacactttctggtctttgcaacaaaaaccctgtccatcaagttgcgaacaaaattttgaatatgatttgccgaaaaatgaataaaggtggagtatcatctagtaatctttcatctacttctagtagtagcgttagtggttcttctgtaagtgcatcggatgattcttaccaaaggcctgctgttcctgcttgggaatttttagaagctgttccttttgtacttgaagctgttctgacagcatgtgctcatgggcggctttccagccgagacttgactacaagcttaagggatcttgtggactttttgcctgcttctcttgctgcaattgtaagctacttctcagcagaaattacacggggaatctggaaacctgttccaatgaatggaactgaatggcccagtcctggtgcttctcttcattccattgaagctgaagtaaaggaaattcttgcatctgctggtgttcagattaacagctgctatccacgtggtgtgccgccaatgcttcctttgcctatggctgcacttgtcagcttgacaattacatttaagctagataggagtttggagtacattcaaggggtcattggacatgcactagagaactgcgcagggggaagttcctggccaagcatgcccattatcggggcattgtggacacagaaagtgcgaagatggcatgacttcattgtcctctcttgtatgcgttctccatttggcagagacaaagatgcagttgcgcagctcatccgaagctgcttttcgtcctttctgcagtcatcatccagtggttctgacataatcgcaaaccgtggagttggggctttattaggggactcaatcacggatcaaggtcttaggctcccaatggcacctggtttcgtctacctgagaacatgtcgaactttccatgacacatacttcgttagtgaagtgatcctcaagcaagtgattgaatgggctcacaaacttgcaaatggatggtctttcaatgggcctccgcagttgaaatcaggccggacaccactatcttgtgcagcatctatggcgcatcaggtcgcgatgcttggtggtggtctcctatgcatagcaggtggaccacttgtggtccaggtgttgtatgaagacacactaccgacactgctgctgtcagccagagaacagagtttgaaagaccctgggccagtttctagcacactccaaggttacgccatggccaacatgctcttttactgtggtagcctactttggggagcggacaggagttctcctgtcatgaaattgtctttcctctcgaggcggccacgggtggtgagaaaccacatggatttcatagctggtgtactggacggacacattcttctgggctgtgacccgggtacctggaaagcgtatgtttctcagtttatgttcctggtggtgaagtttgttccatcatggttgccggacataaagctggacacgctaaagaagatagcagctggacttcggagttggcatgaacatgaccttgctctatcccttcttgagcgaggaggaccacaagcaatctctgttgtagtcgagacctttctgtgatcctgccatttggacattttgccccccacctgacatcgcagccgctgttagggtttgaagtcggtggtctgaggtctagctgaagtaatcaggatgacccttccagaattccacttgagcaaccaggataactgatgtttttctcatgtatggcgaacccattttgtttttgtgaattcaatacggaagaacattcaacctactagagtctagagtgtattgacatcagccctaacatgtaacctatgggaatttcattaactttattgcactgacttcagccctaacttgtaacatacgggaatactctatcgtgttttatatcggcgttttagttgggataaccgaactttactctcc

SEQ ID NO: 23004 - DNA, 4244 bp, Zea Mays
agctaaaatatggattgagataactgctcacaacggcagggtcaaccgggatccccttttcatttcacacgaacccaatgcgcgtcgcaggccagaccgccagagagagagggaaggtgaccgggatagagaaagaaaagtagaaacccaaacccccggcgaggacgccaccgtggcgacggcggatgcggcggggctggtccccgcggacctggagagtcgggtgatggaggcggtgaaggcgtcggaggcgcgccgcgacccgccgctgctgcgggcggtggagctgtcccgcgtcgtcgccgaagagggcgcgggcgccgagctggccgggatcctcgtctccaacctctgtttcgcgcacaactcgccctcgctctggaagctcctgggccaagccgtcgcgtcccgcctcctctgcccgctccacgtcctcgcgctcctcacccctagggtgttgccgcagcggcgagcgcagcctgaggcgtatcggctgtatctggagctcctcaagtgtcacgccacgtcgtcgttgctggcgatggaggctgggcctaaccgtgacaacatactcgaggattgtggctttccatctgtgatggcagaggggcaagagagtgtatatgccattgaggggccacagcctatggacttagacattaaaaggggatctactgagaaccaaaatgagcatcgcgaacagttacgccggaagaacactttcatggctttggacgtgttgcatatgatggctgctgatagaaagattcaatcatttctgagcttgatattcctgaacatgcctgaaaagttcagttctctacgccagaggttgagttctattgaagcacacaaggtgaccttggagactctactgccttctggacacaaaattaatgacttgttaataaacatctggagagtttgcaaagcaggctatcaaccaaataacaaacacattctgggtgttcttggtaatatgggatccggtggctcccttctgggccagcttactggagctgggaggcctgcctgctggataatatttgatatatatgtggagaatgcaattgatgggaagcatctaagtgttacatcagctatcgggattataaaagaaatgaccaagacaatgcaagtgcttaatgaagcaagctggcaggaaacatttaaagctctttggatttccacccttcgtcttgtacaacggagaacctcttgaaggaccgattcctcatctagatgcaaggttatgcatgttgttagctcttataccattatcaattgccgcgattcttcaagaggaaagtgatatgtttggagttgaagggaacaaaattcttccacaaagacaagggcttatatcatctctccaggatctgatccagtattcaggacttcttgtaccaccttcatcagtggtgaatgcagctaatgctgcagcctcaaaagcagcaatatttaaggccaactataaggctggggctggcaacactagcatgatggaccagactgactcttcaatgaaagctgctgggaacatgctccatctcattatcgaagcctgtatctcgagaaagttgattgatacatctgcttacttatggcatggttatgttgtaccatctaggactttaaaagatacagctttgccccaagaatccccctggctgaactttatgaaagggtctcaactttcagaaccccttattgatgctctggtcgcaactcctgcttcaagtgttgcggaattggacaagttatacagtgtagcaacaaatggttcagaagaagaaaaaacagctgctgcaaagattctttgtggcgcatcacttgttcgtggctggaacattcaggaacatgtggtcagtatggtggtcaagctattatcagcttctttaccctcagattcctcaacttcaactcctgggagcatgagccactaccttgctcatatgtctacgttgaacgaaatcttactcggtgtgtcttatggtgatgtcatccacattctttcgttgtatggaatggttccagatgttgccgtggctttaatgccactatgtgaggcttttgggtcaatagcaccgccacctaatcacaagtctaccattcttggtgaaacatctgtttatttggtcttctcctgtgcatttctttgtcttcttcgcttgtggaagttttatagaccccctcaagagtattgtcttactggtcgtggaggctcagtaaagctggaactgactctggactatctgttgttgatgcacaataatcgcattttctcaaattcgtctgcccctaatagggattcttacaacagtatgggctcagtcaatgaggtctctgctcagccgatttatattgattctttccccaagctaagtgcttggtatttccagaatcaagcttgcatcgcctctacactttctggtctttgcaacaaaaaccctgtccatcaagttgcgaacaaaattttgaatatgatttgccgaaaaatgaataaagaagctgttccttttgtacttgaagctgttctgacagcatgtgctcatgggcggctttccagccgagacttgactacaagcttaagggatcttgtggactttttgcctgcttctcttgctgcaattgtaagctacttctcagcagaaattacacggggaatctggaaacctgttccaatgaatggaactgaatggcccagtcctggtgcttctcttcattccattgaagctgaagtaaaggaaattcttgcatctgctggtgttcagattaacagctgctatccacgtggtgtgccgccaatgcttcctttgcctatggctgcacttgtcagcttgacaattacatttaagctagataggagtttggagtacattcaaggggtcattggacatgcactagagaactgcgcagggggaagttcctggccaagcatgcccattatcggggcattgtggacacagaaagtgcgaagatggcatgacttcattgtcctctcttgtatgcgttctccatttggcagagacaaagatgcagttgcgcagctcatccgaagctgcttttcgtcctttctgcagtcatcatccagtggttctgacataatcgcaaaccgtggagttggggctttattaggggactcaatcacggatcaaggtcttaggctcccaatggcacctggtttcgtctacctgagaacatgtcgaactttccatgacacatacttcgttagtgaagtgatcctcaagcaagtgattgaatgggctcacaaacttgcaaatggatggtctttcaatgggcctccgcagttgaaatcaggccggacaccactatcttgtgcagcatctatggcgcatcaggtcgcgatgcttggtggtggtctcctatgcatagcaggtggaccacttgtggtccaggtgttgtatgaagacacactaccgacactgctgctgtcagccagagaacagagtttgaaagaccctgggccagtttctagcacactccaaggttacgccatggccaacatgctcttttactgtggtagcctactttggggagcggacaggagttctcctgtcatgaaattgtctttcctctcgaggcggccacgggtggtgagaaaccacatggatttcatagctggtgtactggacggacacattcttctgggctgtgacccgggtacctggaaagcgtatgtttctcagtttatgttcctggtggtgaagtttgttccatcatggttgccggacataaagctggacacgctaaagaagatagcagctggacttcggagttggcatgaacatgaccttgctctatcccttcttgagcgaggaggaccacaagcaatctctgttgtagtcgagacctttctgtgatcctgccatttggacattttgccccccacctgacatcgcagccgctgttagggtttgaagtcggtggtctgaggtctagctgaagtaatcaggatgacccttccagaattccacttgagcaaccaggataactgatgtttttctcatgtatggcgaacccattttgtttttgtgaattcaatacggaagaacattcaacctactagagtctagagtgtattgacatcagccctaacatgtaacctatgggaatttcattaactttattgcactgacttcagccctaacttgtaacatacgggaatactctatcgtgttttatatcggcgttttagttgggataaccgaactttactctcc

SEQ ID NO: 23005 - DNA, 4491 bp, Zea Mays
agctaaaatatggattgagataactgctcacaacggcagggtcaaccgggatccccttttcatttcacacgaacccaatgcgcgtcgcaggccagaccgccagagagagagggaaggtgaccgggatagagaaagaaaagtagaaacccaaacccccggcgaggacgccaccgtggcgacggcggatgcggcggggctggtccccgcggacctggagagtcgggtgatggaggcggtgaaggcgtcggaggcgcgccgcgacccgccgctgctgcgggcggtggagctgtcccgcgtcgtcgccgaagagggcgcgggcgccgagctggccgggatcctcgtctccaacctctgtttcgcgcacaactcgccctcgctctggaagctcctgggccaagccgtcgcgtcccgcctcctctgcccgctccacgtcctcgcgctcctcacccctagggtgttgccgcagcggcgagcgcagcctgaggcgtatcggctgtatctggagctcctcaagtgtcacgccacgtcgtcgttgctggcgatggaggctgggcctaaccgtgacaagatagggaagtccattgctgaagctttgcaactatccaaggtttatggattttctggaacagagtttggacatgttgtcattctgtttgtgttggctgttgtcaataaactgattgatagcatactcgaggattgtggctttccatctgtgatggcagaggggcaagagagtgtatatgccattgaggggccacagcctatggacttagacattaaaaggggatctactgagaaccaaaatgagcatcgcgaacagttacgccggaagaacactttcatggctttggacgtgttgcatatgatggctgctgatagaaagattcaatcatttctgagcttgatattcctgaacatgttaggcctgaaaagttcagttctctacgccagaggttgagttctattgaagcacacaaggtgaccttggagactctactgccttctggacacaaaattaatgacttgttaataaacatctggagagtttgcaaagcaggctatcaaccaaataacaaacacattctgggtgttcttggtaatatgggatccggtggctcccttctgggccagcttactggagctgggaggcctgcctgctggataatatttgatatatatgtggagaatgcaattgatgggaagcatctaagtgttacatcagctatcgggattataaaagaaatgaccaagacaatgcaagtgcttaatgaagcaagctggcaggaaacatttaaagctctttggatttccacccttcgtcttgtacaacgggctagagaacctcttgaaggaccgattcctcatctagatgcaaggttatgcatgttgttagctcttataccattatcaattgccgcgattcttcaagaggaaagtgatatgtttggagttgaagggaacaaaattcttccacaaagacaagggcttatatcatctctccaggatctgatccagtattcaggacttcttgtaccaccttcatcagtggtgaatgcagctaatgctgcagcctcaaaagcagcaatatttaaggccaactataaggctggggctggcaacactagcatgatggaccagactgactcttcaatgaaagctgctgggaacatgctccatctcattatcgaagcctgtatctcgagaaagttgattgatacatctgcttacttatggcatggttatgttgtaccatctaggactttaaaagatacagctttgccccaagaatccccctggctgaactttatgaaagggtctcaactttcagaaccccttattgatgctctggtcgcaactcctgcttcaagtgttgcggaattggacaagttatacagtgtagcaacaaatggttcagaagaagaaaaaacagctgctgcaaagattctttgtggcgcatcacttgttcgtggctggaacattcaggaacatgtggtcagtatggtggtcaagctattatcagcttctttaccctcagattcctcaacttcaactcctgggagcatgagccactaccttgctcatatgtctacgttgaacgaaatcttactcggtgtgtcttatggtgatgtcatccacattctttcgttgtatggaatggttccagatgttgccgtggctttaatgccactatgtgaggcttttgggtcaatagcaccgccacctaatcacaagtctaccattcttggtgaaacatctgtttatttggtcttctcctgtgcatttctttgtcttcttcgcttgtggaagttttatagaccccctcaagagtattgtcttactggtcgtggaggctcagtaaagctggaactgactctggactatctgttgttgatgcacaataatcgcattttctcaaattcgtctgcccctaatagggattcttacaacagtatgggctcagtcaatgaggtctctgctcagccgatttatattgattctttccccaagctaagtgcttggtatttccagaatcaagcttgcatcgcctctacactttctggtctttgcaacaaaaaccctgtccatcaagttgcgaacaaaattttgaatatgatttgccgaaaaatgaataaaggtggagtatcatctagtaatctttcatctacttctagtagtagcgttagtggttcttctgtaagtgcatcggatgattcttaccaaaggcctgctgttcctgcttgggaatttttagaagctgttccttttgtacttgaagctgttctgacagcatgtgctcatgggcggctttccagccgagacttgactacaagcttaagggatcttgtggactttttgcctgcttctcttgctgcaattgtaagctacttctcagcagaaattacacggggaatctggaaacctgttccaatgaatggaactgaatggcccagtcctggtgcttctcttcattccattgaagctgaagtaaaggaaattcttgcatctgctggtgttcagattaacagctgctatccacgtggtgtgccgccaatgcttcctttgcctatggctgcacttgtcagcttgacaattacatttaagctagataggagtttggagtacattcaaggggtcattggacatgcactagagaactgcgcagggggaagttcctggccaagcatgcccattatcggggcattgtggacacagaaagtgcgaagatggcatgacttcattgtcctctcttgtatgcgttctccatttggcagagacaaagatgcagttgcgcagctcatccgaagctgcttttcgtcctttctgcagtcatcatccagtggttctgacataatcgcaaaccgtggagttggggctttattaggggactcaatcacggatcaaggtcttaggctcccaatggcacctggtttcgtctacctgagaacatgtcgaactttccatgacacatacttcgttagtgaagtgatcctcaagcaagtgattgaatgggctcacaaacttgcaaatggatggtctttcaatgggcctccgcagttgaaatcaggccggacaccactatcttgtgcagcatctatggcgcatcaggtcgcgatgcttggtggtggtctcctatgcatagcaggtggaccacttgtggtccaggtgttgtatgaagacacactaccgacactgctgctgtcagccagagaacagagtttgaaagaccctgggccagtttctagcacactccaaggttacgccatggccaacatgctcttttactgtggtagcctactttggggagcggacaggagttctcctgtcatgaaattgtctttcctctcgaggcggccacgggtggtgagaaaccacatggatttcatagctggtgtactggacggacacattcttctgggctgtgacccgggtacctggaaagcgtatgtttctcagtttatgttcctggtggtgaagtttgttccatcatggttgccggacataaagctggacacgctaaagaagatagcagctggacttcggagttggcatgaacatgaccttgctctatcccttcttgagcgaggaggaccacaagcaatctctgttgtagtcgagacctttctgtgatcctgccatttggacattttgccccccacctgacatcgcagccgctgttagggtttgaagtcggtggtctgaggtctagctgaagtaatcaggatgacccttccagaattccacttgagcaaccaggataactgatgtttttctcatgtatggcgaacccattttgtttttgtgaattcaatacggaagaacattcaacctactagagtctagagtgtattgacatcagccctaacatgtaacctatgggaatttcattaactttattgcactgacttcagccctaacttgtaacatacgggaatactctatcgtgttttatatcggcgttttagttgggataaccgaactttactctcc

SEQ ID NO: 23006 - DNA, 4371 bp, Zea Mays
agctaaaatatggattgagataactgctcacaacggcagggtcaaccgggatccccttttcatttcacacgaacccaatgcgcgtcgcaggccagaccgccagagagagagggaaggtgaccgggatagagaaagaaaagtagaaacccaaacccccggcgaggacgccaccgtggcgacggcggatgcggcggggctggtccccgcggacctggagagtcgggtgatggaggcggtgaaggcgtcggaggcgcgccgcgacccgccgctgctgcgggcggtggagctgtcccgcgtcgtcgccgaagagggcgcgggcgccgagctggccgggatcctcgtctccaacctctgtttcgcgcacaactcgccctcgctctggaagctcctgggccaagccgtcgcgtcccgcctcctctgcccgctccacgtcctcgcgctcctcacccctagggtgttgccgcagcggcgagcgcagcctgaggcgtatcggctgtatctggagctcctcaagtgtcacgccacgtcgtcgttgctggcgatggaggctgggcctaaccgtgacaacatactcgaggattgtggctttccatctgtgatggcagaggggcaagagagtgtatatgccattgaggggccacagcctatggacttagacattaaaaggggatctactgagaaccaaaatgagcatcgcgaacagttacgccggaagaacactttcatggctttggacgtgttgcatatgatggctgctgatagaaagattcaatcatttctgagcttgatattcctgaacatgttaggcctgaaaagttcagttctctacgccagaggttgagttctattgaagcacacaaggtgaccttggagactctactgccttctggacacaaaattaatgacttgttaataaacatctggagagtttgcaaagcaggctatcaaccaaataacaaacacattctgggtgttcttggtaatatgggatccggtggctcccttctgggccagcttactggagctgggaggcctgcctgctggataatatttgatatatatgtggagaatgcaattgatgggaagcatctaagtgttacatcagctatcgggattataaaagaaatgaccaagacaatgcaagtgcttaatgaagcaagctggcaggaaacatttaaagctctttggatttccacccttcgtcttgtacaacgggctagagaacctcttgaaggaccgattcctcatctagatgcaaggttatgcatgttgttagctcttataccattatcaattgccgcgattcttcaagaggaaagtgatatgtttggagttgaagggaacaaaattcttccacaaagacaagggcttatatcatctctccaggatctgatccagtattcaggacttcttgtaccaccttcatcagtggtgaatgcagctaatgctgcagcctcaaaagcagcaatatttaaggccaactataaggctggggctggcaacactagcatgatggaccagactgactcttcaatgaaagctgctgggaacatgctccatctcattatcgaagcctgtatctcgagaaagttgattgatacatctgcttacttatggcatggttatgttgtaccatctaggactttaaaagatacagctttgccccaagaatccccctggctgaactttatgaaagggtctcaactttcagaaccccttattgatgctctggtcgcaactcctgcttcaagtgttgcggaattggacaagttatacagtgtagcaacaaatggttcagaagaagaaaaaacagctgctgcaaagattctttgtggcgcatcacttgttcgtggctggaacattcaggaacatgtggtcagtatggtggtcaagctattatcagcttctttaccctcagattcctcaacttcaactcctgggagcatgagccactaccttgctcatatgtctacgttgaacgaaatcttactcggtgtgtcttatggtgatgtcatccacattctttcgttgtatggaatggttccagatgttgccgtggctttaatgccactatgtgaggcttttgggtcaatagcaccgccacctaatcacaagtctaccattcttggtgaaacatctgtttatttggtcttctcctgtgcatttctttgtcttcttcgcttgtggaagttttatagaccccctcaagagtattgtcttactggtcgtggaggctcagtaaagctggaactgactctggactatctgttgttgatgcacaataatcgcattttctcaaattcgtctgcccctaatagggattcttacaacagtatgggctcagtcaatgaggtctctgctcagccgatttatattgattctttccccaagctaagtgcttggtatttccagaatcaagcttgcatcgcctctacactttctggtctttgcaacaaaaaccctgtccatcaagttgcgaacaaaattttgaatatgatttgccgaaaaatgaataaaggtggagtatcatctagtaatctttcatctacttctagtagtagcgttagtggttcttctgtaagtgcatcggatgattcttaccaaaggcctgctgttcctgcttgggaatttttagaagctgttccttttgtacttgaagctgttctgacagcatgtgctcatgggcggctttccagccgagacttgactacaagcttaagggatcttgtggactttttgcctgcttctcttgctgcaattgtaagctacttctcagcagaaattacacggggaatctggaaacctgttccaatgaatggaactgaatggcccagtcctggtgcttctcttcattccattgaagctgaagtaaaggaaattcttgcatctgctggtgttcagattaacagctgctatccacgtggtgtgccgccaatgcttcctttgcctatggctgcacttgtcagcttgacaattacatttaagctagataggagtttggagtacattcaaggggtcattggacatgcactagagaactgcgcagggggaagttcctggccaagcatgcccattatcggggcattgtggacacagaaagtgcgaagatggcatgacttcattgtcctctcttgtatgcgttctccatttggcagagacaaagatgcagttgcgcagctcatccgaagctgcttttcgtcctttctgcagtcatcatccagtggttctgacataatcgcaaaccgtggagttggggctttattaggggactcaatcacggatcaaggtcttaggctcccaatggcacctggtttcgtctacctgagaacatgtcgaactttccatgacacatacttcgttagtgaagtgatcctcaagcaagtgattgaatgggctcacaaacttgcaaatggatggtctttcaatgggcctccgcagttgaaatcaggccggacaccactatcttgtgcagcatctatggcgcatcaggtcgcgatgcttggtggtggtctcctatgcatagcaggtggaccacttgtggtccaggtgttgtatgaagacacactaccgacactgctgctgtcagccagagaacagagtttgaaagaccctgggccagtttctagcacactccaaggttacgccatggccaacatgctcttttactgtggtagcctactttggggagcggacaggagttctcctgtcatgaaattgtctttcctctcgaggcggccacgggtggtgagaaaccacatggatttcatagctggtgtactggacggacacattcttctgggctgtgacccgggtacctggaaagcgtatgtttctcagtttatgttcctggtggtgaagtttgttccatcatggttgccggacataaagctggacacgctaaagaagatagcagctggacttcggagttggcatgaacatgaccttgctctatcccttcttgagcgaggaggaccacaagcaatctctgttgtagtcgagacctttctgtgatcctgccatttggacattttgccccccacctgacatcgcagccgctgttagggtttgaagtcggtggtctgaggtctagctgaagtaatcaggatgacccttccagaattccacttgagcaaccaggataactgatgtttttctcatgtatggcgaacccattttgtttttgtgaattcaatacggaagaacattcaacctactagagtctagagtgtattgacatcagccctaacatgtaacctatgggaatttcattaactttattgcactgacttcagccctaacttgtaacatacgggaatactctatcgtgttttatatcggcgttttagttgggataaccgaactttactctcc

SEQ ID NO: 23007 - DNA, 4278 bp, Zea Mays
agctaaaatatggattgagataactgctcacaacggcagggtcaaccgggatccccttttcatttcacacgaacccaatgcgcgtcgcaggccagaccgccagagagagagggaaggtgaccgggatagagaaagaaaagtagaaacccaaacccccggcgaggacgccaccgtggcgacggcggatgcggcggggctggtccccgcggacctggagagtcgggtgatggaggcggtgaaggcgtcggaggcgcgccgcgacccgccgctgctgcgggcggtggagctgtcccgcgtcgtcgccgaagagggcgcgggcgccgagctggccgggatcctcgtctccaacctctgtttcgcgcacaactcgccctcgctctggaagctcctgggccaagccgtcgcgtcccgcctcctctgcccgctccacgtcctcgcgctcctcacccctagggtgttgccgcagcggcgagcgcagcctgaggcgtatcggctgtatctggagctcctcaagtgtcacgccacgtcgtcgttgctggcgatggaggctgggcctaaccgtgacaacatactcgaggattgtggctttccatctgtgatggcagaggggcaagagagtgtatatgccattgaggggccacagcctatggacttagacattaaaaggggatctactgagaaccaaaatgagcatcgcgaacagttacgccggaagaacactttcatggctttggacgtgttgcatatgatggctgctgatagaaagattcaatcatttctgagcttgatattcctgaacatgcctgaaaagttcagttctctacgccagaggttgagttctattgaagcacacaaggtgaccttggagactctactgccttctggacacaaaattaatgacttgttaataaacatctggagagtttgcaaagcaggctatcaaccaaataacaaacacattctgggtgttcttggtaatatgggatccggtggctcccttctgggccagcttactggagctgggaggcctgcctgctggataatatttgatatatatgtggagaatgcaattgatgggaagcatctaagtgttacatcagctatcgggattataaaagaaatgaccaagacaatgcaagtgcttaatgaagcaagctggcaggaaacatttaaagctctttggatttccacccttcgtcttgtacaacgggctagagaacctcttgaaggaccgattcctcatctagatgcaaggttatgcatgttgttagctcttataccattatcaattgccgcgattcttcaagaggaaagtgatatgtttggagttgaagggaacaaaattcttccacaaagacaagggcttatatcatctctccaggatctgatccagtattcaggacttcttgtaccaccttcatcagtggtgaatgcagctaatgctgcagcctcaaaagcagcaatatttaaggccaactataaggctggggctggcaacactagcatgatggaccagactgactcttcaatgaaagctgctgggaacatgctccatctcattatcgaagcctgtatctcgagaaagttgattgatacatctgcttacttatggcatggttatgttgtaccatctaggactttaaaagatacagctttgccccaagaatccccctggctgaactttatgaaagggtctcaactttcagaaccccttattgatgctctggtcgcaactcctgcttcaagtgttgcggaattggacaagttatacagtgtagcaacaaatggttcagaagaagaaaaaacagctgctgcaaagattctttgtggcgcatcacttgttcgtggctggaacattcaggaacatgtggtcagtatggtggtcaagctattatcagcttctttaccctcagattcctcaacttcaactcctgggagcatgagccactaccttgctcatatgtctacgttgaacgaaatcttactcggtgtgtcttatggtgatgtcatccacattctttcgttgtatggaatggttccagatgttgccgtggctttaatgccactatgtgaggcttttgggtcaatagcaccgccacctaatcacaagtctaccattcttggtgaaacatctgtttatttggtcttctcctgtgcatttctttgtcttcttcgcttgtggaagttttatagaccccctcaagagtattgtcttactggtcgtggaggctcagtaaagctggaactgactctggactatctgttgttgatgcacaataatcgcattttctcaaattcgtctgcccctaatagggattcttacaacagtatgggctcagtcaatgaggtctctgctcagccgatttatattgattctttccccaagctaagtgcttggtatttccagaatcaagcttgcatcgcctctacactttctggtctttgcaacaaaaaccctgtccatcaagttgcgaacaaaattttgaatatgatttgccgaaaaatgaataaaggcctgctgttcctgcttgggaatttttagaagctgttccttttgtacttgaagctgttctgacagcatgtgctcatgggcggctttccagccgagacttgactacaagcttaagggatcttgtggactttttgcctgcttctcttgctgcaattgtaagctacttctcagcagaaattacacggggaatctggaaacctgttccaatgaatggaactgaatggcccagtcctggtgcttctcttcattccattgaagctgaagtaaaggaaattcttgcatctgctggtgttcagattaacagctgctatccacgtggtgtgccgccaatgcttcctttgcctatggctgcacttgtcagcttgacaattacatttaagctagataggagtttggagtacattcaaggggtcattggacatgcactagagaactgcgcagggggaagttcctggccaagcatgcccattatcggggcattgtggacacagaaagtgcgaagatggcatgacttcattgtcctctcttgtatgcgttctccatttggcagagacaaagatgcagttgcgcagctcatccgaagctgcttttcgtcctttctgcagtcatcatccagtggttctgacataatcgcaaaccgtggagttggggctttattaggggactcaatcacggatcaaggtcttaggctcccaatggcacctggtttcgtctacctgagaacatgtcgaactttccatgacacatacttcgttagtgaagtgatcctcaagcaagtgattgaatgggctcacaaacttgcaaatggatggtctttcaatgggcctccgcagttgaaatcaggccggacaccactatcttgtgcagcatctatggcgcatcaggtcgcgatgcttggtggtggtctcctatgcatagcaggtggaccacttgtggtccaggtgttgtatgaagacacactaccgacactgctgctgtcagccagagaacagagtttgaaagaccctgggccagtttctagcacactccaaggttacgccatggccaacatgctcttttactgtggtagcctactttggggagcggacaggagttctcctgtcatgaaattgtctttcctctcgaggcggccacgggtggtgagaaaccacatggatttcatagctggtgtactggacggacacattcttctgggctgtgacccgggtacctggaaagcgtatgtttctcagtttatgttcctggtggtgaagtttgttccatcatggttgccggacataaagctggacacgctaaagaagatagcagctggacttcggagttggcatgaacatgaccttgctctatcccttcttgagcgaggaggaccacaagcaatctctgttgtagtcgagacctttctgtgatcctgccatttggacattttgccccccacctgacatcgcagccgctgttagggtttgaagtcggtggtctgaggtctagctgaagtaatcaggatgacccttccagaattccacttgagcaaccaggataactgatgtttttctcatgtatggcgaacccattttgtttttgtgaattcaatacggaagaacattcaacctactagagtctagagtgtattgacatcagccctaacatgtaacctatgggaatttcattaactttattgcactgacttcagccctaacttgtaacatacgggaatactctatcgtgttttatatcggcgttttagttgggataaccgaactttactctcc

SEQ ID NO: 23008 - DNA, 4387 bp, Zea Mays
agctaaaatatggattgagataactgctcacaacggcagggtcaaccgggatccccttttcatttcacacgaacccaatgcgcgtcgcaggccagaccgccagagagagagggaaggtgaccgggatagagaaagaaaagtagaaacccaaacccccggcgaggacgccaccgtggcgacggcggatgcggcggggctggtccccgcggacctggagagtcgggtgatggaggcggtgaaggcgtcggaggcgcgccgcgacccgccgctgctgcgggcggtggagctgtcccgcgtcgtcgccgaagagggcgcgggcgccgagctggccgggatcctcgtctccaacctctgtttcgcgcacaactcgccctcgctctggaagctcctgggccaagccgtcgcgtcccgcctcctctgcccgctccacgtcctcgcgctcctcacccctagggtgttgccgcagcggcgagcgcagcctgaggcgtatcggctgtatctggagctcctcaagtgtcacgccacgtcgtcgttgctggcgatggaggctgggcctaaccgtgacaagatagggaagtccattgctgaagctttgcaactatccaaggtttatggattttctggaacagagtttggacatgttgtcattctgtttgtgttggctgttgtcaataaactgattgatagcatactcgaggattgtggctttccatctgtgatggcagaggggcaagagagtgtatatgccattgaggggccacagcctatggacttagacattaaaaggggatctactgagaaccaaaatgagcatcgcgaacagcctgaaaagttcagttctctacgccagaggttgagttctattgaagcacacaaggtgaccttggagactctactgccttctggacacaaaattaatgacttgttaataaacatctggagagtttgcaaagcaggctatcaaccaaataacaaacacattctgggtgttcttggtaatatgggatccggtggctcccttctgggccagcttactggagctgggaggcctgcctgctggataatatttgatatatatgtggagaatgcaattgatgggaagcatctaagtgttacatcagctatcgggattataaaagaaatgaccaagacaatgcaagtgcttaatgaagcaagctggcaggaaacatttaaagctctttggatttccacccttcgtcttgtacaacgggctagagaacctcttgaaggaccgattcctcatctagatgcaaggttatgcatgttgttagctcttataccattatcaattgccgcgattcttcaagaggaaagtgatatgtttggagttgaagggaacaaaattcttccacaaagacaagggcttatatcatctctccaggatctgatccagtattcaggacttcttgtaccaccttcatcagtggtgaatgcagctaatgctgcagcctcaaaagcagcaatatttaaggccaactataaggctggggctggcaacactagcatgatggaccagactgactcttcaatgaaagctgctgggaacatgctccatctcattatcgaagcctgtatctcgagaaagttgattgatacatctgcttacttatggcatggttatgttgtaccatctaggactttaaaagatacagctttgccccaagaatccccctggctgaactttatgaaagggtctcaactttcagaaccccttattgatgctctggtcgcaactcctgcttcaagtgttgcggaattggacaagttatacagtgtagcaacaaatggttcagaagaagaaaaaacagctgctgcaaagattctttgtggcgcatcacttgttcgtggctggaacattcaggaacatgtggtcagtatggtggtcaagctattatcagcttctttaccctcagattcctcaacttcaactcctgggagcatgagccactaccttgctcatatgtctacgttgaacgaaatcttactcggtgtgtcttatggtgatgtcatccacattctttcgttgtatggaatggttccagatgttgccgtggctttaatgccactatgtgaggcttttgggtcaatagcaccgccacctaatcacaagtctaccattcttggtgaaacatctgtttatttggtcttctcctgtgcatttctttgtcttcttcgcttgtggaagttttatagaccccctcaagagtattgtcttactggtcgtggaggctcagtaaagctggaactgactctggactatctgttgttgatgcacaataatcgcattttctcaaattcgtctgcccctaatagggattcttacaacagtatgggctcagtcaatgaggtctctgctcagccgatttatattgattctttccccaagctaagtgcttggtatttccagaatcaagcttgcatcgcctctacactttctggtctttgcaacaaaaaccctgtccatcaagttgcgaacaaaattttgaatatgatttgccgaaaaatgaataaaggtggagtatcatctagtaatctttcatctacttctagtagtagcgttagtggttcttctgtaagtgcatcggatgattcttaccaaaggcctgctgttcctgcttgggaatttttagaagctgttccttttgtacttgaagctgttctgacagcatgtgctcatgggcggctttccagccgagacttgactacaagcttaagggatcttgtggactttttgcctgcttctcttgctgcaattgtaagctacttctcagcagaaattacacggggaatctggaaacctgttccaatgaatggaactgaatggcccagtcctggtgcttctcttcattccattgaagctgaagtaaaggaaattcttgcatctgctggtgttcagattaacagctgctatccacgtggtgtgccgccaatgcttcctttgcctatggctgcacttgtcagcttgacaattacatttaagctagataggagtttggagtacattcaaggggtcattggacatgcactagagaactgcgcagggggaagttcctggccaagcatgcccattatcggggcattgtggacacagaaagtgcgaagatggcatgacttcattgtcctctcttgtatgcgttctccatttggcagagacaaagatgcagttgcgcagctcatccgaagctgcttttcgtcctttctgcagtcatcatccagtggttctgacataatcgcaaaccgtggagttggggctttattaggggactcaatcacggatcaaggtcttaggctcccaatggcacctggtttcgtctacctgagaacatgtcgaactttccatgacacatacttcgttagtgaagtgatcctcaagcaagtgattgaatgggctcacaaacttgcaaatggatggtctttcaatgggcctccgcagttgaaatcaggccggacaccactatcttgtgcagcatctatggcgcatcaggtcgcgatgcttggtggtggtctcctatgcatagcaggtggaccacttgtggtccaggtgttgtatgaagacacactaccgacactgctgctgtcagccagagaacagagtttgaaagaccctgggccagtttctagcacactccaaggttacgccatggccaacatgctcttttactgtggtagcctactttggggagcggacaggagttctcctgtcatgaaattgtctttcctctcgaggcggccacgggtggtgagaaaccacatggatttcatagctggtgtactggacggacacattcttctgggctgtgacccgggtacctggaaagcgtatgtttctcagtttatgttcctggtggtgaagtttgttccatcatggttgccggacataaagctggacacgctaaagaagatagcagctggacttcggagttggcatgaacatgaccttgctctatcccttcttgagcgaggaggaccacaagcaatctctgttgtagtcgagacctttctgtgatcctgccatttggacattttgccccccacctgacatcgcagccgctgttagggtttgaagtcggtggtctgaggtctagctgaagtaatcaggatgacccttccagaattccacttgagcaaccaggataactgatgtttttctcatgtatggcgaacccattttgtttttgtgaattcaatacggaagaacattcaacctactagagtctagagtgtattgacatcagccctaacatgtaacctatgggaatttcattaactttattgcactgacttcagccctaacttgtaacatacgggaatactctatcgtgttttatatcggcgttttagttgggataaccgaactttactctcc

SEQ ID NO: 23009 - DNA, 1455 bp, Zea Mays
ccctgtcgccagacggcccactggctgtggctggctcacttcactcggcgctcggcggccgcacccaagtcccaaccgcactgcgccgcctcgatcaaagcaaacccccaggcccccaacccgcccagcgccctgcccccccgccgcagtgagtgagatgatcatcggaggggcagcgggcgccgggaacccgaggaggaggaggacgcaatgaaggcgcagccgctgctaccggcggcgctcaagaggcggaggggcccgcgcgtggcggtgcttgcgctcgtcctctgctccctgctcgtgcccttggccttcctcttcgaccgcgccccctccgggtacgtgacgacggaggagcggcaccgacaggaggtcgttctgccttcgttggatcacgtggagaagaggcgtcgcagtggcgctgacagtggagagcgacaggatgcgccggagaagatccccagaagtagtgcaggaacgattcatcaacgaacaccagagaagaacatctccaaaggcagtgctgcagtcattcatcaacaaacaccggagaagaacatctccaaaggcagtgctggagtcattcatcaacaaacaccagagaagaacatctccaaaggcagtgcaggagtcgttcgtcagcataagcaaattggtagcaacacgacaagggatgatgctaaaccaaaagtttttgcagcaccaaaagttgaaccatcagcggatgtgacggattctactaaagtcgcaagattcgaattcaaggatgagctgtccctgcgagcagcagcatttcctctgagcttgctatccttccaacatctaatatatcccctagatgaaaaattgaccctggctggacttggatacgattatggaatcgatgaagaggttgcgcggagatctgcatcattgcactacaatggcaacatgaaaccttggcttgaattaggtataccggactacaagaagtactggaagaggtttcttgaccgaggagatcgatttatggacgagtgcaacgtaaatccgtgatgcagatggacccaagatgagaacaattgagtaaatctgggacgcagagctggacctgaaatcagaacaacatcagcaagccttaccgaagcttgtgtcgacgagaacgaatactagtggtgaagccaggattttttgagttggatattcccaacctgaaagtagtgtacacaagagtatatacggtagcataaatttgagtaaatgctggggactacgatccatcgacctccctctacggtaacaaaaaaattcaaatcagtcgacttcatcttacaaaatcttcatgaaatacagataattgtacatgctacgaaacgagataacaatgtcaattgcgctataaaatttggatttgggatatagagaagtgaattattgcacaacatgcccttgcaccctgctattaaataggatcaa

SEQ ID NO: 23010 - DNA, 2054 bp, Zea Mays
ctggctcacttcactcggcgctcggcggccgcacccaagtcccaaccgcactgcgccgcctcgatcaaagcaaacccccaggcccccaacccgcccagcgccctgcccccccgccgcagtgagtgagatgatcatcggaggggcagcgggcgccgggaacccgaggaggaggaggacgcaatgaaggcgcagccgctgctaccggcggcgctcaagaggcggaggggcccgcgcgtggcggtgcttgcgctcgtcctctgctccctgctcgtgcccttggccttcctcttcgaccgcgccccctccgggtacgtgacgacggaggagcggcaccgacaggatgcgccggagaagatccccagaagtagtgcaggaacgattcatcaacgaacaccagagaagaacatctccaaaggcagtgctgcagtcattcatcaacaaacaccggagaagaacatctccaaaggcagtgctggagtcattcatcaacaaacaccagagaagaacatctccaaaggcagtgcaggagtcgttcgtcagcataagcaaattggtagcaacacgacaagggatgatgctaaaccaaaagtttttgcagcaccaaaagttgaaccatcagcggatgtgacggattctactaaagtcgcaagagtaatgatctgtagctttcaaagttgtactttgttgtttcagaactgctacttcatgtcatttcacaagtttcttattttaagacatcttccgttgaggttgtgttgaaaaatcttgcggcttctgtagtgatcaactcaactgtgagcagttgtaaggagccaggataccttgcttttcatatcctaactgatgctcagaacttttatgccatgaaacattggtttaccaggatttcgtataaaaatgcagctatccatgtcataaactatgaagcaattgttttggaaaaacttccaaagtatactatccggcagctgtttttgccagaggagttccgtgttctgattaggagcactaagcagcctactgaaaacactagaatgaaatatctgtcactgttcagccactcacattttgttattccagaaatcttcaagtatctaaacaaggtggttgtgttggatgacgatgtagttgttcaacgtgatctgtctttcttgtggcatattgatatgggagacaaggtaaatggcgctgccgagttttgcgatctgaaacttggtgaaatgaaaaatgtcttgggtaaaacagcatatgatcccgagtcgtgtgtatggatgtcgggggtgaatttgattaatttggataaatggagggagcataatgtcacagagaactatctgttgctcatgcaaaagttcgaattcaaggatgagctgtccctgcgagcagcagcatttcctctgagcttgctatccttccaacatctaatatatcccctagatgaaaaattgaccctggctggacttggatacgattatggaatcgatgaagaggttgcgcggagatctgcatcattgcactacaatggcaacatgaaaccttggcttgaattaggtataccggactacaagaagtactggaagaggtttcttgaccgaggagatcgatttatggacgagtgcaacgtaaatccgtgatgcagatggacccaagatgagaacaattgagtaaatctgggacgcagagctggacctgaaatcagaacaacatcagcaagccttaccgaagcttgtgtcgacgagaacgaatactagtggtgaagccaggattttttgagttggatattcccaacctgaaagtagtgtacacaagagtatatacggtagcataaatttgagtaaatgctggggactacgatccatcgacctccctctacggtaacaaaaaaattcaaatcagtcgacttcatcttacaaaatcttcatgaaatacagataattgtacatgctacgaaacgagataacaatgtcaattgcgctataaaatttggatttgggatatagagaagtgaattattgcacaacatgcccttgcaccctgctattaaataggatcaa

SEQ ID NO: 23011 - DNA, 1984 bp, Zea Mays
cacccaagtcccaaccgcactgcgccgcctcgatcaaagcaaacccccaggcccccaacccgcccagcgccctgcccccccgccgcagtgagtgagatgatcatcggaggggcagcgggcgccgggaacccgaggaggaggaggacgcaatgaaggcgcagccgctgctaccggcggcgctcaagaggcggaggggcccgcgcgtggcggtgcttgcgctcgtcctctgctccctgctcgtgcccttggccttcctcttcgaccgcgccccctccgggtacgtgacgacggaggagcggcaccgacaggaggtcgttctgccttcgttggatcacgtggagaagaggcgtcgcagtggcgctgacagtggagagcgacaggatgcgccggagaagatccccagaagtagtgcaggaacgattcatcaacgaacaccagagaagaacatctccaaaggcagtgctgcagtcattcatcaacaaacaccggagaagaacatctccaaaggcagtgctggagtcattcatcaacaaacaccagagaagaacatctccaaaggcagtgcaggagtcgttcgtcagcataagcaaattggtagcaacacgacaagggatgatgctaaaccaaaagaactgctacttcatgtcatttcacaagtttcttattttaagacatcttccgttgaggttgtgttgaaaaatcttgcggcttctgtagtgatcaactcaactgtgagcagttgtaaggataccttgcttttcatatcctaactgatgctcagaacttttatgccatgaaacattggtttaccaggatttcgtataaaaatgcagctatccatgtcataaactatgaagcaattgttttggaaaaacttccaaagtatactatccggcagctgtttttgccagaggagttccgtgttctgattaggagcactaagcagcctactgaaaacactagaatgaaatatctgtcactgttcagccactcacattttgttattccagaaatcttcaagtatctaaacaaggtggttgtgttggatgacgatgtagttgttcaacgtgatctgtctttcttgtggcatattgatatgggagacaaggtaaatggcgctgccgagttttgcgatctgaaacttggtgaaatgaaaaatgtcttgggtaaaacagcatatgatcccgagtcgtgtgtatggatgtcgggggtgaatttgattaatttggataaatggagggagcataatgtcacagagaactatctgttgctcatgcaaaagttcgaattcaaggatgagctgtccctgcgagcagcagcatttcctctgagcttgctatccttccaacatctaatatatcccctagatgaaaaattgaccctggctggacttggatacgattatggaatcgatgaagaggttgcgcggagatctgcatcattgcactacaatggcaacatgaaaccttggcttgaattaggtataccggactacaagaagtactggaagaggtttcttgaccgaggagatcgatttatggacgagtgcaacgtaaatccgtgatgcagatggacccaagatgagaacaattgagtaaatctgggacgcagagctggacctgaaatcagaacaacatcagcaagccttaccgaagcttgtgtcgacgagaacgaatactagtggtgaagccaggattttttgagttggatattcccaacctgaaagtagtgtacacaagagtatatacggtagcataaatttgagtaaatgctggggactacgatccatcgacctccctctacggtaacaaaaaaattcaaatcagtcgacttcatcttacaaaatcttcatgaaatacagataattgtacatgctacgaaacgagataacaatgtcaattgcgctataaaatttggatttgggatatagagaagtgaattattgcacaacatgcccttgcaccctgctattaaataggatcaa

SEQ ID NO: 23012 - DNA, 2039 bp, Zea Mays
ccgcctcgatcaaagcaaacccccaggcccccaacccgcccagcgccctgcccccccgccgcagtgagtgagatgatcatcggaggggcagcgggcgccgggaacccgaggaggaggaggacgcaatgaaggcgcagccgctgctaccggcggcgctcaagaggcggaggggcccgcgcgtggcggtgcttgcgctcgtcctctgctccctgctcgtgcccttggccttcctcttcgaccgcgccccctccggaggtcgttctgccttcgttggatcacgtggagaagaggcgtcgcagtggcgctgacagtggagagcgacaggatgcgccggagaagatccccagaagtagtgcaggaacgattcatcaacgaacaccagagaagaacatctccaaaggcagtgctgcagtcattcatcaacaaacaccggagaagaacatctccaaaggcagtgctggagtcattcatcaacaaacaccagagaagaacatctccaaaggcagtgcaggagtcgttcgtcagcataagcaaattggtagcaacacgacaagggatgatgctaaaccaaaagtttttgcagcaccaaaagttgaaccatcagcggatgtgacggattctactaaagtcgcaagagtaatgatctgtagctttcaaagttgtactttgttgtttcagaactgctacttcatgtcatttcacaagtttcttattttaagacatcttccgttgaggttgtgttgaaaaatcttgcggcttctgtagtgatcaactcaactgtgagcagttgtaaggagccaggataccttgcttttcatatcctaactgatgctcagaacttttatgccatgaaacattggtttaccaggatttcgtataaaaatgcagctatccatgtcataaactatgaagcaattgttttggaaaaacttccaaagtatactatccggcagctgtttttgccagaggagttccgtgttctgattaggagcactaagcagcctactgaaaacactagaatgaaatatctgtcactgttcagccactcacattttgttattccagaaatcttcaagtatctaaacaaggtggttgtgttggatgacgatgtagttgttcaacgtgatctgtctttcttgtggcatattgatatgggagacaaggtaaatggcgctgccgagttttgcgatctgaaacttggtgaaatgaaaaatgtcttgggtaaaacagcatatgatcccgagtcgtgtgtatggatgtcgggggtgaatttgattaatttggataaatggagggagcataatgtcacagagaactatctgttgctcatgcaaaagttcgaattcaaggatgagctgtccctgcgagcagcagcatttcctctgagcttgctatccttccaacatctaatatatcccctagatgaaaaattgaccctggctggacttggatacgattatggaatcgatgaagaggttgcgcggagatctgcatcattgcactacaatggcaacatgaaaccttggcttgaattaggtataccggactacaagaagtactggaagaggtttcttgaccgaggagatcgatttatggacgagtgcaacgtaaatccgtgatgcagatggacccaagatgagaacaattgagtaaatctgggacgcagagctggacctgaaatcagaacaacatcagcaagccttaccgaagcttgtgtcgacgagaacgaatactagtggtgaagccaggattttttgagttggatattcccaacctgaaagtagtgtacacaagagtatatacggtagcataaatttgagtaaatgctggggactacgatccatcgacctccctctacggtaacaaaaaaattcaaatcagtcgacttcatcttacaaaatcttcatgaaatacagataattgtacatgctacgaaacgagataacaatgtcaattgcgctataaaatttggatttgggatatagagaagtgaattattgcacaacatgcccttgcaccctgctattaaataggatcaa

SEQ ID NO: 23013 - DNA, 1713 bp, Zea Mays
cctctctcctgcccgcagcagtccttgatggaggtcgttctgccttcgttggatcacgtggagaagaggcgtcgcagtggcgctgacagtggagagcgacaggatgcgccggagaagatccccagaagtagtgcaggaacgattcatcaacgaacaccagagaagaacatctccaaaggcagtgctgcagtcattcatcaacaaacaccggagaagaacatctccaaaggcagtgctggagtcattcatcaacaaacaccagagaagaacatctccaaaggcagtgcaggagtcgttcgtcagcataagcaaattggtagcaacacgacaagggatgatgctaaaccaaaagaactgctacttcatgtcatttcacaagtttcttattttaagacatcttccgttgaggttgtgttgaaaaatcttgcggcttctgtagtgatcaactcaactgtgagcagttgtaaggagccaggataccttgcttttcatatcctaactgatgctcagaacttttatgccatgaaacattggtttaccaggatttcgtataaaaatgcagctatccatgtcataaactatgaagcaattgttttggaaaaacttccaaagtatactatccggcagctgtttttgccagaggagttccgtgttctgattaggagcactaagcagcctactgaaaacactagaatgaaatatctgtcactgttcagccactcacattttgttattccagaaatcttcaagtatctaaacaaggtggttgtgttggatgacgatgtagttgttcaacgtgatctgtctttcttgtggcatattgatatgggagacaaggtaaatggcgctgccgagttttgcgatctgaaacttggtgaaatgaaaaatgtcttgggtaaaacagcatatgatcccgagtcgtgtgtatggatgtcgggggtgaatttgattaatttggataaatggagggagcataatgtcacagagaactatctgttgctcatgcaaaagttcgaattcaaggatgagctgtccctgcgagcagcagcatttcctctgagcttgctatccttccaacatctaatatatcccctagatgaaaaattgaccctggctggacttggatacgattatggaatcgatgaagaggttgcgcggagatctgcatcattgcactacaatggcaacatgaaaccttggcttgaattaggtataccggactacaagaagtactggaagaggtttcttgaccgaggagatcgatttatggacgagtgcaacgtaaatccgtgatgcagatggacccaagatgagaacaattgagtaaatctgggacgcagagctggacctgaaatcagaacaacatcagcaagccttaccgaagcttgtgtcgacgagaacgaatactagtggtgaagccaggattttttgagttggatattcccaacctgaaagtagtgtacacaagagtatatacggtagcataaatttgagtaaatgctggggactacgatccatcgacctccctctacggtaacaaaaaaattcaaatcagtcgacttcatcttacaaaatcttcatgaaatacagataattgtacatgctacgaaacgagataacaatgtcaattgcgctataaaatttggatttgggatatagagaagtgaattattgcacaacatgcccttgcaccctgctattaaataggatcaa

SEQ ID NO: 23014 - DNA, 1260 bp, Zea Mays
cacaactcaatgtggccaaggctttcgattgacaagattagttaccatcaattatctgttgggaaacttgggaaagacttatgcagacacagttggagtagtggatcttggtggtggatctgtccaaatggcatatgctattgcagagaaggatgcagaaaaggctcctaaaccatccgagggggaagatgcatatgtgaagaaattgttcctcaaaggaaccacatattatctttatgttcatagttatttgcattatgggttgctggcagctagagcggaggtcttaaaagctggcaatggcaatggttacagcaactgtatgttagagggatttcaagggaaatacaagtatggcgacgattcatttgaagcatccggtccaccttccggtgctagttactcaaaatgcaaggatgatgcagtgaaagcccttaaagttgatgaagcatgcacccacatgaagtgttcttttggtggcatttggaatggtggtggtggtgctggacagaagaatctctttgtagcgtcctttttctttgatagggctgctgaggctggatttgttaacgccaatgcgcctgtcgctaaggttaaaccatcggacttcagacaagctgcggagcgcgcttgctcgttgagcgtgaagaacgccgaggccaccttccctggtgtacagaaggatagcattccatatatctgcatggacctcgtttatcagtacacattactcgtggaaggattcggtatgacctgatcgaacgaaaattaatcaaagtaggttttttaagtgccttgtcacttacgtatttcacaagcattcttgcaggcgtcgatccggaccacgagatgaccttggtaaagaaggtcccttacagcgacgcctacgtcgaagccgcatggccgcttggcagtgccatcgaggttgcatcttcgtagtaggaaggaaacacagtttagcaaggtaacatcggacggcattcttgtcatgaagttttgcgttgagagtccccactcctccacttcctcctcttgatcgcttgaattcgcacactcaatccattcatcttactatacggtacgggtagcgtctctcggctctacttggttccagcgggcattgttgtaagctctgttattaatatttgtatactactaatgcaagtaagattggagcctcaattcttctttttgacctccaatatatataatactggaatgcacctgatacaagtgccatcattttttgctcaatgaaaa

SEQ ID NO: 23015 - DNA, 1466 bp, Zea Mays
ctgcgcggcatgaccagacggcacacggcagcacgcatcgttcccaccaaaccagattgtcactgggcagcggcgacaagaccaagagcgtgacgcggcacggtcgtcggaggcccagcgctcccctcctcctcggtcgtaacgcaggcggccgcccaccgcgccgccgaaacaaaaaacctagcagcaaccagcaaccccacgcgaccacggacggaccggccatggcatctgcacgggctgctgctgcctgctgatagagtggacaatgcatgagctgctgcagatagaacgctgccggccgggtctgctgctgatagatgcatgtatagatagagacactgctgcagctgcagctgcagtgcagatatatagaacgctagctgccggccggtgcagaccacgggaggcgcgggcgcgcgctataaaagccgagccagtgggcgcggccagtgtcacaactcacaattcacatcgaggtctcagcttcaggaaagggaaggaagcatgttcgggcaccaccaccaccacggccacggcgggcaccaccaggccccgccgccgcacgagcagacgctgttcaggatcttctgccgcgccgacgaggcgtactgcctcaccgtgcgccacgacgccgtcgtcctcgcgcccaccaacccccgcgacgagtaccagcactggtacaaggacatgaggcacagcacgaaggtgaaggacgcggagggccagccggcgttcgcgctcatcaacagggccaccggcctcgccatcaagcactcgctcggccagtcccatcccgtgaagctggtgccctacaacgcggagtacctggacgagtcggtgctgtggacggagagccacgacgtgggcaagggcttccgctgcatccgcatggtcaacaacatctacctcaacatggacgccttccacggcgacaaggaccacggcggcgtccacgacggcaccaccgtcgtcctctgggagtgggccaagggcgacaaccagcgctggaagatcctgccctggtgaacagagacgagctagatgaatccaaggaaccttacctagctgctgccgccgccgcctaattcgtcctcctccgctctagctgttatctgtctgtgtcttcgcgtcctcggttcctgaatggacgaataatatatagcatgcatgtacggctagcgaccatgtctgaatgacatcttcgttgctgctgctgctgctactgctacctgtccgtttggtgttctaaaagactctgatgagtggttctgaatgtctgcatttcaagtttgctgtgtgatgttaatgtaccgtgcgtaccagagctgctgctcctcctaaaatctttatctacctttgttttgatttttgcctgcttatggttatggcaacactgccacaacaatggccttttttatttcaaactttctataaaataaatatataaaaaaataactttgtgc

SEQ ID NO: 23016 - DNA, 1472 bp, Zea Mays
agtgcagtggcgacttctgggccccactccactatacaatcgcgactacgctcacctacccattccactccgccccaccactggtcaacgaatctttcctgcactgtcctgtccgccgccgctcaacctcatcggaactccactcctcctcacccccacagcaactcccacctcatggagaaagctgcgcacgttgccgccggcgcgacgcaagagcaggaatcgtctccgaacagtaacaagaatcatgttcaaccacaggcttgacgacgcagcgaggcatcatggctctgctgaagcgattcctgaaagacttgcggtggtcacaggaggaaacaaaggagttggcctagaagtatgccgccagcttgctctcaagggtgtgacagttatccttacagcaagggatgagaaacgaggaaaagatgctgccgagacccttcgccgtgaatgccaactcccaaatatcatattccatcagctcgatgtcagagatgatgatagtgccaccacattggcccggtatgtagaaagaagatatgggaagctcgacatcttggtgaacaatgcagctatttcaggaattgtagcagatgaggaaggcctgaaagctcttaacattgatgcagagacatggacatctggcagggcagctaatcttctgaaagaagtattccagaataccaatgatgaggcattcaactgtctgaataccaattactatggatgcaaacgggtaacagaagctcttcttccacttctgaagctatctacatcaggaggagcaaggattgtcaatgcctcctcacttgcgtcggagctgaaggtgtggagctcctgcattcctgcacgaacagagaagatatctatgttactcaccctgattatattgttgccagagaatgccaaatgagaagctgcgaaacgatttgagcaacattgacatctgggacgaggaccggatagaagcagtgctcgacacattcttggaggacctgaggagcgggcggctggaagaggctgggtggcccgtgatgctaccagcctacagcgtatcgaaaatggtcatcaatctgtacaccaggatcatggcaaggaggtatccggagatgcgcatcaactgtgtgcgacctggctttgtcaagacggacatcaactggaatctgggggtcctgacgcctgaacaaggtgcgagagggccagtcatgctagctctcctccccgatgatggaccaactgggtgctattttgatcagacagaaatggtgaacgtctggtgattgaatatttgtcgtctgctagtttattttagaactaaaccgctagaaataaaaaagagcggatggagtgttataactttcctgaattcatgatgacataaacacatacacatggtaaaacgttcttatgatcagttggtgtagtttccatatgtcactttgaatgatttgttgttctttgttggtgttgag

SEQ ID NO: 23017 - DNA, 1271 bp, Zea Mays
actccgccccaccactggtcaacgaatctttcctgcactgtcctgtccgccgccgctcaacctcatcggaactccactcctcctcacccccacagcaactcccacctcatggagaaagctgcgcacgttgccgccggcgcgacgcaagagcaggaatcgtctccgaacaggcttgacgacgcagcgaggcatcatggctctgctgaagcgattcctgaaagacttgcggtggtcacaggaggaaacaaaggagttggcctagaagtatgccgccagcttgctctcaagggtgtgacagttatccttacagcaagggatgagaaacgaggaaaagatgctgccgagacccttcgccgtgaatgccaactcccaaatatcatattccatcagctcgatgtcagagatgatgatagtgccaccacattggcccggtgaacaatgcagctatttcaggaattgtagcagatgaggaaggcctgaaagctcttaacattgatgcagagacatggacatctggcagggcagctaatcttctgaaagaagtattccagaataccaatgatgaggcattcaactgtctgaataccaattactatggatgcaaacgggtaacagaagctcttcttccacttctgaagctatctacatcaggaggagcaaggattgtcaatgcctcctcacttgcgtcggagctgaagagaatgccaaatgagaagctgcgaaacgatttgagcaacattgacatctgggacgaggaccggatagaagcagtgctcgacacattcttggaggacctgaggagcgggcggctggaagaggctgggtggcccgtgatgctaccagcctacagcgtatcgaaaatggtcatcaatctgtacaccaggatcatggcaaggaggtatccggagatgcgcatcaactgtgtgcgacctggctttgtcaagacggacatcaactggaatctgggggtcctgacgcctgaacaaggtgcgagagggccagtcatgctagctctcctccccgatgatggaccaactgggtgctattttgatcagacagaaatggtgaacgtctggtgattgaatatttgtcgtctgctagtttattttagaactaaaccgctagaaataaaaaagagcggatggagtgttataactttcctgaattcatgatgacataaacacatacacatggtaaaacgttcttatgatcagttggtgtagtttccatatgtcactttgaatgatttgttgttctttgttggtgttgag

SEQ ID NO: 23018 - DNA, 2197 bp, Zea Mays
actccgccccaccactggtcaacgaatctttcctgcactgtcctgtccgccgccgctcaacctcatcggaactccactcctcctcacccccacagcaactcccacctcatggagaaagctgcgcacgttgccgccggcgcgacgcaagagcaggaatcgtctccgaacaggagtggttgaagaatcgacgagcagaacaagcctgttccagccccgtgttcgacgcctcactctttttagtcttactattgtgcattgctagtagtatacgtagctacgtgcgaaagaaagaaagaaagaaaggtctttctatgatctgaaacaatggtcaaccaaaagcagctttatagcaatctgcggtgccgattcagctgtatatctcttaatgaaaacgatgcattttgagtcgcatctttttttctttctttcgaaaagcaaccggcaagaattagctggtcatttattaataaagaagaagcgaatacacagactgagactaagaaccaaccccaagagcaaaatttgagtcacatccttgtttcctgaaacaaaaccttttttagatgatggagaaaccagagagaaggatacatgtaacattgtggcaattttggggctagtagcagatctaggatttattttagggtatgctgttcaaaatttttcatacagaatttggtagatttattttagcaattctgtaacaactgtagaaattgcaccaagattcgttatagatgcactaagggactgtttggttcgtaactaactgtgacactttgactaggttaggcaaagtatggcaagctaggcagcgaactaaatagaccctaagtaaaacggtaaggcctaagttcaaggattaagttaaaatcatccactaaatacaaatatgaaaagttgaatttagagacttacattgttgtttttactgttttatttgatgcttttgaagggacatgattgtcttgcttattctccattctccagcctctagtttttttattttttgccgcttcattgatctgatgcagtaacaagaatcatgttcaaccacaggcttgacgacgcagcgaggcatcatggctctgctgaagcgattcctgaaagacttgcggtggtcacaggaggaaacaaaggagttggcctagaagtatgccgccagcttgctctcaagggtgtgacagttatccttacagcaagggatgagaaacgaggaaaagatgctgccgagacccttcgccgtgaatgccaactcccaaatatcatattccatcagctcgatgtcagagatgatgatagtgccaccacattggcccggtatgtagaaagaagatatgggaagctcgacatcttggtgaacaatgcagctatttcaggaattgtagcagatgaggaaggcctgaaagctcttaacattgatgcagagacatggacatctggcagggcagctaatcttctgaaagaagtattccagaataccaatgatgaggcattcaactgtctgaataccaattactatggatgcaaacgggtaacagaagctcttcttccacttctgaagctatctacatcaggaggagcaaggattgtcaatgcctcctcacttgcgtcggagctgaagagaatgccaaatgagaagctgcgaaacgatttgagcaacattgacatctgggacgaggaccggatagaagcagtgctcgacacattcttggaggacctgaggagcgggcggctggaagaggctgggtggcccgtgatgctaccagcctacagcgtatcgaaaatggtcatcaatctgtacaccaggatcatggcaaggaggtatccggagatgcgcatcaactgtgtgcgacctggctttgtcaagacggacatcaactggaatctgggggtcctgacgcctgaacaaggtgcgagagggccagtcatgctagctctcctccccgatgatggaccaactgggtgctattttgatcagacagaaatggtgaacgtctggtgattgaatatttgtcgtctgctagtttattttagaactaaaccgctagaaataaaaaagagcggatggagtgttataactttcctgaattcatgatgacataaacacatacacatggtaaaacgttcttatgatcagttggtgtagtttccatatgtcactttgaatgatttgttgttctttgttggtgttgag

SEQ ID NO: 23019 - DNA, 1291 bp, Zea Mays
actccgccccaccactggtcaacgaatctttcctgcactgtcctgtccgccgccgctcaacctcatcggaactccactcctcctcacccccacagcaactcccacctcatggagaaagctgcgcacgttgccgccggcgcgacgcaagagcaggaatcgtctccgaacaggcttgacgacgcagcgaggcatcatggctctgctgaagcgattcctgaaaggaggaaacaaaggagttggcctagaagtatgccgccagcttgctctcaagggtgtgacagttatccttacagcaagggatgagaaacgaggaaaagatgctgccgagacccttcgccgtgaatgccaactcccaaatatcatattccatcagctcgatgtcagagatgatgatagtgccaccacattggcccggtatgtagaaagaagatatgggaagctcgacatcttggtgaacaatgcagctatttcaggaattgtagcagatgaggaaggcctgaaagctcttaacattgatgcagagacatggacatctggcagggcagctaatcttctgaaagaagtattccagaataccaatgatgaggcattcaactgtctgaataccaattactatggatgcaaacgggtaacagaagctcttcttccacttctgaagctatctacatcaggaggagcaaggattgtcaatgcctcctcacttgcgtcggagctgaagagaatgccaaatgagaagctgcgaaacgatttgagcaacattgacatctgggacgaggaccggatagaagcagtgctcgacacattcttggaggacctgaggagcgggcggctggaagaggctgggtggcccgtgatgctaccagcctacagcgtatcgaaaatggtcatcaatctgtacaccaggatcatggcaaggaggtatccggagatgcgcatcaactgtgtgcgacctggctttgtcaagacggacatcaactggaatctgggggtcctgacgcctgaacaaggtgcgagagggccagtcatgctagctctcctccccgatgatggaccaactgggtgctattttgatcagacagaaatggtgaacgtctggtgattgaatatttgtcgtctgctagtttattttagaactaaaccgctagaaataaaaaagagcggatggagtgttataactttcctgaattcatgatgacataaacacatacacatggtaaaacgttcttatgatcagttggtgtagtttccatatgtcactttgaatgatttgttgttctttgttggtgttgag

SEQ ID NO: 23020 - DNA, 1776 bp, Zea Mays
gaggagaacactggggaactagtggagtaacaaagtaacccattggtcgagatcacttcgccgccgccgctttcgagatctccgggtggagcaagcgagcaaaggcagcagccatgtcgctccgcgtgctgaaccctaacgccgaggtgctcaacaagtcggcagcgctgcacatgaacatcaacgccgccaagggcctccaggacgtgctcaagaccaacctcggccccaagggcaccatcaagatgcttgtgggtggagctggtgacctgaagctgacgaaggatgggaacaccctcttgaaggaaatgcaaattcagaacccaactgcaatcatgattgcgaggacggctgtggcacaggatgacacaagtggtgatggcacaacctccactgtgctatttatcggggagctaatgaagcagtctgagcggtgcatcgatgaaggttgagggtctggtcctggaccacggttctcgtcaccctgacatgaagcgcagggcagagaattgttacatcttgacctgcaatgtctcattagaatatgagaaaagtgaaatcaatgcaggatttttttactcaaacgcagaacaaagagagaaaatggttgctgcagagagacgccaagttgatgaacgtgtcaaacagattattgaattgaaaaataaggtttgtgctggaggcgataaaaactttgtggtgatcaatcagaagggcattgaccctccatctctggacctccttgctagagcggggattattgctcttcgaagagcaaagaggagaaatatggagaggcttgtgctagcatgtggtggtgaagctgtcaattcagttgatgagttgactgaagattgtctaggctgggctggtcttgtctatgagcatgttcttggagaagaaaagtacacatttgtggagaatgtgaaaaatcctcgctcttgtactatactgattaaaggacctaatgaccataccattgcacaaatcaaggatgctgtccgtgatggtctaagatctgttaagaacacagttgaggatgaagcagttgtgctgggtgctggtgcttttgaggttgctgcaaagaagcatcttatcgacaatgtgaagaaaaccgtcaaaggacgagcacaacttggggtggaggcgtttgcggaagctcttcttgttatacccaagactttggctgagaactctggtttagatactcaagatgtgattgtttctctccagaatgagcatgaccgtggattagttgtggggttgaaccatcactctggggatccgattgatccccagatggaaggcatcttcgacaactactctgtgaagcgccagatcatcaattctggacccatcattgcatcccagttgctgcttgtggatgaagtgatcagggcaggccgcaacatgaggaaaccgacttagatttttgtcgccacctagccgagacttatttgttctaccttttgttttggttttgtgcctagtagtgatctggatgatacgtttgacttgagttggtcccatttcacgaagcaggtcgcattcgctttttttttttgggattactgcgtgcttccattttaacatgggattttagttttatcgatggttttaacatcctcctatgaggaaacaaagcctctagagagacgaggttgccttcccgaagttagtgccaccaaacttgctgcatggaacatgaagaagcaatgtttataacaatgttattatcaagtaatccgatgtgatggataaaatattggtactggc

SEQ ID NO: 23021 - DNA, 1927 bp, Zea Mays
gaggagaacactggggaactagtggagtaacaaagtaacccattggtcgagatcacttcgccgccgccgctttcgagatctccgggtggagcaagcgagcaaaggcagcagccatgtcgctccgcgtgctgaaccctaacgccgaggtgctcaacaagtcggcagcgctgcacatgaacatcaacgccgccaagggcctccaggacgtgctcaagaccaacctcggccccaagggcaccatcaagatgcttgtgggtggagctggtgacctgaagctgacgaaggatgggaacaccctcttgaaggaactcatccaagattcttggttgatggttttgatgttgctaagagagcgtgtcttgattttctcgataagttcaagacgccagtcgttactggtgaagaacctgacagagataccttaaaaatggtagcaagaacaacacttaggacaaagttgtatgaagggttggctgatcagttgactgatattgttgtgaatgcagttctgtgcattcgcaaaccagatgaaccaattgatctatttatggtggaaataatgcacatgcgccacaaatttgatgttgacacccgtctggttgagggtctggtcctggaccacggttctcgtcaccctgacatgaagcgcagggcagagaattgttacatcttgacctgcaatgtctcattagaatatgagaaaagtgaaatcaatgcaggatttttttactcaaacgcagaacaaagagagaaaatggttgctgcagagagacgccaagttgatgaacgtgtcaaacagattattgaattgaaaaataaggtttgtgctggaggcgataaaaactttgtggtgatcaatcagaagggcattgaccctccatctctggacctccttgctagagcggggattattgctcttcgaagagcaaagaggagaaatatggagaggcttgtgctagcatgtggtggtgaagctgtcaattcagttgatgagttgactgaagattgtctaggctgggctggtcttgtctatgagcatgttcttggagaagaaaagtacacatttgtggagaatgtgaaaaatcctcgctcttgtactatactgattaaaggacctaatgaccataccattgcacaaatcaaggatgctgtccgtgatggtctaagatctgttaagaacacagttgaggatgaagcagttgtgctgggtgctggtgcttttgaggttgctgcaaagaagcatcttatcgacaatgtgaagaaaaccgtcaaaggacgagcacaacttggggtggaggcgtttgcggaagctcttcttgttatacccaagactttggctgagaactctggtttagatactcaagatgtgattgtttctctccagaatgagcatgaccgtggattagttgtggggttgaaccatcactctggggatccgattgatccccagatggaaggcatcttcgacaactactctgtgaagcgccagatcatcaattctggacccatcattgcatcccagttgctgcttgtggatgaagtgatcagggcaggccgcaacatgaggaaaccgacttagatttttgtcgccacctagccgagacttatttgttctaccttttgttttggttttgtgcctagtagtgatctggatgatacgtttgacttgagttggtcccatttcacgaagcaggtcgcattcgctttttttttttgggattactgcgtgcttccattttaacatgggattttagttttatcgatggttttaacatcctcctatgaggaaacaaagcctctagagagacgaggttgccttcccgaagttagtgccaccaaacttgctgcatggaacatgaagaagcaatgtttataacaatgttattatcaagtaatccgatgtgatggataaaatattggtactggc

SEQ ID NO: 23022 - DNA, 1869 bp, Zea Mays
gaggagaacactggggaactagtggagtaacaaagtaacccattggtcgagatcacttcgccgccgccgctttcgagatctccgggtggagcaagcgagcaaaggcagcagccatgtcgctccgcgtgctgaaccctaacgccgaggtgctcaacaagtcggcagcgctgcacatgaacatcaacgccgccaagggcctccaggacgtgctcaagaccaacctcggccccaagggcaccatcaagatgcttgtgggtggagctggtgacctgaagctgacgaaggatgggaacaccctcttgaaggaaatgcaaattcagaacccaactgcaatcatgattgcgaggacggctgtggcacaggatgacacaagtggtgatggcacaacctccactgtgctatttatcggggagctaatgaagcagtctgagcggtgcatcgatgaaggttctgtgcattcgcaaaccagatgaaccaattgatctatttatggtggaaataatgcacatgcgccacaaatttgatgttgacacccgtctggttgagggtctggtcctggaccacggttctcgtcaccctgacatgaagcgcagggcagagaattgttacatcttgacctgcaatgtctcattagaatatgagaaaagtgaaatcaatgcaggatttttttactcaaacgcagaacaaagagagaaaatggttgctgcagagagacgccaagttgatgaacgtgtcaaacagattattgaattgaaaaataaggtttgtgctggaggcgataaaaactttgtggtgatcaatcagaagggcattgaccctccatctctggacctccttgctagagcggggattattgctcttcgaagagcaaagaggagaaatatggagaggcttgtgctagcatgtggtggtgaagctgtcaattcagttgatgagttgactgaagattgtctaggctgggctggtcttgtctatgagcatgttcttggagaagaaaagtacacatttgtggagaatgtgaaaaatcctcgctcttgtactatactgattaaaggacctaatgaccataccattgcacaaatcaaggatgctgtccgtgatggtctaagatctgttaagaacacagttgaggatgaagcagttgtgctgggtgctggtgcttttgaggttgctgcaaagaagcatcttatcgacaatgtgaagaaaaccgtcaaaggacgagcacaacttggggtggaggcgtttgcggaagctcttcttgttatacccaagactttggctgagaactctggtttagatactcaagatgtgattgtttctctccagaatgagcatgaccgtggattagttgtggggttgaaccatcactctggggatccgattgatccccagatggaaggcatcttcgacaactactctgtgaagcgccagatcatcaattctggacccatcattgcatcccagttgctgcttgtggatgaagtgatcagggcaggccgcaacatgaggaaaccgacttagatttttgtcgccacctagccgagacttatttgttctaccttttgttttggttttgtgcctagtagtgatctggatgatacgtttgacttgagttggtcccatttcacgaagcaggtcgcattcgctttttttttttgggattactgcgtgcttccattttaacatgggattttagttttatcgatggttttaacatcctcctatgaggaaacaaagcctctagagagacgaggttgccttcccgaagttagtgccaccaaacttgctgcatggaacatgaagaagcaatgtttataacaatgttattatcaagtaatccgatgtgatggataaaatattggtactggc

SEQ ID NO: 23023 - DNA, 1053 bp, Zea Mays
cccaaatttattttcaaccctgaatggatttagattattgctcttcgaagagcaaagaggagaaatatggagaggcttgtgctagcatgtggtggtgaagctgtcaattcagttgatgagttgactgaagattgtctaggctgggctggtcttgtctatgagcatgttcttggagaagaaaagtacacatttgtggagaatgtgaaaaatcctcgctcttgtactatactgattaaaggacctaatgaccataccattgcacaaatcaaggatgctgtccgtgatggtctaagatctgttaagaacacagttgaggatgaagcagttgtgctgggtgctggtgcttttgaggttgctgcaaagaagcatcttatcgacaatgtgaagaaaaccgtcaaaggacgagcacaacttggggtggaggcgtttgcggaagctcttcttgttatacccaagactttggctgagaactctggtttagatactcaagatgtgattgtttctctccagaatgagcatgaccgtggattagttgtggggttgaaccatcactctggggatccgattgatccccagatggaaggcatcttcgacaactactctgtgaagcgccagatcatcaattctggacccatcattgcatcccagttgctgcttgtggatgaagtgatcagggcaggccgcaacatgaggaaaccgacttagatttttgtcgccacctagccgagacttatttgttctaccttttgttttggttttgtgcctagtagtgatctggatgatacgtttgacttgagttggtcccatttcacgaagcaggtcgcattcgctttttttttttgggattactgcgtgcttccattttaacatgggattttagttttatcgatggttttaacatcctcctatgaggaaacaaagcctctagagagacgaggttgccttcccgaagttagtgccaccaaacttgctgcatggaacatgaagaagcaatgtttataacaatgttattatcaagtaatccgatgtgatggataaaatattggtactggc

SEQ ID NO: 23024 - DNA, 886 bp, Zea Mays
atgggcccatgttggccacgcaaggcacgcacgcatgagacacaggagtacagccgtacaggacacagccgccgcctgttcgtgttccttcctgtgcgagtcggcgaacggcgaggcgtctccggagtccggactgcggctgtggacagcgactctgtgacggcgactcggcgaagccccaagctgccaagcccccaggtgctggttggaatggcaagtacagcatgctttgtgattgtcagtaagaatgacatcccaatctatgaggcagaagttggatctgcacccaaaaaagaagatttgtcttatcaccatcagtttattctgcatgctgcattagatgttgttcaggatctagcatggacaacaaatgcaatgttcctgaagtcagttgatagattcaatgaccttgtggtgtctgtttatgtaactgctggtcaccagattcatgctgcttcatgactcgcgtagcgaggatggaataaaaagcttttttcaagaggtccatgaactttacatcaagatattcctcaacccgctttacctgcccggctctcgcatcacatcctctcatttcgataccaaggtgagggcgctcgcgaggaggtacctgtaatacgggcatatgctggggtttcatcgtaaagcaggcacgccgatttttttgtgccatcatcatctgataacacatacgtctaatttttcttggcgttggctttgttatgaccgacctatggatcattttttttttcgagaacaaaatgacttgtctaatttttcttggcgttggctttgttatgaccgacctatggatcatttttttttcgagaacaaaatgacttggcgataatgttcaaactttaattgattgtgtcgtgcatcgcag

SEQ ID NO: 23025 - DNA, 1248 bp, Zea Mays
gggacctaattttagctatgtgtgtttggatctgataaactacaactaaaatggcacatacttactacacttactactgattttgttgtacagattcatctaaaatggcacatacttactacacttactactgattttattgtgaaaggacagcaacagctcaaggcagacaaagaccatggcacaaatctcacacttgtccaaacctacaagtatcatcaggaagatagcttgaaaaaatcgtgaatgagacttgtatgtggctgtgaatgaacaattgtgtgattaggatttgtttattgtgagcttttccgattacaattaccgtttcccgatcaattccgagctattttgctcggatttatccgttttcgatataccggaatttaccggtcgttatccgtttccgactttcccgtttaccgattccggccgaacaaaaaattatgcgggtgaaaacggtgagaggttttttccgaccgttaccgaccattttcacccttagatattgggctgtgttaaaattttctaataaccggtttttatgttgaatggcatttcatcctgactatctttattattcttttctttgcaacatctgaagttgttcgggggaattttttctaggtgctggttggaatggcaagtacagcatgctttgtgattgtcagtaagaatgacatcccaatctatgaggcagaagttggatctgcacccaaaaaagaagatttgtcttatcaccatcagtttattctgcatgctgcattagatgttgttcaggatctagcatggacaacaaatgcaatattcatgctgcttcatgactcgcgtagcgaggatggaataaaaagcttttttcaagaggtccatgaactttacatcaagatattcctcaacccgctttacctgcccggctctcgcatcacatcctctcatttcgataccaaggtgagggcgctcgcgaggaggtacctgtaatacgggcatatgctggggtttcatcgtaaagcaggcacgccgatttttttgtgccatcatcatctgataacacatacgtctaatttttcttggcgttggctttgttatgaccgacctatggatcattttttttttcgagaacaaaatgacttgtctaatttttcttggcgttggctttgttatgaccgacctatggatcatttttttttcgagaacaaaatgacttggcgataatgttcaaactttaattgattgtgtcgtgcatcgcag

SEQ ID NO: 23026 - DNA, 945 bp, Zea Mays
gggacctaattttagctatgtgtgtttggatctgataaactacaactaaaatggcacatacttactacacttactactgattttgttgtacagattcatctaaaatggcacatacttactacacttactactgattttattgtgaaaggacagcaacagctcaaggcagacaaagaccatggcacaaatctcacacttgtccaaacctacaagtatcatcaggaagatagcttgaaaaaatcgtgaatgagacttgtgctggttggaatggcaagtacagcatgctttgtgattgtcagtaagaatgacatcccaatctatgaggcagaagttggatctgcacccaaaaaagaagatttgtcttatcaccatcagtttattctgcatgctgcattagatgttgttcaggatctagcatggacaacaaatgcaatgttcctgaagtcagttgatagattcaatgaccttgtggtgtctgtttatgtaactgctggtcataccagattcatgctgcttcatgactcgcgtagcgaggatggaataaaaagcttttttcaagaggtccatgaactttacatcaagatattcctcaacccgctttacctgcccggctctcgcatcacatcctctcatttcgataccaaggtgagggcgctcgcgaggaggtacctgtaatacgggcatatgctggggtttcatcgtaaagcaggcacgccgatttttttgtgccatcatcatctgataacacatacgtctaatttttcttggcgttggctttgttatgaccgacctatggatcattttttttttcgagaacaaaatgacttgtctaatttttcttggcgttggctttgttatgaccgacctatggatcatttttttttcgagaacaaaatgacttggcgataatgttcaaactttaattgattgtgtcgtgcatcgcag

SEQ ID NO: 23027 - DNA, 1791 bp, Zea Mays
agaaaaacaactcattgctcttcgagagttagagctgttttgttttattgttaggagctagagcattaaaaccgtagcttataccaactcttccaacgttcttctcatacatcatttaaaaaaatataggagaatctgttttgtaaaacgaattataaaacaaatctccttcaaaagataaaggagccggaggagtcagagctaaaacgataaaccagagcccggcctaaatgtgacggccgctctagtggaagcgcgtataaattgggggaaggaaaattccagcggacgagcgctctagccgtttttcctcgtcctcgatccagcccctgccgcttccagctccgatcgatctgatccctccccaccaccacgcccatggcggaccaactcaccgacgaccagatcgccgagttcaaggaggccttcagcctcttcgacaaggacggggatggtacggttcgctctcctcatactctctttctctctctctctctccgtgttccttcggatctgtcctccgtgggtggagatgctcggcgtacgtggctgcctgtgtagtggcattgccgcccgcaagtctgtttagacggggtagatccgatacatcccggatgtggacggagtccgcggcggggctcgatcgcgtcgctgtcctgtgcatttctccctaccagtggcggaatcggcgatgtggaccttaggtttatctgctctttgaccatttcgccactgacaatcatgtttgtttggattgttacgctgtgaatcaatacgagacgtggccaagtgattttttttctgggagcagtgtaacctttgacccagtctggtcgtggtctgtgtagcatgatgaagttgtagcaggctgattgctaccaaaacattttcaattcattagtcttttcatgctccaggttgactgaagttagaagaggttaaagatcgtgctcagtttgtccaagtaattttcctagtaattgtgcgatccagcttcaacgttgaacgacatgtttcttgttctaccttgttcctgtgcagtagttgacccccaaaaaggaaaactgggaccgactgctattggggaaacggcacccacactgattggctcaattccagtggctatgcgtgctcggtcaaaacatgatgatttaccacttagaaactgccctgctttccacatagcatttcaaacttttcgattaagatattaccaccttttgacatctgggttctccctaacttgctgaattatttctctcttcagtcactactttacctagttataattacagaaatggttgtgccgtatcttgtacaggttgcatcacgaccaaggagctgggaactgtcatgcgttcactggggcaaaaccctacagaggctgagctccaggacatgatcaatgaggtcgatgccgatggcaacggcaccatcgattttccagagtttctgaaccttatggctcgcaagatgaaggacaccgactctgaggaagagctcaaggaggcctttcgtgtgtttgacaaggaccagaacggcttcatctctgccgccgagctccgccatgtcatgacaaatcttggggagaagctaactgatgaggaggtagacgagatgatccgtgaggctgatgtcgatggtgatggccagattaactacgaggagtttgttaaggtcatgatggccaaatggagccacttggaaaacctaaacatgcaacagggtaatgtctcagttatcttttatttaccaaaagttatctcaccgctgggtgttctcccttacctc

SEQ ID NO: 23028 - DNA, 1053 bp, Zea Mays
attcattccaaaccgcacgttcttattgttggtttaagatgcatgaattcaagatgctctttgtgctatgtaaaatgcagtctcgtccttttttttttgtgtagggtgaaagcgacatgtacccttggagtggtacgtaccagctgctgcatgtccaggccttcttaaggccaactttcttgtgtttgtcgaaacttaggctgtgcttgggagagttgagctcacatggagcaggacaaaagaaccaaggtgctgtgcctgcatggcttccgtacaagcggcgcttttctgaagaagcagatcagcaaatggcacccttccatacttcagcagtttgagatggtcttccctgatggcgtcttcccagctggtggaaagtcggagatagagggcatatttccaccgccgtacttcgagtggtaccagttcaatatgggcgcaacacttttggcccttttggtaggctaccaagcacagggcaaggtgctgagtgatcatccgccaattaagttcgtggtctcaatatctgggtgcaagttcaaggacccaagcatctgtgatgtcacttacaaagacccgatcaaggtgaaatcagtgcactttattggagagaaggactggctcaaggtaccttcggaggagctggcttctgcctttgatgagcctctcatcataaggcatcctcatggccacactgtccctaggcttgacgatgtgtctgtgaaacagctttctgaatggagctcgtgcatcctggaagaccttgagactgcaatcgttcctgaggccttagattcgggcaacccatctgataaggaagctattagtgcagaattcgcagaaaacctggtgactgcttgaggcttgtccactttcgtggcatggttggtttggttgcatttgaaacttgtaccgtttctactgagtagtgcgtggaacttgtttgatcgcatgtgtatttgcattggcaaaacaataaagcgctatcttctgaatcaaatggattcagacatcaagtacaaagtattgttggatgcaacattgactgggatt

SEQ ID NO: 23029 - DNA, 3038 bp, Zea Mays
cagcagagggccagggcagctagtagctgttaatcgcaattagtgcgcgctaatcaaatgctcatctgtcctcccgaccgttgctaccccatatcccccccacaccgccggctccactccactccgatcgactcgcctgagattctcgcagggactagtttgtggcggaatctcaaacccaggaacctgtgaatcctcgacacttgtgaaacatgagaaggttctttttcttcgggtcccctgctgcaaacgctggtgagggagccgggcaaccggtcaatgatagcaggactggacatagaaagacagatgagggaaaggacatctccaccgcgagattgtcgagatccagaagccgtcgtcagaagcggaataaggaggaaccggctaaccccaaacaactcaggaggtccatgtccttctcatccccggccagaagcagctgtgtggaggaacgatgctttagcttctcgggtgatgttccgtgctctttgtacgatgaatctgatgcaccccaccatgccaaagatgtcgctcccgacatgtggtctccagaagggaatccgttctctagagaatatgcaataagaaccccgaaagatcattctgccatggaaaatgattctcctcgttcaaaatactgttcttgctcagcagggcactctcctgttagctctcctgtcgctatacagtgcagatcaacaagactaggcaatttattaaacaggaacgaagtactagatcgttacattgatagagggcatggagatgcaatcgtagatgagaaacagaagcagtgcgtacctacggtttctaatttgggaaggccacctcgaccccactctacagtaccatccataccgagaccattcaaagagacaacggaaagctacccagatgtggacttaaacgacgccttcctttggcgacttgctcaagagggtataggagatacccacaagattacaactatgtgcagtgcatctagacgccacataaacatgtcagatgcttctgaaagagaaagtgcaacaactgttgaagatatttatgaagatttgcaagatgtgagacttccaaatgttatctgcccctccacttgtcctaactcagcggtagaagaaactgatgacatgttgcttcaaagagttaaggaagttgagtcaaggtttactattccttgtggagatgaatatgaatttagcatgctcaggtataaatcatcaacctcaaatgacatgtttcagttgatccagcaattgactgaagataggaaacagttagcatatgaattgtcttcagagatcaaagcacgtgttacagaaagatttgctgccaaagagcaatacaaacaattaaagaaagaattggacaacagaactagaaggctggagaaggagaagagtgaagtacaaactacactggaaggagagatggatagaaggtcagatgattggtctatcaggctatcaagatttcaatctgaagaagagagactacatgaacgggtgagagaacttgcagagcagaatgtgtcatttcagagagaagttacttctcttggagcaactaaggctgaagctttaatgaaagctgcgagtttggaaacgcaaaatagcaaactaaatgacgatctagagaaactaaaaaatgagcatgagaaactgcattattcctcaacagatttgcaggctcgctttgctgagattgtagaggaaagggaccacatccgagaatatttgaaggccaaggagggagagaacaaagcattgcacaaagtaattgcaagactacaaacaacatgtaatgagcaggaaagaacaatcacaggcatgagacaaggatgcatagacgaattaggtaggaaatttgttgagtacagcaccaatgataaaacgagaaaattacaaatggaacttattagactgactggggtggagcaaaagttgagaggtgaaattcgatcttgtaatcttgaagtaaaatctctcagacaagagaacattgcactcttaaatcgtttacaaggtgctggaaatggagcaagcttctcctcgattcgacttgatcaggagcttcaagctagggtggacaacctgcaaatgcaaggcttgtcactacttgataagattagccaactttgtaccaaattgctggatctgatgaaacataagagacatgaaaatgaatatttgtgtggcaatgatgtgtcaacattcagtgattacatatttgagtaccagagcatcaaaggaggaattgaagctgaaggtagtccttccaaagatcaaacggatgattttggactcaagctgaaagaagaggctatgctgaatagagtactgaaggaggcagtcttgtcaaaagaagttgccattgaacaattgcaatctgatctggcatcttcacttcgcatccaagacgttatgagaaacgagatccagagggttcaggatgagctttcttgcataacccacaaagctaagcagttggagcttcaggtatccaagaaggatgagtcaatcgatgagatccaacaggatttccaggaatctgcaaaggagctggctgctcttcgtggaacactgaaaacagtgacggaggagagggacctgtcgtggcaggaggcgaagcagctgagacgaaacatcagcatcatgcaggacgaggttgtatcgctgaagaagaagatcgaagccctggacgaagacatacttgtgaaggaggggcagatcacaatattgcaggacagcatcgacaagccgttcgacatcatctgcagcccaagatcgatgagggagttcgatatggcgtgaagacggctgctgttttgtagcgtatgcatgaaggattttttgcatcaagggcaagatgcatggagtataatgtgttggaagttgacagtagacccaacaacacattgcattctggtcaattgtttctgtctggtgggacagcacaagcgaagacagatgtattagcactttgtggatctcaagtaaaagaggcctgctgttggaaggtcaggaagaaggtgg

SEQ ID NO: 23030 - DNA, 3012 bp, Zea Mays
agctgttaatcgcaattagtgcgcgctaatcaaatgctcatctgtcctcccgaccgttgctaccccatatcccccccacaccgccggctccactccactccgatcgactcgcctgagattctcgcagggactagtttgtggcggaatctcaaacccaggaacctgtgaatcctcgacacttgtgaaacatgagaaggttctttttcttcgggtcccctgctgcaaacgctggtgagggagccgggcaaccggtcaatgatagcaggactggacatagaaagacagatgagggaaaggacatctccaccgcgagattgtcgagatccagaagccgtcgtcagaagcggaataaggaggaaccggctaaccccaaacaactcaggaggtccatgtccttctcatccccggccagaagcagctgtgtggaggaacgatgctttagcttctcgggtgatgttccgtgctctttgtacgatgaatctgatgcaccccaccatgccaaagatgtcgctcccgacatgtggtctccagaagggaatccgttctctagagaatatgcaataagaaccccgaaagatcattctgccatggaaaatgattctcctcgttcaaaatactgttcttgctcagcagggcactctcctgttagctctcctgtcgctatacagtgcagatcaacaagactaggcaatttattaaacaggaacgaagtactagatcgttacattgatagagggcatggagatgcaatcgtagatgagaaacagaagcagtgcgtacctacggtttctaatttgggaaggccacctcgaccccactctacagtaccatccataccgagaccattcaaagagacaacggaaagctacccagatgtggacttaaacgacgccttcctttggcgacttgctcaagagggtataggagatacccacaagattacaactatgtgcagtgcatctagacgccacataaacatgtcagatgcttctgaaagagaaagtgcaacaactgttgaagatatttatgaagatttgcaagatgtgagacttccaaatgttatctgcccctccacttgtcctaactcagaagaaactgatgacatgttgcttcaaagagttaaggaagttgagtcaaggtttactattccttgtggagatgaatatgaatttagcatgctcaggtataaatcatcaacctcaaatgacatgtttcagttgatccagcaattgactgaagataggaaacagttagcatatgaattgtcttcagagatcaaagcacgtgttacagaaagatttgctgccaaagagcaatacaaacaattaaagaaagaattggacaacagaactagaaggctggagaaggagaagagtgaagtacaaactacactggaaggagagatggatagaaggtcagatgattggtctatcaggctatcaagatttcaatctgaagaagagagactacatgaacgggtgagagaacttgcagagcagaatgtgtcatttcagagagaagttacttctcttggagcaactaaggctgaagctttaatgaaagctgcgagtttggaaacgcaaaatagcaaactaaatgacgatctagagaaactaaaaaatgagcatgagaaactgcattattcctcaacagatttgcaggctcgctttgctgagattgtagaggaaagggaccacatccgagaatatttgaaggccaaggagggagagaacaaagcattgcacaaagtaattgcaagactacaaacaacatgtaatgagcaggaaagaacaatcacaggcatgagacaaggatgcatagacgaattaggtaggaaatttgttgagtacagcaccaatgataaaacgagaaaattacaaatggaacttattagactgactggggtggagcaaaagttgagaggtgaaattcgatcttgtaatcttgaagtaaaatctctcagacaagagaacattgcactcttaaatcgtttacaaggtgctggaaatggagcaagcttctcctcgattcgacttgatcaggagcttcaagctagggtggacaacctgcaaatgcaaggcttgtcactacttgataagattagccaactttgtaccaaattgctggatctgatgaaacataagagacatgaaaatgaatatttgtgtggcaatgatgtgtcaacattcagtgattacatatttgagtaccagagcatcaaaggaggaattgaaggtctgaagctaagtttgaaagcaataaattctatactagctgaaaagcaaaatgctaaagaaaaatctggtgaaattgtagctgaaggtagtccttccaaagatcaaacggatgattttggactcaagctgaaagaagaggctatgctgaatagagtactgaaggaggcagtcttgtcaaaagaagttgccattgaacaattgcaatctgatctggcatcttcacttcgcatccaagacgttatgagaaacgagatccagagggttcaggatgagctttcttgcataacccacaaagctaagcagttggagcttcaggtatccaagaaggatgagtcaatcgatgagatccaacaggatttccaggaatctgcaaaggagctggctgctcttcgtggaacactgaaaacagtgacggaggagagggacctgtcgtggcaggaggcgaagcagctgagacgaaacatcagcatcatgcaggacgaggttgtatcgctgaagaagaagatcgaagccctggacgaagacatacttgtgaaggaggggcagatcacaatattgcaggacagcatcgacaagccgttcgacatcatctgcagcccaagatcgatgagggagttcgatatggcgtgaagacggctgctgttttgtagcgtatgcatgaaggattttttgcatcaagggcaagatgcatggagtataatgtgttggaagttgacagtagacccaacaacacattgcattctggtcaattgtttctgtctggtgggacagcaca

SEQ ID NO: 23031 - DNA, 2312 bp, Zea Mays
cgcctgagattctcgcagggactagtttgtggcggaatctcaaacccaggaacctgtgaatcctcgacacttgtgaaacatgagaaggttctttttcttcgggtcccctgctgcaaacgctggtgagggagccgggcaaccggtcaatgatagcaggactggacatagaaagacagatgagggaaaggacatctccaccgcgagattgtcgagatccagaagccgtcgtcagaagcggaataaggaggaaccggctaaccccaaacaactcaggaggtccatgtccttctcatccccggccagaagcagctgtgtggaggaacgatgctttagcttctcgggtgatgttccgtgctctttgtacgatgaatctgatgcaccccaccatgccaaagatgtcgctcccgacatgtggtctccagaagggaatccgttctctagagaatatgcaataagaaccccgaaagatcattctgccatggaaaatgattctcctcgttcaaaatactgttcttgctcagcagggcactctcctgttagctctcctgtcgctatacagtgcagatcaacaagactaggcaatttattaaacaggaacgaagtactagatcgttacattgatagagggcatggagatgcaatcgtagatgagaaacagaagcagtgcgtacctacggtttctaatttgggaaggccacctcgaccccactctacagtaccatccataccgagaccattcaaagagacaacggaaagctacccagatgtggacttaaacgacgccttcctttggcgacttgctcaagagggtataggagatacccacaagattacaactatgtgcagtgcatctagacgccacataaacatgtcagatgcttctgaaagagaaagtgcaacaactgttgaagatatttatgaagatttgcaagatgtgagacttccaaatgttatctgcccctccacttgtcctaactcagcggtagaagaaactgatgacatgttgcttcaaagagttaaggaagttgagtcaaggtttactattccttgtggagatgaatatgaatttagcatgctcaggtataaatcatcaacctcaaatgacatgtttcagttgatccagcaattgactgaagataggaaacagttagcatatgaattgtcttcagagatcaaagcacgtgttacagaaagatttgctgccaaagagcaatacaaacaattaaagaaagaattggacaacagaactagaaggctggagaaggagaagagtgaagtacaaactacactggaaggagagatggatagaaggtcagatgattggtctatcaggctatcaagatttcaatctgaagaagagagactacatgaacgggtgagagaacttgcagagcagaatgtgtcatttcagagagaagttacttctcttggagcaactaaggctgaagctttaatgaaagctgcgagtttggaaacgcaaaatagcaaactaaatgacgatctagagaaactaaaaaatgagcatgagaaactgcattattcctcaacagatttgcaggctcgctttgctgagattgtagaggaaagggaccacatccgagaatatttgaaggccaaggagggagagaacaaagcattgcacaaagtaattgcaagactacaaacaacatgtaatgagcaggaaagaacaatcacaggcatgagacaaggatgcatagacgaattaggtaggaaatttgttgagtacagcaccaatgataaaacgagaaaattacaaatggaacttattagactgactggggtggagcaaaagttgagaggtgaaattcgatcttgtaatcttgaagtaaaatctctcagacaagagaacattgcactcttaaatcgtttacaaggtgctggaaatggagcaagcttctcctcgattcgacttgatcaggagcttcaagctagggtggacaacctgtcgtggcaggaggcgaagcagctgagacgaaacatcagcatcatgcaggacgaggttgtatcgctgaagaagaagatcgaagccctggacgaagacatacttgtgaaggaggggcagatcacaatattgcaggacagcatcgacaagccgttcgacatcatctgcagcccaagatcgatgagggagttcgatatggcgtgaagacggctgctgttttgtagcgtatgcatgaaggattttttgcatcaagggcaagatgcatggagtataatgtgttggaagttgacagtagacccaacaacacattgcattctggtcaattgtttctgtctggtgggacagcaca

SEQ ID NO: 23032 - DNA, 2999 bp, Zea Mays
cttgggtttcgggccgattcggtgcccctgggatcgaggattggagtgctgttgcctttttcgggtgctctggtggccttgcgtgtagcctgttcgactgatttttagggactagtttgtggcggaatctcaaacccaggaacctgtgaatcctcgacacttgtgaaacatgagaaggttctttttcttcgggtcccctgctgcaaacgctggtgagggagccgggcaaccggtcaatgatagcaggactggacatagaaagacagatgagggaaaggacatctccaccgcgagattgtcgagatccagaagccgtcgtcagaagcggaataaggaggaaccggctaaccccaaacaactcaggaggtccatgtccttctcatccccggccagaagcagctgtgtggaggaacgatgctttagcttctcgggtgatgttccgtgctctttgtacgatgaatctgatgcaccccaccatgccaaagatgtcgctcccgacatgtggtctccagaagggaatccgttctctagagaatatgcaataagaaccccgaaagatcattctgccatggaaaatgattctcctcgttcaaaatactgttcttgctcagcagggcactctcctgttagctctcctgtcgctatacagtgcagatcaacaagactaggcaatttattaaacaggaacgaagtactagatcgttacattgatagagggcatggagatgcaatcgtagatgagaaacagaagcagtgcgtacctacggtttctaatttgggaaggccacctcgaccccactctacagtaccatccataccgagaccattcaaagagacaacggaaagctacccagatgtggacttaaacgacgccttcctttggcgacttgctcaagagggtataggagatacccacaagattacaactatgtgcagtgcatctagacgccacataaacatgtcagatgcttctgaaagagaaagtgcaacaactgttgaagatatttatgaagatttgcaagatgtgagacttccaaatgttatctgcccctccacttgtcctaactcagcggtagaagaaactgatgacatgttgcttcaaagagttaaggaagttgagtcaaggtttactattccttgtggagatgaatatgaatttagcatgctcaggtataaatcatcaacctcaaatgacatgtttcagttgatccagcaattgactgaagataggaaacagttagcatatgaattgtcttcagagatcaaagcacgtgttacagaaagatttgctgccaaagagcaatacaaacaattaaagaaagaattggacaacagaactagaaggctggagaaggagaagagtgaagtacaaactacactggaaggagagatggatagaaggtcagatgattggtctatcaggctatcaagatttcaatctgaagaagagagactacatgaacgggtgagagaacttgcagagcagaatgtgtcatttcagagagaagttacttctcttggagcaactaaggctgaagctttaatgaaagctgcgagtttggaaacgcaaaatagcaaactaaatgacgatctagagaaactaaaaaatgagcatgagaaactgcattattcctcaacagatttgcaggctcgctttgctgagattgtagaggaaagggaccacatccgagaatatttgaaggccaaggagggagagaacaaagcattgcacaaagtaattgcaagactacaaacaacatgtaatgagcaggaaagaacaatcacaggcatgagacaaggatgcatagacgaattaggtaggaaatttgttgagtacagcaccaatgataaaacgagaaaattacaaatggaacttattagactgactggggtggagcaaaagttgagaggtgaaattcgatcttgtaatcttgaagtaaaatctctcagacaagagaacattgcactcttaaatcgtttacaaggtgctggaaatggagcaagcttctcctcgattcgacttgatcaggagcttcaagctagggtggacaacctgcaaatgcaaggcttgtcactacttgataagattagccaactttgtaccaaattgctggatctgatgaaacataagagacatgaaaatgaatatttgtgtggcaatgatgtgtcaacattcagtgattacatatttgagtaccagagcatcaaaggaggaattgaaggtctgaagctaagtttgaaagcaataaattctatactagctgaaaagcaaaatgctaaagaaaaatctggtgaaattgtagctgaaggtagtccttccaaagatcaaacggatgattttggactcaagctgaaagaagaggctatgctgaatagagtactgaaggaggcagtcttgtcaaaagaagttgccattgaacaattgcaatctgatctggcatcttcacttcgcatccaagacgttatgagaaacgagatccagagggttcaggatgagctttcttgcataacccacaaagctaagcagttggagcttcaggtatccaagaaggatgagtcaatcgatgagatccaacaggatttccaggaatctgcaaaggagctggctgctcttcgtggaacactgaaaacagtgacggaggagagggacctgtcgtggcaggaggcgaagcagctgagacgaaacatcagcatcatgcaggacgaggttgtatcgctgaagaagaagatcgaagccctggacgaagacatacttgtgaaggaggggcagatcacaatattgcaggacagcatcgacaagccgttcgacatcatctgcagcccaagatcgatgagggagttcgatatggcgtgaagacggctgctgttttgtagcgtatgcatgaaggattttttgcatcaagggcaagatgcatggagtataatgtgttggaagttgacagtagacccaacaacacattgcattctggtcaattgtttctgtctggtgggacagcaca

SEQ ID NO: 23033 - DNA, 3506 bp, Zea Mays
ctgcaagcttgaagtcctcgaggacattctcgattgtttttgtggctgccagaacaaaaataaaaatcaagggttttagaagggtttggtattccttcgtttcctccctttcttcctctgcaagcaaaaacaccgcagggaaaaaaaggcccaaaacaatctgcgacttcgagaaccctagtatcaagcgcagaactccgtcatgctgcgtgcggcggcggctgccgccgccatattcccggcgcgggtcgccgctgcgccggctgctgcggcggcggaggaacttaggtatccgctgctcagggttattgggacgctgaggggcagccgcggctcggtgctgctggggaggagggtgcgtttctgctccaactcctccgcgagcgactccgaagtggcggcggcagatgcggaggcgaatgccgaggatgcgaccgttgcggaggaggaggcgggcagcaaggcgtcttccgccatcgtgccgaccagcaccaatatcgacgactgcctctctgttatagcgttacctcttccacatcggccactctttcctggattttacatgccgatctatgtaaaggaccaaaagctgttgcaagccctaatagaaaatcgcaaaagatcagctccgtatgctggtgcctttctcgtgaaagatgaagaaggtactgaccctaacattgtgactggttcagattcagagaaaagcattggtgatctcaaagggaaagacttgctgaagcgtcttcatgaagttgggacgcttgctcagattacaagcattcaaggggatcaggtagttctacttggtcacagacgtttacagataactgagatggtcgaagaggatccactcacagttaaagttgatcatctaaaggaaaagccctacaacaaggatgatgatgttataaaagctacctcattcgaagttatatcaactttaagggaagttctaaggacaagttccctttggaaggatcatgtgcaaacctacacacagcacattggtgacttcaactaccaacggctagcagattttggtgctgctatctctggtgccaacaagttgctttgccaggaggtgcttgaggaattagatgtatacaagcgtctgaagttcactcttgagttagtaaaaaaggagatggagattagtaagctacagcaatccatagcaaaagcaattgaagaaaagattagtggagatcagcgacgttatttgttgaatgaacaacttaaggcaatcaagaaggagctcggtttggagactgatgataaaacagcattatctgcaaaatttagggaacgtatagaatcaaagaaggacagatgtccttctcatgttttacaagtcattgaagaagagcttaccaagcttcagcttttagaagccagctctagtgagttcagtgtaactcgtaattatttggactggctgacagtattgccatggggaaattatagtgatgaaaactttgatgtccaccgtgctcagaaaattctcgatgaagaccattatggtttgagtgacgtgaaagagaggatactggaattcatagcagttgggaagttaagagggacttcacaaggcaagatcatatgtctttctgggccaccaggagttgggaaaactagtattggtcgttcaattgcacgtgcactgaaccgccagttctacaggttttctgttggaggtttggctgatgtggctgaaatcaagggccatcggcgcacgtatgttggtgcgatgccagggaagatggtgcagtgtcttaaatcagttggaacagcaaatcctctagtattgatagatgagattgacaagcttgggaagggtcattctggggatccagctagtgcattgttggaactccttgatcctgagcagaatgttaatttcttagatcactaccttgatgttcctattgacctatccaaggttctattcgtttgcacagcaaatgtaatagagacgataccaaatccgttattggataggatggagatcattgctatagctgggtatataactgatgagaagatgcatattgctcgggactatttagagaagaatacaagacaagcctgtggcattaagcctgaacaggttgaagttacagatgctgcccttcttgctcttattgaaaattattgtcgagaagctggagtgaggaaccttcaaaagcatattgagaaaatttaccgtaagattgctctccagcttgttcgccaaggagtatcgaatgagccagaccaggagtctctcggtgtcactgtaaatgaggaatctaatagtggtgatagcatcacagcaaaagatgagattgtgaaggatcctgctgtagaagatgcttcagtcgccaacaatgttacaaatcctgcctctgaggaagctaatgaagtaaatttgacaactgaagcaccaaaagaagacagcacatctaagggcaacaagaaaacagatggagtagcagaagatgcagcagacaaggcaactgagaaggttgtggtagattcatcaaaccttggtgattttgttgggaaacctgtgttccaggctgagcgtatatatgagcagactcctgttggagtggtcatgggtttagcttggactgctatgggtggttctactttgtacatcgaaacaacaaaagtggaggaaagggaagggaaaggtgaccttgtgctgacaggacagcttggagatgtaatgaaagagagtgctcagattgcgcacacagttggcagaactgtattactggagaaagagccagataatcatttttttgcaaactcgaagctatgggaaagcctgtcaagaaggacctcgcaatgacgggtgaagtaacattaactggaagaatcctcccaattggcggggtgaaagagaagacgattgcggcaaggagaagtgcgataaagacgctcatatttccggcagcgaataaaagggactttgacgagcttgcttctaatgtgaaggaaggactggaagttcattttgttgacacatacagtgaaatatatgatttggctttccagagtgacgccgggactgagatgatttagctttacattacaggattgagattttttccccttctctagatctggttacaggctaaataccaaagaagtttgtcagcagaggcagaccattgtaaccaagatgagtggagttaattgatatttacgagaaagaaaaataatatttctttttttggccccaatataacatcattgaatctaagagatttatttggctaggctgtacgtaactagtgtgctaggtggtggtattggccttttatattgttgggacttgggagtgtgggaaaaacagtactggtgcaccatctgttatttattttaagtgttttccaaaggcagcaaggtcatatacctcatatcataatttagccacaaatggcctgaatattttgtattttggtcatttttttttcgaaaaaatcacatttagacccctaaaccacttaattctg

SEQ ID NO: 23034 - DNA, 3296 bp, Zea Mays
gtttcctccctttcttcctctgcaagcaaaaacaccgcagggaaaaaaaggcccaaaacaatctgcgacttcgagaaccctagtatcaagcgcagaactccgtcatgctgcgtgcggcggcggctgccgccgccatattcccggcgcgggtcgccgctgcgccggctgctgcggcggcggaggaacttaggtatccgctgctcagggttattgggacgctgaggggcagccgcggctcggtgctgctggggaggagggtgcgtttctgctccaactcctccgcgagcgactccgaagtggcggcggcagatgcggaggcgaatgccgaggatgcgaccgttgcggaggaggaggcgggcagcaaggcgtcttccgccatcgtgccgaccagcaccaatatcgacgactgcctctctgttatagcgttacctcttccacatcggccactctttcctggattttacatgccgatctatgtaaaggaccaaaagctgttgcaagccctaatagaaaatcgcaaaagatcagctccgtatgctggtgcctttctcgtgaaagatgaagaaggtactgaccctaacattgtgactggttcagattcagagaaaagcattggtgatctcaaagggaaagacttgctgaagcgtcttcatgaagttgggacgcttgctcagattacaagcattcaaggggatcaggtagttctacttggtcacagacgtttacagataactgagatggtcgaagaggatccactcacagttaaagttgatcatctaaaggaaaagccctacaacaaggatgatgatgttataaaagctacctcattcgaagttatatcaactttaagggaagttctaaggacaagttccctttggaaggatcatgtgcaaacctacacacagcacattggtgacttcaactaccaacggctagcagattttggtgctgctatctctggtgccaacaagttgctttgccaggaggtgcttgaggaattagatgtatacaagcgtctgaagttcactcttgagttagtaaaaaaggagatggagattagtaagctacagcaatccatagcaaaagcaattgaagaaaagattagtggagatcagcgacgttatttgttgaatgaacaacttaaggcaatcaagaaggagctcggtttggagactgatgataaaacagcattatctgcaaaatttagggaacgtatagaatcaaagaaggacagatgtccttctcatgttttacaagtcattgaagaagagcttaccaagcttcagcttttagaagccagctctaaaaattctcgatgaagaccattatggtttgagtgacgtgaaagagaggatactggaattcatagcagttgggaagttaagagggacttcacaaggcaagatcatatgtctttctgggccaccaggagttgggaaaactagtattggtcgttcaattgcacgtgcactgaaccgccagttctacaggttttctgttggaggtttggctgatgtggctgaaatcaagggccatcggcgcacgtatgttggtgcgatgccagggaagatggtgcagtgtcttaaatcagttggaacagcaaatcctctagtattgatagatgagattgacaagcttgggaagggtcattctggggatccagctagtgcattgttggaactccttgatcctgagcagaatgttaatttcttagatcactaccttgatgttcctattgacctatccaaggttctattcgtttgcacagcaaatgtaatagagacgataccaaatccgttattggataggatggagatcattgctatagctgggtatataactgatgagaagatgcatattgctcgggactatttagagaagaatacaagacaagcctgtggcattaagcctgaacagattgctctccagcttgttcgccaaggagtatcgaatgagccagaccaggagtctctcggtgtcactgtaaatgaggaatctaatagtggtgatagcatcacagcaaaagatgagattgtgaaggatcctgctgtagaagatgcttcagtcgccaacaatgttacaaatcctgcctctgaggaagctaatgaagtaaatttgacaactgaagcaccaaaagaagacagcacatctaagggcaacaagaaaacagatggagtagcagaagatgcagcagacaaggcaactgagaaggttgtggtagattcatcaaaccttggtgattttgttgggaaacctgtgttccaggctgagcgtatatatgagcagactcctgttggagtggtcatgggtttagcttggactgctatgggtggttctactttgtacatcgaaacaacaaaagtggaggaaagggaagggaaaggtgaccttgtgctgacaggacagcttggagatgtaatgaaagagagtgctcagattgcgcacacagttggcagaactgtattactggagaaagagccagataatcatttttttgcaaactcgaaggtgcacttgcatgttccagcagggtccaccccaaaggatggccctagtgctggatgcaccatgataacgtctatgctgtcgttagctatgggaaagcctgtcaagaaggacctcgcaatgacgggtgaagtaacattaactggaagaatcctcccaattggcggggtgaaagagaagacgattgcggcaaggagaagtgcgataaagacgctcatatttccggcagcgaataaaagggactttgacgagcttgcttctaatgtgaaggaaggactggaagttcattttgttgacacatacagtgaaatatatgatttggctttccagagtgacgccgggactgagatgatttagctttacattacaggattgagattttttccccttctctagatctggttacaggctaaataccaaagaagtttgtcagcagaggcagaccattgtaaccaagatgagtggagttaattgatatttacgagaaagaaaaataatatttctttttttggccccaatataacatcattgaatctaagagatttatttggctaggctgtacgtaactagtgtgctaggtggtggtattggccttttatattgttgggacttgggagtgtgggaaaaacagtactggtgcaccatctgttatttattttaagtgttttccaaaggcagcaaggtcatatacctcatatcataatttagccacaaatggcctgaatattttgtattttggtcatttttttttcgaaaaaatcacatttagacccctaaaccacttaattctg

SEQ ID NO: 23035 - DNA, 2953 bp, Zea Mays
atggtcgtcccacttggtgtagtccagagagtggctgaagctattttagtgccatcattatatgagaaaaacgggtttagtagggtcattcttaaagcattgaagggccttgctctcttccaccaaagggttatagcgttacctcttccacatcggccactctttcctggattttacatgccgatctatgtaaaggaccaaaagctgttgcaagccctaatagaaaatcgcaaaagatcagctccgtatgctggtgcctttctcgtgaaagatgaagaaggtactgaccctaacattgtgactggttcagattcagagaaaagcattggtgatctcaaagggaaagacttgctgaagcgtcttcatgaagttgggacgcttgctcagattacaagcattcaaggggatcaggtagttctacttggtcacagacgtttacagataactgagatggtcgaagaggatccactcacagttaaagttgatcatctaaaggaaaagccctacaacaaggatgatgatgttataaaagctacctcattcgaagttatatcaactttaagggaagttctaaggacaagttccctttggaaggatcatgtgcaaacctacacacagcacattggtgacttcaactaccaacggctagcagattttggtgctgctatctctggtgccaacaagttgctttgccaggaggtgcttgaggaattagatgtatacaagcgtctgaagttcactcttgagttagtaaaaaaggagatggagattagtaagctacagcaatccatagcaaaagcaattgaagaaaagattagtggagatcagcgacgttatttgttgaatgaacaacttaaggcaatcaagaaggagctcggtttggagactgatgataaaacagcattatctgcaaaatttagggaacgtatagaatcaaagaaggacagatgtccttctcatgttttacaagtcattgaagaagagcttaccaagcttcagcttttagaagccagctctagtgagttcagtgtaactcgtaattatttggactggctgacagtattgccatggggaaattatagtgatgaaaactttgatgtccaccgtgctcagaaaattctcgatgaagaccattatggtttgagtgacgtgaaagagaggatactggaattcatagcagttgggaagttaagagggacttcacaaggcaagatcatatgtctttctgggccaccaggagttgggaaaactagtattggtcgttcaattgcacgtgcactgaaccgccagttctacaggttttctgttggaggtttggctgatgtggctgaaatcaagggccatcggcgcacgtatgttggtgcgatgccagggaagatggtgcagtgtcttaaatcagttggaacagcaaatcctctagtattgatagatgagattgacaagcttgggaagggtcattctggggatccagctagtgcattgttggaactccttgatcctgagcagaatgttaatttcttagatcactaccttgatgttcctattgacctatccaaggttgaagttacagatgctgcccttcttgctcttattgaaaattattgtcgagaagctggagtgaggaaccttcaaaagcatattgagaaaatttaccgtaagattgctctccagcttgttcgccaaggagtatcgaatgagccagaccaggagtctctcggtgtcactgtaaatgaggaatctaatagtggtgatagcatcacagcaaaagatgagattgtgaaggatcctgctgtagaagatgcttcagtcgccaacaatgttacaaatcctgcctctgaggaagctaatgaagtaaatttgacaactgaagcaccaaaagaagacagcacatctaagggcaacaagaaaacagatggagtagcagaagatgcagcagacaaggcaactgagaaggttgtggtagattcatcaaaccttggtgattttgttgggaaacctgtgttccaggctgagcgtatatatgagcagactcctgttggagtggtcatgggtttagcttggactgctatgggtggttctactttgtacatcgaaacaacaaaagtggaggaaagggaagggaaaggtgaccttgtgctgacaggacagcttggagatgtaatgaaagagagtgctcagattgcgcacacagttggcagaactgtattactggagaaagagccagataatcatttttttgcaaactcgaagctatgggaaagcctgtcaagaaggacctcgcaatgacgggtgaagtaacattaactggaagaatcctcccaattggcggggtgaaagagaagacgattgcggcaaggagaagtgcgataaagacgctcatatttccggcagcgaataaaagggactttgacgagcttgcttctaatgtgaaggaaggactggaagttcattttgttgacacatacagtgaaatatatgatttggctttccagagtgacgccgggactgagatgatttagctttacattacaggattgagattttttccccttctctagatctggttacaggctaaataccaaagaagtttgtcagcagaggcagaccattgtaaccaagatgagtggagttaattgatatttacgagaaagaaaaataatatttctttttttggccccaatataacatcattgaatctaagagatttatttggctaggctgtacgtaactagtgtgctaggtggtggtattggccttttatattgttgggacttgggagtgtgggaaaaacagtactggtgcaccatctgttatttattttaagtgttttccaaaggcagcaaggtcatatacctcatatcataatttagccacaaatggcctgaatattttgtattttggtcatttttttttcgaaaaaatcacatttagacccctaaaccacttaattctg

SEQ ID NO: 23036 - DNA, 3121 bp, Zea Mays
atggtcgtcccacttggtgtagtccagagagtggctgaagctattttagtgccatcattatatgagaaaaacgggtttagtagggtcattcttaaagcattgaagggccttgctctcttccaccaaagggttatagcgttacctcttccacatcggccactctttcctggattttacatgccgatctatgtaaaggaccaaaagctgttgcaagccctaatagaaaatcgcaaaagatcagctccgtatgctggtgcctttctcgtgaaagatgaagaaggtactgaccctaacattgtgactggttcagattcagagaaaagcattggtgatctcaaagggaaagacttgctgaagcgtcttcatgaagttgggacgcttgctcagattacaagcattcaaggggatcaggtagttctacttggtcacagacgtttacagataactgagatggtcgaagaggatccactcacagttaaagttgatcatctaaaggaaaagccctacaacaaggatgatgatgttataaaagctacctcattcgaagttatatcaactttaagggaagttctaaggacaagttccctttggaaggatcatgtgcaaacctacacacagcacattggtgacttcaactaccaacggctagcagattttggtgctgctatctctggtgccaacaagttgctttgccaggaggtgcttgaggaattagatgtatacaagcgtctgaagttcactcttgagttagtaaaaaaggagatggagattagtaagctacagcaatccatagcaaaagcaattgaagaaaagattagtggagatcagcgacgttatttgttgaatgaacaacttaaggcaatcaagaaggagctcggtttggagactgatgataaaacagcattatctgcaaaatttagggaacgtatagaatcaaagaaggacagatgtccttctcatgttttacaagtcattgaagaagagcttaccaagcttcagcttttagaagccagctctagtgagttcagtgtaactcgtaattatttggactggctgacagtattgccatggggaaattatagtgatgaaaactttgatgtccaccgtgctcagaaaattctcgatgaagaccattatggtttgagtgacgtgaaagagaggatactggaattcatagcagttgggaagttaagagggacttcacaaggcaagatcatatgtctttctgggccaccaggagttgggaaaactagtattggtcgttcaattgcacgtgcactgaaccgccagttctacaggttttctgttggaggtttggctgatgtggctgaaatcaagggccatcggcgcacgtatgttggtgcgatgccagggaagatggtgcagtgtcttaaatcagttggaacagcaaatcctctagtattgatagatgagattgacaagcttgggaagggtcattctggggatccagctagtgcattgttggaactccttgatcctgagcagaatgttaatttcttagatcactaccttgatgttcctattgacctatccaaggttctattcgtttgcacagcaaatgtaatagagacgataccaaatccgttattggataggatggagatcattgctatagctgggtatataactgatgagaagatgcatattgctcgggactatttagagaagaatacaagacaagcctgtggcattaagcctgaacaggttgaagttacagatgctgcccttcttgctcttattgaaaattattgtcgagaagctggagtgaggaaccttcaaaagcatattgagaaaatttaccgtaagattgctctccagcttgttcgccaaggagtatcgaatgagccagaccaggagtctctcggtgtcactgtaaatgaggaatctaatagtggtgatagcatcacagcaaaagatgagattgtgaaggatcctgctgtagaagatgcttcagtcgccaacaatgttacaaatcctgcctctgaggaagctaatgaagtaaatttgacaactgaagcaccaaaagaagacagcacatctaagggcaacaagaaaacagatggagtagcagaagatgcagcagacaaggcaactgagaaggttgtggtagattcatcaaaccttggtgattttgttgggaaacctgtgttccaggctgagcgtatatatgagcagactcctgttggagtggtcatgggtttagcttggactgctatgggtggttctactttgtacatcgaaacaacaaaagtggaggaaagggaagggaaaggtgaccttgtgctgacaggacagcttggagatgtaatgaaagagagtgctcagattgcgcacacagttggcagaactgtattactggagaaagagccagataatcatttttttgcaaactcgaagctatgggaaagcctgtcaagaaggacctcgcaatgacgggtgaagtaacattaactggaagaatcctcccaattggcggggtgaaagagaagacgattgcggcaaggagaagtgcgataaagacgctcatatttccggcagcgaataaaagggactttgacgagcttgcttctaatgtgaaggaaggactggaagttcattttgttgacacatacagtgaaatatatgatttggctttccagagtgacgccgggactgagatgatttagctttacattacaggattgagattttttccccttctctagatctggttacaggctaaataccaaagaagtttgtcagcagaggcagaccattgtaaccaagatgagtggagttaattgatatttacgagaaagaaaaataatatttctttttttggccccaatataacatcattgaatctaagagatttatttggctaggctgtacgtaactagtgtgctaggtggtggtattggccttttatattgttgggacttgggagtgtgggaaaaacagtactggtgcaccatctgttatttattttaagtgttttccaaaggcagcaaggtcatatacctcatatcataatttagccacaaatggcctgaatattttgtattttggtcatttttttttcgaaaaaatcacatttagacccctaaaccacttaattctg

SEQ ID NO: 23037 - DNA, 3019 bp, Zea Mays
atggtcgtcccacttggtgtagtccagagagtggctgaagctattttagtgccatcattatatgagaaaaacgggtttagtagggtcattcttaaagcattgaagggccttgctctcttccaccaaagggttatagcgttacctcttccacatcggccactctttcctggattttacatgccgatctatgtaaaggaccaaaagctgttgcaagccctaatagaaaatcgcaaaagatcagctccgtatgctggtgcctttctcgtgaaagatgaagaaggtactgaccctaacattgtgactggttcagattcagagaaaagcattggtgatctcaaagggaaagacttgctgaagcgtcttcatgaagttgggacgcttgctcagattacaagcattcaaggggatcaggtagttctacttggtcacagacgtttacagataactgagatggtcgaagaggatccactcacagttaaagttgatcatctaaaggaaaagccctacaacaaggatgatgatgttataaaagctacctcattcgaagttatatcaactttaagggaagttctaaggacaagttccctttggaaggatcatgtgcaaacctacacacagcacattggtgacttcaactaccaacggctagcagattttggtgctgctatctctggtgccaacaagttgctttgccaggaggtgcttgaggaattagatgtatacaagcgtctgaagttcactcttgagttagtaaaaaaggagatggagattagtaagctacagcaatccatagcaaaagcaattgaagaaaagattagtggagatcagcgacgttatttgttgaatgaacaacttaaggcaatcaagaaggagctcggtttggagactgatgataaaacagcattatctgcaaaatttagggaacgtatagaatcaaagaaggacagatgtccttctcatgttttacaagtcattgaagaagagcttaccaagcttcagcttttagaagccagctctagtgagttcagtgtaactcgtaattatttggactggctgacagtattgccatggggaaattatagtgatgaaaactttgatgtccaccgtgctcagaaaattctcgatgaagaccattatggtttgagtgacgtgaaagagaggatactggaattcatagcagttgggaagttaagagggacttcacaaggcaagatcatatgtctttctgggccaccaggagttgggaaaactagtattggtcgttcaattgcacgtgcactgaaccgccagttctacaggttttctgttggaggtttggctgatgtggctgaaatcaagggccatcggcgcacgtatgttggtgcgatgccagggaagatggtgcagtgtcttaaatcagttggaacagcaaatcctctagtattgatagatgagattgacaagcttgggaagggtcattctggggatccagctagtgcattgttggaactccttgatcctgagcagaatgttaatttcttagatcactaccttgatgttcctattgacctatccaaggttctattcgtttgcacagcaaatgtaatagagacgataccaaatccgttattggataggatggagatcattgctatagctgggtatataactgatgagaagatgcatattgctcgggactatttagagaagaatacaagacaagcctgtggcattaagcctgaacagattgctctccagcttgttcgccaaggagtatcgaatgagccagaccaggagtctctcggtgtcactgtaaatgaggaatctaatagtggtgatagcatcacagcaaaagatgagattgtgaaggatcctgctgtagaagatgcttcagtcgccaacaatgttacaaatcctgcctctgaggaagctaatgaagtaaatttgacaactgaagcaccaaaagaagacagcacatctaagggcaacaagaaaacagatggagtagcagaagatgcagcagacaaggcaactgagaaggttgtggtagattcatcaaaccttggtgattttgttgggaaacctgtgttccaggctgagcgtatatatgagcagactcctgttggagtggtcatgggtttagcttggactgctatgggtggttctactttgtacatcgaaacaacaaaagtggaggaaagggaagggaaaggtgaccttgtgctgacaggacagcttggagatgtaatgaaagagagtgctcagattgcgcacacagttggcagaactgtattactggagaaagagccagataatcatttttttgcaaactcgaagctatgggaaagcctgtcaagaaggacctcgcaatgacgggtgaagtaacattaactggaagaatcctcccaattggcggggtgaaagagaagacgattgcggcaaggagaagtgcgataaagacgctcatatttccggcagcgaataaaagggactttgacgagcttgcttctaatgtgaaggaaggactggaagttcattttgttgacacatacagtgaaatatatgatttggctttccagagtgacgccgggactgagatgatttagctttacattacaggattgagattttttccccttctctagatctggttacaggctaaataccaaagaagtttgtcagcagaggcagaccattgtaaccaagatgagtggagttaattgatatttacgagaaagaaaaataatatttctttttttggccccaatataacatcattgaatctaagagatttatttggctaggctgtacgtaactagtgtgctaggtggtggtattggccttttatattgttgggacttgggagtgtgggaaaaacagtactggtgcaccatctgttatttattttaagtgttttccaaaggcagcaaggtcatatacctcatatcataatttagccacaaatggcctgaatattttgtattttggtcatttttttttcgaaaaaatcacatttagacccctaaaccacttaattctg

SEQ ID NO: 23038 - DNA, 1949 bp, Zea Mays
ctattggctgctctaggatggcccatggccatgtggcaagatcatatgtctttctgggccaccaggagttgggaaaactagtattggtcgttcaattgcacgtgcactgaaccgccagttctacaggttttctgttggaggtttggctgatgtggctgaaatcaagggccatcggcgcacgtatgttggtgcgatgccagggaagatggtgcagtgtcttaaatcagttggaacagcaaatcctctagtattgatagatgagattgacaagcttgggaagggtcattctggggatccagctagtgcattgttggaactccttgatcctgagcagaatgttaatttcttagatcactaccttgatgttcctattgacctatccaaggttctattcgtttgcacagcaaatgtaatagagacgataccaaatccgttattggataggatggagatcattgctatagctgggtatataactgatgagaagatgcatattgctcgggactatttagagaagaatacaagacaagcctgtggcattaagcctgaacaggttgaagttacagatgctgcccttcttgctcttattgaaaattattgtcgagaagctggagtgaggaaccttcaaaagcatattgagaaaatttaccgtaagattgctctccagcttgttcgccaaggagtatcgaatgagccagaccaggagtctctcggtgtcactgtaaatgaggaatctaatagtggtgatagcatcacagcaaaagatgagattgtgaaggatcctgctgtagaagatgcttcagtcgccaacaatgttacaaatcctgcctctgaggaagctaatgaagtaaatttgacaactgaagcaccaaaagaagacagcacatctaagggcaacaagaaaacagatggagtagcagaagatgcagcagacaaggcaactgagaaggttgtggtagattcatcaaaccttggtgattttgttgggaaacctgtgttccaggctgagcgtatatatgagcagactcctgttggagtggtcatgggtttagcttggactgctatgggtggttctactttgtacatcgaaacaacaaaagtggaggaaagggaagggaaaggtgaccttgtgctgacaggacagcttggagatgtaatgaaagagagtgctcagattgcgcacacagttggcagaactgtattactggagaaagagccagataatcatttttttgcaaactcgaagctatgggaaagcctgtcaagaaggacctcgcaatgacgggtgaagtaacattaactggaagaatcctcccaattggcggggtgaaagagaagacgattgcggcaaggagaagtgcgataaagacgctcatatttccggcagcgaataaaagggactttgacgagcttgcttctaatgtgaaggaaggactggaagttcattttgttgacacatacagtgaaatatatgatttggctttccagagtgacgccgggactgagatgatttagctttacattacaggattgagattttttccccttctctagatctggttacaggctaaataccaaagaagtttgtcagcagaggcagaccattgtaaccaagatgagtggagttaattgatatttacgagaaagaaaaataatatttctttttttggccccaatataacatcattgaatctaagagatttatttggctaggctgtacgtaactagtgtgctaggtggtggtattggccttttatattgttgggacttgggagtgtgggaaaaacagtactggtgcaccatctgttatttattttaagtgttttccaaaggcagcaaggtcatatacctcatatcataatttagccacaaatggcctgaatattttgtattttggtcatttttttttcgaaaaaatcacatttagacccctaaaccacttaattctg

SEQ ID NO: 23039 - DNA, 1445 bp, Zea Mays
attcatcattgttccagcatctacatatctgaagataaaaggcacaaaggttgaagttacagatgctgcccttcttgctcttattgaaaattattgtcgagaagctggagtgaggaaccttcaaaagcatattgagaaaatttaccgtaagattgctctccagcttgttcgccaaggagtatcgaatgagccagaccaggagtctctcggtgtcactgtaaatgaggaatctaatagtggtgatagcatcacagcaaaagatgagattgtgaaggatcctgctgtagaagatgcttcagtcgccaacaatgttacaaatcctgcctctgaggaagctaatgaagtaaatttgacaactgaagcaccaaaagaagacagcacatctaagggcaacaagaaaacagatggagtagcagaagatgcagcagacaaggcaactgagaaggttgtggtagattcatcaaaccttggtgattttgttgggaaacctgtgttccaggctgagcgtatatatgagcagactcctgttggagtggtcatgggtttagcttggactgctatgggtggttctactttgtacatcgaaacaacaaaagtggaggaaagggaagggaaaggtgaccttgtgctgacaggacagcttggagatgtaatgaaagagagtgctcagattgcgcacacagttggcagaactgtattactggagaaagagccagataatcatttttttgcaaactcgaagctatgggaaagcctgtcaagaaggacctcgcaatgacgggtgaagtaacattaactggaagaatcctcccaattggcggggtgaaagagaagacgattgcggcaaggagaagtgcgataaagacgctcatatttccggcagcgaataaaagggactttgacgagcttgcttctaatgtgaaggaaggactggaagttcattttgttgacacatacagtgaaatatatgatttggctttccagagtgacgccgggactgagatgatttagctttacattacaggattgagattttttccccttctctagatctggttacaggctaaataccaaagaagtttgtcagcagaggcagaccattgtaaccaagatgagtggagttaattgatatttacgagaaagaaaaataatatttctttttttggccccaatataacatcattgaatctaagagatttatttggctaggctgtacgtaactagtgtgctaggtggtggtattggccttttatattgttgggacttgggagtgtgggaaaaacagtactggtgcaccatctgttatttattttaagtgttttccaaaggcagcaaggtcatatacctcatatcataatttagccacaaatggcctgaatattttgtattttggtcatttttttttcgaaaaaatcacatttagacccctaaaccacttaattctg

SEQ ID NO: 23040 - DNA, 1339 bp, Zea Mays
ggatgattgttgataatggttaagcaacctcaaggcatttgtatgattgctctccagcttgttcgccaaggagtatcgaatgagccagaccaggagtctctcggtgtcactgtaaatgaggaatctaatagtggtgatagcatcacagcaaaagatgagattgtgaaggatcctgctgtagaagatgcttcagtcgccaacaatgttacaaatcctgcctctgaggaagctaatgaagtaaatttgacaactgaagcaccaaaagaagacagcacatctaagggcaacaagaaaacagatggagtagcagaagatgcagcagacaaggcaactgagaaggttgtggtagattcatcaaaccttggtgattttgttgggaaacctgtgttccaggctgagcgtatatatgagcagactcctgttggagtggtcatgggtttagcttggactgctatgggtggttctactttgtacatcgaaacaacaaaagtggaggaaagggaagggaaaggtgaccttgtgctgacaggacagcttggagatgtaatgaaagagagtgctcagattgcgcacacagttggcagaactgtattactggagaaagagccagataatcatttttttgcaaactcgaagctatgggaaagcctgtcaagaaggacctcgcaatgacgggtgaagtaacattaactggaagaatcctcccaattggcggggtgaaagagaagacgattgcggcaaggagaagtgcgataaagacgctcatatttccggcagcgaataaaagggactttgacgagcttgcttctaatgtgaaggaaggactggaagttcattttgttgacacatacagtgaaatatatgatttggctttccagagtgacgccgggactgagatgatttagctttacattacaggattgagattttttccccttctctagatctggttacaggctaaataccaaagaagtttgtcagcagaggcagaccattgtaaccaagatgagtggagttaattgatatttacgagaaagaaaaataatatttctttttttggccccaatataacatcattgaatctaagagatttatttggctaggctgtacgtaactagtgtgctaggtggtggtattggccttttatattgttgggacttgggagtgtgggaaaaacagtactggtgcaccatctgttatttattttaagtgttttccaaaggcagcaaggtcatatacctcatatcataatttagccacaaatggcctgaatattttgtattttggtcatttttttttcgaaaaaatcacatttagacccctaaaccacttaattctg

SEQ ID NO: 23041 - DNA, 1177 bp, Zea Mays
ctttgctctgctcgggtcagttaattaactaccatgcggtagctaaggaaggggctccattgcttgccgtctcctgccacgaatggtctggtcgctgtcttcttctgaggacctaacccaagacggtaggtaagtgccagcttaaagtctatctaaaggcggaccaccactgtccacctgggcggcgatggcgaccgccgcgagggagaggcgcctgccgccggcgctgcccctggcgactctcatcggccgggagctccgcgcggggggctccgagcgcccggccctgcgctacggccacgccggctttgccaagcgtggcgaggactacttcctcgtcaagcccgactgcctccgcgtccccggggaccccgcatccgcgttctccgtctttgccgtgttcgacggccacaacggcgtgtcggcggcggtctacagcaaggagcatctgctcgagcacgtcatgagcgcgctgtcgccggacatcggccgcgaagactggctgcaggcgctgccgcgcgcgctcgtcgccggcttcgtcaaggccgacatcgatttccagcgcaaggggcggcgagttgcagctgctaaccgtggaccaccgcctggaggagaatgcagaggagcgggagcgcgtcacggccagcggtggggaagtaggccggctcaatctctttggcggccaggaggtcggccctctccggtgctggcctggtggcttgtgcctctcaagatccatcggggacatggatgttggagagttcattgtgcccattccacatgtcaagcaagtcaagctatcaaacaccggaggaagactgataatagcatctgatggcatatgggacgcgttgtccaatgaagcagctgcaaaagcatgcagaggattgcctgcagaactggcagcgaagcttgtcgttaagcaagctctgaaaacaagcgggctaaaggatgacaccacctgtgtcgtagttgacattatcccgtccgatcatctgacatcgccacaattgtctccaaagaaaaatcagaacaagttgaagtcactttttcgtagaaggtcgcatagttcagttagaaagcttggaggcaagtctgcctccattggttccgtggaggagttatttgaagaagggtctgcaatgctagaagaaagacaagtttgttcataaactag

SEQ ID NO: 23042 - DNA, 4410 bp, Zea Mays
ctggtcgctgtcttcttctgaggacctaacccaagacggtaggtaagtgccagcttaaagtctatctaaaggcggaccaccactgtccacctgggcggcgatggcgaccgccgcgagggagaggcgcctgccgccggcgctgcccctggcgactctcatcggccgggagctccgcgcggggggctccgagcgcccggccctgcgctacggccacgccggctttgccaagcgtggcgaggactacttcctcgtcaagcccgactgcctccgcgtccccggggaccccgcatccgcgttctccgtctttgccgtgttcgacggccacaacggcgtgtcggcggcggtctacagcaaggagcatctgctcgagcacgtcatgagcgcgctgtcgccggacatcggccgcgaagactggctgcaggcgctgccgcgcgcgctcgtcgccggcttcgtcaaggccgacatcgatttccagcgcaagggggaggtgtccggaaccacggcgacactggtggtcatcgatgggttcacggtcacggtggcgtcggtgggtgactcgcgctgcatcctggacacgcagggcggcgagttgcagctgctaaccgtggaccaccgcctggaggagaatgcagaggagcgggagcgcgtcacggccagcggtggggaagtaggccggctcaatctctttggcggccaggaggtcggccctctccggtgctggcctggtggcttgtgcctctcaagatccatcggggacatggatgttggagagttcattgtgcccattccacatgtcaagcaagtcaagctatcaaacaccggaggaagactgataatagcatctgatggcatatgggacgcgttgtccaatgaagcagctgcaaaagcatgcagaggattgcctgcagaactggcagcgaagcttgtcgttaagcaagctctgaaaacaagcgggctaaaggatgacaccacctgtgtcgtagttgacattatcccgtccgatcatctgacatcgccacaattgtctccaaagaaaaatcagaacaagttgaagtcactttttcgtagaaggtcgcatagttcagttagaaagcttggaggcaagtctgcctccattggttccgtggaggagttatttgaagaagggtctgcaatgctagaagaaagcttattttcagcttcttcacaaatttaagcagaagttctgccaaacagccagcttctacagcagcttattagttcagctgcttctcagaatacactaaaagcagccaacaagcagaagctgcctttcaccagcttctcagataagctgctttttcaacaagcagcagttgtgccaaacagggccttttatgtaacatataatgtgtgggatggttgggtaggaatctgtccttgaaagcagcttcaccacctttccgctgtgcaatctgccaagtggaccaagagcccttccaagatttgatggcagataatggaggtggttactgctcttcccagtacgctccatggggtggcccatgtctctgtttggactgtcggaaaaagaaagatgcaatggaaggaaaaagatgtagccgctctacagcatgcaggtgaaacaatcaaaatgctgagaaaaaggagcaacgagagacactaaggacgtgtttggtttgcgaattcagttgatccggcatgagctgctcctgcatgaggtcgtccgatgtttttctgggagtgaaccggtgctgcataattgcacttctaacgagcactacatggagtatctgatgtcggacgacacagatctatgatgtaaaccaaacaaatatattaggttcggatataggatcggatgattccggagaccgttgtccggcaaaccaaacacgttgtaaattaaatcgctggatccaagagtatgctgaaactaactgtattgacgaccaaggtttgatgttgttgagctcaaataacttgagcttgtagttttgatgtgccctgtagtgtgccttgtgatggtttttgtgggaataggaaacatgtaaaatactccttgtgttattgctgaattagagctgttgatttttttaataaaaaaaattacatagatgaatagctatgatgagcaaaaatcgcaaatgttattattacagcagcaataacatgaaagcggaaacaagcaaacacagctgcatagggacgacgacactggtcccctggctcggaatcctcaatggcatggcgcactcgtcgccgttgaagaagaccttggacgggaagccgtccccggcgatgatgtcgatgccgggggtcttcttcttggtgaaggagaagacggactgctgcttcccgggcaccgggtaatctacgccgctcatgttcctctccccgagcaggaagttgaggccctgggcgcccctgacgaagatggtgctgttcccgacgcccgtggcgttgaaggagtaggcctgttcgaagccgtcgtacgccttgtccatgacgatggccgtgaaccagtccggcatgtccgtgccgtcccagttgaagagcgtgaggcgcgcgctccatcctccggtgaagtcggtggcgacgtgccagttgacgctgacgccgcagaagtcgccgcagggcatgggtttgggcacgccgaggtgcttctggtccgcccactcgagcgcctcgctggcccgccggtcgaacggcatgagcagcgcctgcggcggcagcagcatcgccggcgccgtggtgctgcaggtcggcgcggacgaggggcagccgcacgcgcacgtccggcaggggaccaccgactcgttgtagaaggaggagaaggagacgcagcacctgggcggcttcttgggcgacgtggtgatgttgcacaccacctgccacgtcgccacggccaccgtgatcgacgtgagcccgctggggtccgggtactccgacgggctcaccgagatgggtgggtcgcacgcgtactccgggttcagcgcggacgcggcgccggtgacgttgaaccctgtgggcgggtagagcttggtccggttgaggtcgggcggcatcttgtacaccaccatctggaacgccgacttggagcgcgcgacatccatggacttgggcaggatggtgccgttccggcagcagtggtcgatccggccgatctccgtgtcgttggcccgcgacggcggcaggtcgtggacgacgggcctgcggtcgcagttgagcaccgccttggagaagtcgaggtccttgtagtactggccctggggaccgtagaggcattcggccgtgtccacctcccgcgggtaggcgcctcgcatggagctgatgaactccccgtgctcccacctccacgacagctgccaggcgtcgaggcggccgagcagcgcgtcgttctccagcgtgacgagcgctaggtaggtggtgtcgtacgactggagcacgtcgtaggtgatgaccaggtcgccggtgcggcgcgggaggaagccactctccaccaggccgccggtggggtccccacccgccgtgaacacgcagcaggtggtgaggttcgtcggcgacgacgtggcgttggtggccggcgggcaggtgtaggaagggtcggcgagcgagagaaacgaggggagcgggacgtagggctccggcccggcgaagagcgtgcctacgaggctgaccgtggcctgtgtcttggcggggtccccggccgtggcgatcggggtgaggaggtccgtctgcgggtacccggtgaaggacgtgggcgtgggcctgccggcggcgtcccccgccgtggtgttgtagggcagggcggcgcccgaggtgagcacggccccgtcgacggagacgaggatctcgccgtgcacgaaggtgagcagcagcgcccaggagcgtagcgggcgggtgccggcgttgacgacggtggcgctggcgctgaaggagtagggctgggagttgggcgccgccacgtgaggcctgatcttgtcccggcgctgcagcgtgtaggtgaggaggatcccgttgcagccggcgtcgggctgtgccgaggcggtgtgcgcgaggagcacaaggaagatgaagggcatggcggccatgcggacgacgacgggcagcatggccatggctgaagcaggcacagaagctgaatctgtttccgtataaacgaataagccggtggtggtgagtggatcgagtctgggtcgtcggaggatgagaggccgtttccgtccaagcgcacacacgcacgatgacacgaagacgaagacgaggacgaagctgaagctgaagcgcgtgcgtgggtgacgacgagtatgtagggacagggagtctccgttgatcttgtccaaaacagagaaagagaaagaaatggtaaaagaggccggcccggcgatatgaaagatagtgcttggcgtcagcaagtgcaggaaccat

SEQ ID NO: 23043 - DNA, 4282 bp, Zea Mays
cttcttctgaggacctaacccaagacggtaggtaagtgccagcttaaagtctatctaaaggcggaccaccactgtccacctgggcggcgatggcgaccgccgcgagggagaggcgcctgccgccggcgctgcccctggcgactctcatcggccgggagctccgcgcggggggctccgagcgcccggccctgcgctacggccacgccggctttgccaagcgtggcgaggactacttcctcgtcaagcccgactgcctccgcgtccccggggaccccgcatccgcgttctccgtctttgccgtgttcgacggccacaacggcgtgtcggcggcggtctacagcaaggagcatctgctcgagcacgtcatgagcgcgctgtcgccggacatcggccgcgaagactggctgcaggcgctgccgcgcgcgctcgtcgccggcttcgtcaaggccgacatcgatttccagcgcaagggtgagtgccatgctactgcccagtaccgtttgcagtcgagattggaggtcaacgtagttatcgtccctgtctctgtctgtgtgtgtgcctattaaggggaggtgtccggaaccacggcgacactggtggtcatcgatgggttcacggtcacggtggcgtcggtgggtgactcgcgctgcatcctggacacgcagggcggcgagttgcagctgctaaccgtggaccaccgcctggaggagaatgcagaggagcgggagcgcgtcacggccagcggtggggaagtaggccggctcaatctctttggcggccaggaggtcggccctctccggtgctggcctggtggcttgtgcctctcaagatccatcggggacatggatgttggagagttcattgtgcccattccacatgtcaagcaagtcaagctatcaaacaccggaggaagactgataatagcatctgatggcatatgggacgcgttgtccaatgaagcagctgcaaaagcatgcagaggattgcctgcagaactggcagcgaagcttgtcgttaagaagctctgaaaacaagcgggctaaaggatgacaccacctgtgtcgtagttgacattatcccgtccgatcatctgacatcgccacaattgtctccaaagaaaaatcagaacaagttgaagtcactttttcgtagaaggtcgcatagttcagttagaaagcttggaggcaagtctgcctccattggttccgtggaggagttatttgaagaagggtctgcaatgctagaagaaaggttgggtaggaatctgtccttgaaagcagcttcaccacctttccgctgtgcaatctgccaagtggaccaagagcccttccaagatttgatggcagataatggaggtggttactgctcttcccagtacgctccatggggtggcccatgtctctgtttggactgtcggaaaaagaaagatgcaatggaaggaaaaagatgtagccgctctacagcatgcaggtgaaacaatcaaaatgctgagaaaaaggagcaacgagagacactaaggacgtgtttggtttgcgaattcagttgatccggcatgagctgctcctgcatgaggtcgtccgatgtttttctgggagtgaaccggtgctgcataattgcacttctaacgagcactacatggagtatctgatgtcggacgacacagatctatgatgtaaaccaaacaaatatattaggttcggatataggatcggatgattccggagaccgttgtccggcaaaccaaacacgttgtaaattaaatcgctggatccaagagtatgctgaaactaactgtattgacgaccaaggtttgatgttgttgagctcaaataacttgagcttgtagttttgatgtgccctgtagtgtgccttgtgatggtttttgtgggaataggaaacatgtaaaatactccttgtgttattgctgaattagagctgttgatttttttaataaaaaaaattacatagatgaatagctatgatgagcaaaaatcgcaaatgttattattacagcagcaataacatgaaagcggaaacaagcaaacacagctgcatagggacgacgacactggtcccctggctcggaatcctcaatggcatggcgcactcgtcgccgttgaagaagaccttggacgggaagccgtccccggcgatgatgtcgatgccgggggtcttcttcttggtgaaggagaagacggactgctgcttcccgggcaccgggtaatctacgccgctcatgttcctctccccgagcaggaagttgaggccctgggcgcccctgacgaagatggtgctgttcccgacgcccgtggcgttgaaggagtaggcctgttcgaagccgtcgtacgccttgtccatgacgatggccgtgaaccagtccggcatgtccgtgccgtcccagttgaagagcgtgaggcgcgcgctccatcctccggtgaagtcggtggcgacgtgccagttgacgctgacgccgcagaagtcgccgcagggcatgggtttgggcacgccgaggtgcttctggtccgcccactcgagcgcctcgctggcccgccggtcgaacggcatgagcagcgcctgcggcggcagcagcatcgccggcgccgtggtgctgcaggtcggcgcggacgaggggcagccgcacgcgcacgtccggcaggggaccaccgactcgttgtagaaggaggagaaggagacgcagcacctgggcggcttcttgggcgacgtggtgatgttgcacaccacctgccacgtcgccacggccaccgtgatcgacgtgagcccgctggggtccgggtactccgacgggctcaccgagatgggtgggtcgcacgcgtactccgggttcagcgcggacgcggcgccggtgacgttgaaccctgtgggcgggtagagcttggtccggttgaggtcgggcggcatcttgtacaccaccatctggaacgccgacttggagcgcgcgacatccatggacttgggcaggatggtgccgttccggcagcagtggtcgatccggccgatctccgtgtcgttggcccgcgacggcggcaggtcgtggacgacgggcctgcggtcgcagttgagcaccgccttggagaagtcgaggtccttgtagtactggccctggggaccgtagaggcattcggccgtgtccacctcccgcgggtaggcgcctcgcatggagctgatgaactccccgtgctcccacctccacgacagctgccaggcgtcgaggcggccgagcagcgcgtcgttctccagcgtgacgagcgctaggtaggtggtgtcgtacgactggagcacgtcgtaggtgatgaccaggtcgccggtgcggcgcgggaggaagccactctccaccaggccgccggtggggtccccacccgccgtgaacacgcagcaggtggtgaggttcgtcggcgacgacgtggcgttggtggccggcgggcaggtgtaggaagggtcggcgagcgagagaaacgaggggagcgggacgtagggctccggcccggcgaagagcgtgcctacgaggctgaccgtggcctgtgtcttggcggggtccccggccgtggcgatcggggtgaggaggtccgtctgcgggtacccggtgaaggacgtgggcgtgggcctgccggcggcgtcccccgccgtggtgttgtagggcagggcggcgcccgaggtgagcacggccccgtcgacggagacgaggatctcgccgtgcacgaaggtgagcagcagcgcccaggagcgtagcgggcgggtgccggcgttgacgacggtggcgctggcgctgaaggagtagggctgggagttgggcgccgccacgtgaggcctgatcttgtcccggcgctgcagcgtgtaggtgaggaggatcccgttgcagccggcgtcgggctgtgccgaggcggtgtgcgcgaggagcacaaggaagatgaagggcatggcggccatgcggacgacgacgggcagcatggccatggctgaagcaggcacagaagctgaatctgtttccgtataaacgaataagccggtggtggtgagtggatcgagtctgggtcgtcggaggatgagaggccgtttccgtccaagcgcacacacgcacgatgacacgaagacgaagacgaggacgaagctgaagctgaagcgcgtgcgtgggtgacgacgagtatgtagggacagggagtctccgttgatcttgtccaaaacagagaaagagaaagaaatggtaaaagaggccggcccggcgatatgaaagatagtgcttggcgtcagcaagtgcaggaaccat

SEQ ID NO: 23044 - DNA, 4027 bp, Zea Mays
cgacgagccggcgccggccgcttcctccgctacaaaaagggatatgggcctgggcgttgccacgccttccgcacttcacatcgctctcccgctttcccactcccgcgtcggctcccagcaccagctactcctccacggtgcacggccgcatcagcacgatcgctgcctagcctgcctgcctgccctgctcccccaccatgctgctctcgcgtccccaaaccctgcccctgccccgggcccggctctcttccccgacccttcgccacctccgcgccctcgccgcgccgctccgcgcgctcgtctcgtccccgccactagggttcacgtccgcggcgcgaggccccgctccgctccgcgcggcggtgtccgagtccgatcgcgagcagcgggaggctggggtggaggcgggggagcaggggaggccgctccgcgtcggcctcgtctgcggcgggccctccggcgagaggggcgtctccctcaactccgcgcgctcggtgctggatcacatccagggagaggatttggtcgtctgctgctactacattgactgtgctatgaaggccttcgcgatatctcctgcgcagctatattccaacacaccttcggattttgacttcaaacttgaaagtttagcccaagaatttgattccctatctgacttcgcggagcatctcgccacaaatgttgacattgtcttcccagtgatccatgggaaatttggtgaagatggaggcattcaggagcttttggagaaagcaaatgttccatttgttgggacaccctctaaggaatgccagcgtgcttttgacaagcataatgcgtcgctcgagctcaacgcacaaggtttcttaacagtgcccaactttcttgtggagaaggacaagttggctaagccggagttagaggcatggttccaaaccgtcaatctgaacaaagaaaatggcaaaacgattgtcaaacctacaagggctgggtcaagcattggcgtagttgttgcttatggtgtgaatgatgctgcccagaaagctgaggaaattatttcagagggaattgatgataaagttatcatagaggttttcattgaagggggcactgagtttacagccatcgtggttgatgttgggattgctaacaacagtgagcctgttgttctgcttccaacagaagttgagcttcagtactccaacaatagtgataccaaggaggacacaatatttaactaccgcaagaagtaccttccaagtcgacaggttgcttatcattctcctccacgttttccggcagaggtgatcgattgtataagacaaggaatttctcttttattttgtcgccttggcctgcatgactatgcaaggatagatggttggtttttaccttctcctgttgcttctttacccccagctgaaaatagtgacaaatttggaaataccaagtatggaagtgttcttttcacggatatcaatttgataagtgggatggagcaaaccagctttttgttccaacaagcttcagcggttgggttctcacactctcgaatccttcgtacagttgttcagcatgcttgctcgcgattcccttctcttcttccatgcaataatgcttggaccgctttgtccagaaaactacaaccatcaaaacaagtagaagcaatccacaaaggaacatcaagacagaaggtttttgtgatcttcggaggggacacttcagaacggcaagtatcacttatgagtggtaccaatgtatggcttaatcttcaaggttttgatgatcttgacgtgacaccgtgtttgcttgcacctgcacatggatatttctcctcacatgatcaagatttcagtgacagttcaagagaagtttggacgttgccatattcattagtgttacgacataccactgaagaagttcatgctgcatgtgttgaggcaactgagccagaacgagttgaaataacaaaacgtttgcgtgatcaagtaatgaatgaacttgggtcagcattgagcaaacatgattggtttgcgggctttgacatagcttatgaacaacctatcaaatactctctgcaacagtggatcgaccatgtaaaagaaactgaagctgtagtctttatagcagtgcatggtggcattggcgaggatggtaccattcagacattgttggaatctgcaggagttccttacacaggaccaggaccaatagcgtctagaacatgcattgacaaagttgcaagttcacttgctgttgaccatcttgctagttatggaatccgtatcattccaaaggatgtaagagcaacagaagaagtactgaactcatctcttgttgatatctggaatgaacttaaagcaaaactagaaacagaaacagtatgtgtgaaaccagctcgtgacgggtgctcgactggtgtagcaagattgtgctgtccaaaggacctagaagtctatacaaatgcattgaggaggaagtttcagcatctgcctgctaattgcctgtccagggcacatggtgtaattgagatgccagtcccttctccagagtcactaatatttgagccttttattgaaaccgatgaaattatcattgcaaataaattagaggatggtagtgcccgccatcttgtatggaaaggtgaaaatgactggcttgaaataaccgttggtgtagttggcaaacgtggagaaatgcactcattaaatccaagtatcacagtgaaagaaagtggtgatattttatctcttgaggagaaatttcaaggtggcactggaatcaacttgacaccacctcctgcaacaattatgggcgaggatgctctgcagaggtgcaagaagagtatcgagaccatggcaaacgctctaggtttggaaggcttctcacgcattgatgcatttgtcaacgtgcgaagcggggaggtgctgctgattgaagtcaacactgtacctgggatgactccatccaccgtgctgatccaccaagcactcgcagaggaaccgcccgtgtacccccacaggtttttccgcactcttctggatttggtgtttgcaagggcaaaatagctatctcacatttatttttctttttacgcgttgcgcggtcgtcgtgcacatcagagcagagcagaagcaaccctccacggacgtcaagtcaaaccaacacgtccgggccacaatatggaaagctagctatacaagtatcgtggaatataaactctcaaacttaccaagttttcatcacatcattaatatagaggtttagttctcgacattgaaatcagcagtaaaaggattgggtggactgaatgatgcagcagcttatcatcagtgtgtaccacatcaaatctgtcattgagttcttgactcttagggcatctatagcctacataaataaccagtagcatgttcggttgcaaagtgtttgaaaattgaatagaaagatatttaatcttcttcaatcccctatgatccatgcgtaacctgacaaggcctatgtagtatctaaggagataaatgtaaaaaaacacaagatatatgttgatgatggaacgcatgtagcacagtttactagtctaagatgcggtttcactcaaacaacctatataaatgaaccgtgtcacgagggattctagtgaataagatacaaacctctgatacatttggttttataaacgagtttgaataagatacaaacctctgatacatttggttttataaacgagtttcttagatgtacctagtgcttggagaactataacatattatctacgatatacataccctaacaataacacccatcacttcactatcaatacgcctttaaagcatgaatttcttcgtgtgtcgcggccgcacgccccagagtcgtttaaatcgcggaataagcaaatacggtgcatgggcagggattctaacttggctccctcagctcgaagcatccgacttctaccactgcaacacacattcgtttgtgttatgtataagagcgatgttgtaaatatgtatatattaataatcagtaaataaaaaattacaattat

SEQ ID NO: 23045 - DNA, 3762 bp, Zea Mays
cacatcgctctcccgctttcccactcccgcgtcggctcccagcaccagctactcctccacggtgcacggccgcatcagcacgatcgctgcctagcctgcctgcctgccctgctcccccaccatgctgctctcgcgtccccaaaccctgcccctgccccgggcccggctctcttccccgacccttcgccacctccgcgccctcgccgcgccgctccgcgcgctcgtctcgtccccgccactagggttcacgtccgcggcgcgaggccccgctccgctccgcgcggcggtgtccgagtccgatcgcgagcagcgggaggctggggtggaggcgggggagcaggggaggccgctccgcgtcggcctcgtctgcggcgggccctccggcgagaggggcgtctccctcaactccgcgcgctcggtgctggatcacatccagggagaggatttggtcgtctgctgctactacattgactgtgctatgaaggccttcgcgatatctcctgcgcagctatattccaacacaccttcggattttgacttcaaacttgaaagtttagcccaagaatttgattccctatctgacttcgcggagcatctcgccacaaatgttgacattgtcttcccagtgatccatgggaaatttggtgaagatggaggcattcaggagcttttggagaaagcaaatgttccatttgttgggacaccctctaaggaatgccagcgtgcttttgacaagcataatgcgtcgctcgagctcaacgcacaaggtttcttaacagtgcccaactttcttgtggagaaggacaagttggctaagccggagttagaggcatggttccaaaccgtcaatctgaacaaagaaaatggcaaaacgattgtcaaacctacaagggctgggtcaagcattggcgtagttgttgcttatggtgtgaatgatgctgcccagaaagctgaggaaattatttcagagggaattgatgataaagttatcatagaggttttcattgaagggggcactgagtttacagccatcgtggttgatgttgggattgctaacaacagtgagcctgttgttctgcttccaacagaagttgagcttcagtactccaacaatagtgataccaaggaggacacaatatttaactaccgcaagaagtaccttccaagtcgacaggttgcttatcattctcctccacgttttccggcagagctgaaaatagtgacaaatttggaaataccaagtatggaagtgttcttttcacggatatcaatttgataagtgggatggagcaaaccagctttttgttccaacaagcttcagcggttgggttctcacactctcgaatccttcgtacagttgttcagcatgcttgctcgcgattcccttctcttcttccatgcaataatgcttggaccgctttgtccagaaaactacaaccatcaaaacaagtagaagcaatccacaaaggaacatcaagacagaaggtttttgtgatcttcggaggggacacttcagaacggcaagtatcacttatgagtggtaccaatgtatggcttaatcttcaaggttttgatgatcttgacgtgacaccgtgtttgcttgcacctgcacatggatatttctcctcacatgatcaagatttcagtgacagttcaagagaagtttggacgttgccatattcattagtgttacgacataccactgaagaagttcatgctgcatgtgttgaggcaactgagccagaacgagttgaaataacaaaacgtttgcgtgatcaagtaatgaatgaacttgggtcagcattgagcaaacatgattggtttgcgggctttgacatagcttatgaacaacctatcaaatactctctgcaacagtggatcgaccatgtaaaagaaactgaagctgtagtctttatagcagtgcatggtggcattggcgaggatggtaccattcagacattgttggaatctgcaggagttccttacacaggaccaggaccaatagcgtctagaacatgcattgacaaagttgcaagttcacttgctgttgaccatcttgctagttatggaatccgtatcattccaaaggatgtaagagcaacagaagaagtactgaactcatctcttgttgatatctggaatgaacttaaagcaaaactagaaacagaaacagtatgtgtgaaaccagctcgtgacgggtgctcgactggtgtagcaagattgtgctgtccaaaggacctagaagtctatacaaatgcattgaggaggaagtttcagcatctgcctgctaattgcctgtccagggcacatggtgtaattgagatgccagtcccttctccagagtcactaatatttgagccttttattgaaaccgatgaaattatcattgcaaataaattagaggatggtagtgcccgccatcttgtatggaaaggtgaaaatgactggcttgaaataaccgttggtgtagttggcaaacgtggagaaatgcactcattaaatccaagtatcacagtgaaagaaagtggtgatattttatctcttgaggagaaatttcaaggtggcactggaatcaacttgacaccacctcctgcaacaattatgggcgaggatgctctgcagaggtgcaagaagagtatcgagaccatggcaaacgctctaggtttggaaggcttctcacgcattgatgcatttgtcaacgtgcgaagcggggaggtgctgctgattgaagtcaacactgtacctgggatgactccatccaccgtgctgatccaccaagcactcgcagaggaaccgcccgtgtacccccacagcgttgcgcggtcgtcgtgcacatcagagcagagcagaagcaaccctccacggacgtcaagtcaaaccaacacgtccgggccacaatatggaaagctagctatacaagtatcgtggaatataaactctcaaacttaccaagttttcatcacatcattaatatagaggtttagttctcgacattgaaatcagcagtaaaaggattgggtggactgaatgatgcagcagcttatcatcagtgtgtaccacatcaaatctgtcattgagttcttgactcttagggcatctatagcctacataaataaccagtagcatgttcggttgcaaagtgtttgaaaattgaatagaaagatatttaatcttcttcaatcccctatgatccatgcgtaacctgacaaggcctatgtagtatctaaggagataaatgtaaaaaaacacaagatatatgttgatgatggaacgcatgtagcacagtttactagtctaagatgcggtttcactcaaacaacctatataaatgaaccgtgtcacgagggattctagtgaataagatacaaacctctgatacatttggttttataaacgagtttgaataagatacaaacctctgatacatttggttttataaacgagtttcttagatgtacctagtgcttggagaactataacatattatctacgatatacataccctaacaataacacccatcacttcactatcaatacgcctttaaagcatgaatttcttcgtgtgtcgcggccgcacgccccagagtcgtttaaatcgcggaataagcaaatacggtgcatgggcagggattctaacttggctccctcagctcgaagcatccgacttctaccactgcaacacacattcgtttgtgttatgtataagagcgatgttgtaaatatgtatatattaataatcagtaaataaaaaattacaattat

SEQ ID NO: 23046 - DNA, 2933 bp, Zea Mays
cgctctcccgctttcccactcccgcgtcggctcccagcaccagctactcctccacggtgcacggccgcatcagcacgatcgctgcctagcctgcctgcctgccctgctcccccaccatgctgctctcgcgtccccaaaccctgcccctgccccgggcccggctctcttccccgacccttcgccacctccgcgccctcgccgcgccgctccgcgcgctcgtctcgtccccgccactagggttcacgtccgcggcgcgaggccccgctccgctccgcgcggcggtgtccgagtccgatcgcgagcagcgggaggctggggtggaggcgggggagcaggggaggccgctccgcgtcggcctcgtctgcggcgggccctccggcgagaggggcgtctccctcaactccgcgcgctcggtgctggatcacatccagggagaggatttggtcgtctgctgctactacattgactgtgctatgaaggccttcgcgatatctcctgcgcagctatattccaacacaccttcggattttgacttcaaacttgaaagtttagcccaagaatttgattccctatctgacttcgcggagcatctcgccacaaatgttgacattgtcttcccagtgatccatgggaaatttggtgaagatggaggcattcaggagcttttggagaaagcaaatgttccatttgttgggacaccctctaaggaatgccagcgtgcttttgacaagcataatgcgtcgctcgagctcaacgcacaaggtttcttaacagtgcccaactttcttgtggagaaggacaagttggctaagccggagttagaggcatggttccaaaccgtcaatctgaacaaagaaaatggcaaaacgattgtcaaacctacaagggctgggtcaagcattggcgtagttgttgcttatggtgtgaatgatgctgcccagaaagctgaggaaattatttcagagggaattgatgataaagttatcatagaggttttcattgaagggggcactgagtttacagccatcgtggttgatgttgggattgctaacaacagtgagcctgttgttctgcttccaacagaagttgagcttcagtactccaacaatagtgataccaaggaggacacaatatttaactaccgcaagaagtaccttccaagtcgacaggttgcttatcattctcctccacgttttccggcagaggtgatcgattgtataagacaaggaatttctcttttattttgtcgccttggcctgcatgactatgcaaggatagatggttggtttttaccttctcctgttgcttctttacccccagctgaaaatagtgacaaatttggaaataccaagtatggaagtgttcttttcacggatatcaatttgataagtgggatggagcaaaccagctttttgttccaacaagcttcagcggttgggttctcacactctcgaatccttcgtacagttgttcagcatgcttgctcgcgattcccttctcttcttccatgcaataatgcttggaccgctttgtccagaaaactacaaccatcaaaacaagtagaagcaatccacaaaggaacatcaagacagaaggtttttgtgatcttcggaggggacacttcagaacggcaagtatcacttatgagtggtaccaatgtatggcttaatcttcaaggttttgatgatcttgacgtgacaccgtgtttgcttgcacctgcacatggatatttctcctcacatgatcaagatttcagtgacagttcaagagaagtttggacgttgccatattcattagtgttacgacataccactgaagaagttcatgctgcatgtgttgaggcaactgagccagaacgagttgaaataacaaaacgtttgcgtgatcaagtaatgaatgaacttgggtcagcattgagcaaacatgattggtttgcgggctttgacatagcttatgaacaacctatcaaatactctctgcaacagtggatcgaccatgtaaaagaaactgaagctgtagtctttatagcagtgcatggtggcattggcgaggatggtaccattcagacattgttggaatctgcaggagttccttacacaggaccaggaccaatagcgtctagaacatgcattgacaaagttgcaagttcacttgctgttgaccatcttgctagttatggaatccgtatcattccaaaggatgtaagagcaacagaagaagtactgaactcatctcttgttgatatctggaatgaacttaaagcaaaactagaaacagaaacagtatgtgtgaaaccagctcgtgacgggtgctcgactggtgtagcaagattgtgctgtccaaaggacctagaagtctatacaaatgcattgaggaggaagtttcagcatctgcctgctaattgcctgtccagggcacatggtgtaattgagatgccagtcccttctccagagtcactaatatttgagccttttattgaaaccgatgaaattatcattgcaaataaattagaggatggtagtgcccgccatcttgtatggaaaggtgaaaatgactggcttgaaataaccgttggtgtagttggcaaacgtggagaaatgcactcattaaatccaagtatcacagtgaaagaaagtggtgatattttatctcttgaggagaaatttcaaggtggcactggaatcaacttgacaccacctcctgcaacaattatgggcgaggatgctctgcagaggtgcaagaagagtatcgagaccatggcaaacgctctaggtttggaaggcttctcacgcattgatgcatttgtcaacgtgcgaagcggggaggtgctgctgattgaagtcaacactgtacctgggatgactccatccaccgtgctgatccaccaagcactcgcagaggaaccgcccgtgtacccccacagccgaagatcc

SEQ ID NO: 23047 - DNA, 3744 bp, Zea Mays
atgctgctctcgcgtccccaaaccctgcccctgccccgggcccggctctcttccccgacccttcgccacctccgcgccctcgccgcgccgctccgcgcgctcgtctcgtccccgccactagggttcacgtccgcggcgcgaggccccgctccgctccgcgcggcggtgtccgagtccgatcgcgagcagcgggaggctggggtggaggcgggggagcaggggaggccgctccgcgtcggcctcgtctgcggcgggccctccggcgagaggggcgtctccctcaactccgcgcgctcggtgctggatcacatccagggagaggatttggtcgtctgctgctactacattgactgtgctatgaaggccttcgcgatatctcctgcgcagctatattccaacacaccttcggattttgacttcaaacttgaaagtttagcccaagaatttgattccctatctgacttcgcggagcatctcgccacaaatgttgacattgtcttcccagtgatccatgggaaatttggtgaagatggaggcattcaggagcttttggagaaagcaaatgttccatttgttgggacaccctctaaggaatgccagcgtgcttttgacaagcataatgcgtcgctcgagctcaacgcacaaggtttcttaacagtgcccaactttcttgtggagaaggacaagttggctaagccggagttagaggcatggttccaaaccgtcaatctgaacaaagaaaatggcaaaacgattgtcaaacctacaagggctgggtcaagcattggcgtagttgttgcttatggtgtgaatgatgctgcccagaaagctgaggaaattatttcagagggaattgatgataaagttatcatagaggttttcattgaagggggcactgagtttacagccatcgtggttgatgttgggattgctaacaacagtgagcctgttgttctgcttccaacagaagttgagcttcagtactccaacaatagtgataccaaggaggacacaatatttaactaccgcaagaagtaccttccaagtcgacaggttgcttatcattctcctccacgttttccggcagagctgaaaatagtgacaaatttggaaataccaagtatggaagtgttcttttcacggatatcaatttgataagtgggatggagcaaaccagctttttgttccaacaagcttcagcggttgggttctcacactctcgaatccttcgtacagttgttcagcatgcttgctcgcgattcccttctcttcttccatgcaataatgcttggaccgctttgtccagaaaactacaaccatcaaaacaagtagaagcaatccacaaaggaacatcaagacagaaggtttttgtgatcttcggaggggacacttcagaacggcaagtatcacttatgagtggtaccaatgtatggcttaatcttcaaggttttgatgatcttgacgtgacaccgtgtttgcttgcacctgcacatggatatttctcctcacatgatcaagatttcagtgacagttcaagagaagtttggacgttgccatattcattagtgttacgacataccactgaagaagttcatgctgcatgtgttgaggcaactgagccagaacgagttgaaataacaaaacgtttgcgtgatcaagtaatgaatgaacttgggtcagcattgagcaaacatgattggtttgcgggctttgacatagcttatgaacaacctatcaaatactctctgcaacagtggatcgaccatgtaaaagaaactgaagctgtagtctttatagcagtgcatggtggcattggcgaggatggtaccattcagacattgttggaatctgcaggagttccttacacaggttcatttttagcttatatattgagagcatttgtatgtggccaaactaaagaatttaaaagctcttgtcatgcaggaccaggaccaatagcgtctagaacatgcattgacaaagttgcaagttcacttgctgttgaccatcttgctagttatggaatccgtatcattccaaaggatgtaagagcaacagaagaagtactgaactcatctcttgttgatatctggaatgaacttaaagcaaaactagaaacagaaacagtatgtgtgaaaccagctcgtgacgggtgctcgactggtgtagcaagattgtgctgtccaaaggacctagaagtctatacaaatgcattgaggaggaagtttcagcatctgcctgctaattgcctgtccagggcacatggtgtaattgagatgccagtcccttctccagagtcactaatatttgagccttttattgaaaccgatgaaattatcattgcaaataaattagaggatggtagtgcccgccatcttgtatggaaaggtgaaaatgactggcttgaaataaccgttggtgtagttggcaaacgtggagaaatgcactcattaaatccaagtatcacagtgaaagaaagtggtgatattttatctcttgaggagaaatttcaagcgaggatgctctgcagaggtgcaagaagagtatcgagaccatggcaaacgctctaggtttggaaggcttctcacgcattgatgcatttgtcaacgtgcgaagcggggaggtgctgctgattgaagtcaacactgtacctgggatgactccatccaccgtgctgatccaccaagcactcgcagaggaaccgcccgtgtacccccacaggtttttccgcactcttctggatttggtgtttgcaagggcaaaatagctatctcacatttatttttctttttacgcgttgcgcggtcgtcgtgcacatcagagcagagcagaagcaaccctccacggacgtcaagtcaaaccaacacgtccgggccacaatatggaaagctagctatacaagtatcgtggaatataaactctcaaacttaccaagttttcatcacatcattaatatagaggtttagttctcgacattgaaatcagcagtaaaaggattgggtggactgaatgatgcagcagcttatcatcagtgtgtaccacatcaaatctgtcattgagttcttgactcttagggcatctatagcctacataaataaccagtagcatgttcggttgcaaagtgtttgaaaattgaatagaaagatatttaatcttcttcaatcccctatgatccatgcgtaacctgacaaggcctatgtagtatctaaggagataaatgtaaaaaaacacaagatatatgttgatgatggaacgcatgtagcacagtttactagtctaagatgcggtttcactcaaacaacctatataaatgaaccgtgtcacgagggattctagtgaataagatacaaacctctgatacatttggttttataaacgagtttgaataagatacaaacctctgatacatttggttttataaacgagtttcttagatgtacctagtgcttggagaactataacatattatctacgatatacataccctaacaataacacccatcacttcactatcaatacgcctttaaagcatgaatttcttcgtgtgtcgcggccgcacgccccagagtcgtttaaatcgcggaataagcaaatacggtgcatgggcagggattctaacttggctccctcagctcgaagcatccgacttctaccactgcaacacacattcgtttgtgttatgtataagagcgatgttgtaaatatgtatatattaataatcagtaaataaaaaattacaattat

SEQ ID NO: 23048 - DNA, 2799 bp, Zea Mays
ggctacaccttccccttcctcgcctccctcgtcggcgccaaccacaccttcgcccgtttctgctcccgttagcactatcactagcaccggaccccttccctcccctttacctttctcacgagggcccgggaaaaccaccaccatggacccctcctccgcgccgcggcggtgctcctttctcctgcgcctgctcctcctcgccgtcgccgccctcgcgctccgcctcctctacggcgccttcctcgccgtctccgccggtcccgccggttggccgctctaccggcccgccgccaccgtcgcaaccaccacgaggacccacgtcgtccaggctgacgtcccgtcgccggaggtctggcgcacccgccgctggcgcagggccgtcgactaccacgccgccgtcctcgcgccgcacatcgcagccggcgctctcgcgccgggatcccgcgccgtctgcctcggcggcgcgcaggaggcgctcgcgatgcgggaactcggcgtcgccagagccgtcgccgtcgccaggaagcgcgcgcccccgctcgtcgtcgcggggcacgaccgccgactgccgttcgacgcgtcgtccgtcgacttcgtcttcgcggggcgcgccctcgacgccgccaagcgcccggccgacctcgccgccgaggccgcgcggatcctcaaacccgagggccatctcgtcatgctcacgtccagcgccgccgacgcctacagcttccgctcgatacaggcgctcctcccgttgctccgccttgtccgatctcgcgagatcgacggccaggacgacagctactccacactccgggaacttgtcttcgtccacaagaatcttcggtccacgggcacgggcacttcttcatcagtgaacaactgctcggttggggatcacaggctccagctcctcgctcatgccgagccactgatccaggaagagccactcaaaccctggctcacgctcaagagaaacatgaacaacatcaagtacctcccggccctggccgatatcagcttcaaacgccggtacgtgtatgtcgacgttggcgcgcacagctacggctccagcatcggtagctggttccgcaagcactaccctaagcagaaccacaccttccaggtgttcgccattgaagctgacccggcgttccactctgagtacgcgacaaagaagggtgtcacattgcttccctatgcagcctgggtcaagaatgagacactggtattcgagatcaatggtgatcctggaaaagaggacgaagccaaggccaatggtcgtggcatggggcgcatccgccccaccaccgggaagaagatgtccggcgaggtcaggagtgtccctgcgtttgacctcgccgagtggttgaagcagactgtgacagagcaggactacttggtgatgaagatggacgtggaggggaccgagttcgatttgatcccaaggctgttcgacacgggtgcaatctgcttggtcgacgagcttttcctggagtgccattacaatcggtggcagaagtgctgccctggtgagcggtcgcccaagtatgacaacacttacgaggagtgcttggaccttttcagctcgctgcgggagaacggcgtccttgtgcatcagtggtgcttgccagcttctgttatgtactgtcgagtcaagaaggtgggcaccgtcaggcggccatgggccacagggttaagcggccagctgcagcgagcattcgtaacaggaagatcaaccttttaccagagcaatggttttcgaatacgcgctatgttagagaagccgatcaccgattggactgggcggcccggctgaggatatccatgggggtcgcttactgtctggagcacatgcaccagctgaaccacctgttgtgccaaggaaccttgactccagcactatatacctcactgatggcttcgctgcaaaggtctcggacactgccaccaccaagggatcggattccagctcaaccgctgatgacgagctctcctcggtttcaggcatagatgccatggttcatcagtatggcatgctattgctggagagactaaccggaaaagttgcctactccgaagaagacgacgacgacggggtttcactggagcacttggcgtctcgctacttggatgatggcagcatgccccttgcggagctgattgacccgagcctcggttggttccctcaagaagccgcgcacgcactgtgcgaggtcgcaaggtcttgggttgggtggacccagaccccaacaagagaccactgatggtacaggtggctgctaggatgaaggagatcgcaattcgcaaggtcttgcgtggacccagacctcaacaagagatcgaccacggatggtacaggtggctgctaggatgaaggagatcaccgcgctggggccgggcctgagggagcgactcccaaggtgtcgccgctctggtgggcagagctggagatcatgtcatctgactgaaactagcttatgcatgcacttatccattctcaatctcctcccgctgtcactggcaattctttggtttgttgtgttgtggttgcggagcctgaagcaaagttccatcattccttggtatttgaggtgtcattttctttctttcttgatagcattgcgtacgtgtgtatatattataatcatcagcagcagcgttgtttcagcagactgactgtaaaagtgagaaggcagcaaaaagggaatacttatgatcgtgctcaatgccggcgttggaacggcttgatttggtcacagtagtttttttaatgataacatatttggtgttaatgagagtttg

SEQ ID NO: 23049 - DNA, 3001 bp, Zea Mays
ggctacaccttccccttcctcgcctccctcgtcggcgccaaccacaccttcgcccgtttctgctcccgttagcactatcactagcaccggaccccttccctcccctttacctttctcacgagggcccgggaaaaccaccaccatggacccctcctccgcgccgcggcggtgctcctttctcctgcgcctgctcctcctcgccgtcgccgccctcgcgctccgcctcctctacggcgccttcctcgccgtctccgccggtcccgccggttggccgctctaccggcccgccgccaccgtcgcaaccaccacgaggacccacgtcgtccaggctgacgtcccgtcgccggaggtctggcgcacccgccgctggcgcagggccgtcgactaccacgccgccgtcctcgcgccgcacatcgcagccggcgctctcgcgccgggatcccgcgccgtctgcctcggcggcgcgcaggaggcgctcgcgatgcgggaactcggcgtcgccagagccgtcgccgtcgccaggaagcgcgcgcccccgctcgtcgtcgcggggcacgaccgccgactgccgttcgacgcgtcgtccgtcgacttcgtcttcgcggggcgcgccctcgacgccgccaagcgcccggccgacctcgccgccgaggccgcgcggatcctcaaacccgagggccatctcgtcatgctcacgtccagcgccgccgacgcctacagcttccgctcgatacaggcgctcctcccgttgctccgccttgtccgatctcgcgagatcgacggccaggacgacagctactccacactccgggaacttgtcttcgtccacaagaatcttcggtccacgggcacgggcacttcttcatcagtgaacaactgctcggttggggatcacaggctccagctcctcgctcatgccgagccactgatccaggaagagccactcaaaccctggctcacgctcaagagaaacatgaacaacatcaagtacctcccggccctggccgatatcagcttcaaacgccggtacgtgtatgtcgacgttggcgcgcacagctacggctccagcatcggtagctggttccgcaagcactaccctaagcagaaccacaccttccaggtgttcgccattgaagctgacccggcgttccactctgagtacgcgacaaagaagggtgtcacattgcttccctatgcagcctgggtcaagaatgagacactggtattcgagatcaatggtgatcctggaaaagaggacgaagccaaggccaatggtcgtggcatggggcgcatccgccccaccaccgggaagaagatgtccggcgaggtcaggagtgtccctgcgtttgacctcgccgagtggttgaagcagactgtgacagagcaggactacttggtgatgaagatggacgtggaggggaccgagttcgatttgatcccaaggctgttcgacacgggtgcaatctgcttggtcgacgagcttttcctggagtgccattacaatcggtggcagaagtgctgccctggtgagcggtcgcccaagtatgacaacacttacgaggagtgcttggaccttttcagctcgctgcgggagaacggcgtccttgtgcatcagtggtgcttgccagcttctgttatgtactgtcgagtcaagaaggtgggcaccgtcaggcggccatgggccacagggttaagcggccagctgcagcgagcattcgtaacagcctgcgaggacttcagcaacatagttggctctacgcctagctgcatgcatgctgtacaagggtacattatcgagtggagttgaaatagcagttgtgttaacatccgccaaggaatggtcaaaacaatgtgaaacccactacaggaacaagtttatctcaagttagccacaagaatttcatgaatctactcggctattgctaggaagatcaaccttttaccagagcaatggttttcgaatacgcgctatgttagagaagccgatcaccgattggactgggcggcccggctgaggatatccatgggggtcgcttactgtctggagcacatgcaccagctgaaccacctgttgtgccaaggaaccttgactccagcactatatacctcactgatggcttcgctgcaaaggtctcggacactgccaccaccaagggatcggattccagctcaaccgctgatgacgagctctcctcggtttcaggcatagatgccatggttcatcagtatggcatgctattgctggagagactaaccggaaaagttgcctactccgaagaagacgacgacgacggggtttcactggagcacttggcgtctcgctacttggatgatggcagcatgccccttgcggagctgattgacccgagcctcggttggttccctcaagaagccgcgcacgcactgtgcgaggtcgcaaggtcttgggttgggtggacccagaccccaacaagagaccactgatggtacaggtggctgctaggatgaaggagatcgcaattcgcaaggtcttgcgtggacccagacctcaacaagagatcgaccacggatggtacaggtggctgctaggatgaaggagatcaccgcgctggggccgggcctgagggagcgactcccaaggtgtcgccgctctggtgggcagagctggagatcatgtcatctgactgaaactagcttatgcatgcacttatccattctcaatctcctcccgctgtcactggcaattctttggtttgttgtgttgtggttgcggagcctgaagcaaagttccatcattccttggtatttgaggtgtcattttctttctttcttgatagcattgcgtacgtgtgtatatattataatcatcagcagcagcgttgtttcagcagactgactgtaaaagtgagaaggcagcaaaaagggaatacttatgatcgtgctcaatgccggcgttggaacggcttgatttggtcacagtagtttttttaatgataacatatttggtgttaatgagagtttg

SEQ ID NO: 23050 - DNA, 1955 bp, Zea Mays
gccggagtgagaccattcgaggatataaactttgaatatcagtttgactggtgcatcgagagattggtaatatgctggattcggagtgagaccattcgaagacaagccggcctggccaggaggagaatgcccttgtcatctgggaatgcataatagtagtccctccgattaaaatttagtaagttggatataaacattacgtgtattggcatgaactatctggaacgtgcaagctagaagattgctgctgctggagactggtggtagaaacgagcatccccagccacctagacacgctcctcctactcctagtcaggagaatgagaagacgaagcccaacagacacggacgaccccagaaaaaaccaagacatgatccaactagaaattcaaaaggggcacctgctcctaaagcctggccatcaccatctgcttctggatctcatcatccatcggcagcgcctccccgaccgcatagacactcctccagagagtacagcttggtcgctgcagggagtgcagtttttcttgtcatggctgcagcttgccagcttctgttatgtactgtcgagtcaagaaggtgggcaccgtcaggcggccatgggccacagggttaagcggccagctgcagcgagcattcgtaacaggtgtacctgcgttgaaacgatctgagctggaagcagcctgcgaggacttcagcaacatagttggctctacgcctagctgcatgcatgctgtacaagggtacattatcgagtggagttgaaatagcagttgtgttaacatccgccaaggaatggtcaaaacaatgtgaaacccactacaggaacaagtttatctcaagttagccacaagaatttcatgaatctactcggctattgctaggaagatcaaccttttaccagagcaatggttttcgaatacgcgctatgagaagccgatcaccgattggactgggcggcccggctgaggatatccatgggggtcgcttactgtctggagcacatgcaccagctgaaccacctgttgtgccaaggaaccttgactccagcactatatacctcactgatggcttcgctgcaaaggtctcggacactgccaccaccaagggatcggattccagctcaaccgctgatgacgagctctcctcggtttcaggcatagatgccatggttcatcagtatggcatgctattgctggagagactaaccggaaaagttgcctactccgaagaagacgacgacgacggggtttcactggagcacttggcgtctcgctacttggatgatggcagcatgccccttgcggagctgattgacccgagcctcggttggttccctcaagaagccgcgcacgcactgtgcgaggtcgcaaggtcttgggttgggtggacccagaccccaacaagagaccactgatggtacaggtggctgctaggatgaaggagatcgcaattcgcaaggtcttgcgtggacccagacctcaacaagagatcgaccacggatggtacaggtggctgctaggatgaaggagatcaccgcgctggggccgggcctgagggagcgactcccaaggtgtcgccgctctggtgggcagagctggagatcatgtcatctgactgaaactagcttatgcatgcacttatccattctcaatctcctcccgctgtcactggcaattctttggtttgttgtgttgtggttgcggagcctgaagcaaagttccatcattccttggtatttgaggtgtcattttctttctttcttgatagcattgcgtacgtgtgtatatattataatcatcagcagcagcgttgtttcagcagactgactgtaaaagtgagaaggcagcaaaaagggaatacttatgatcgtgctcaatgccggcgttggaacggcttgatttggtcacagtagtttttttaatgataacatatttggtgttaatgagagtttg

SEQ ID NO: 23051 - DNA, 1878 bp, Zea Mays
cggagtgagaccattcgaagacaagccggcctggccaggaggagaatgcccttgtcatctgggaatgcataatagtagtccctccgattaaaatttagtaagttggatataaacattacgtgtattggcatgaactatctggaacgtgcaagctagaagattgctgctgctggagactggtggtagaaacgagcatccccagccacctagacacgctcctcctactcctagtcaggagaatgagaagacgaagcccaacagacacggacgaccccagaaaaaaccaagacatgatccaactagaaattcaaaaggggcacctgctcctaaagcctggccatcaccatctgcttctggatctcatcatccatcggcagcgcctccccgaccgcatagacactcctccagagagtacagcttggtcgctgcagggagtgcagtttttcttgtcatggctgcagcttgccagcttctgttatgtactgtcgagtcaagaaggtgggcaccgtcaggcggccatgggccacagggttaagcggccagctgcagcgagcattcgtaacaggtgtacctgcgttgaaacgatctgagctggaagcagcctgcgaggacttcagcaacatagttggctctacgcctagctgcatgcatgctgtacaagggtacattatcgagtggagttgaaatagcagttgtgttaacatccgccaaggaatggtcaaaacaatgtgaaacccactacaggaacaagtttatctcaagttagccacaagaatttcatgaatctactcggctattgctaggaagatcaaccttttaccagagcaatggttttcgaatacgcgctatgttagagaagccgatcaccgattggactgggcggcccggctgaggatatccatgggggtcgcttactgtctggagcacatgcaccagctgaaccacctgttgtgccaaggaaccttgactccagcactatatacctcactgatggcttcgctgcaaaggtctcggacactgccaccaccaagggatcggattccagctcaaccgctgatgacgagctctcctcggtttcaggcatagatgccatggttcatcagtatggcatgctattgctggagagactaaccggaaaagttgcctactccgaagaagacgacgacgacggggtttcactggagcacttggcgtctcgctacttggatgatggcagcatgccccttgcggagctgattgacccgagcctcggttggttccctcaagaagccgcgcacgcactgtgcgaggtcgcaaggtcttgggttgggtggacccagaccccaacaagagaccactgatggtacaggtggctgctaggatgaaggagatcgcaattcgcaaggtcttgcgtggacccagacctcaacaagagatcgaccacggatggtacaggtggctgctaggatgaaggagatcaccgcgctggggccgggcctgagggagcgactcccaaggtgtcgccgctctggtgggcagagctggagatcatgtcatctgactgaaactagcttatgcatgcacttatccattctcaatctcctcccgctgtcactggcaattctttggtttgttgtgttgtggttgcggagcctgaagcaaagttccatcattccttggtatttgaggtgtcattttctttctttcttgatagcattgcgtacgtgtgtatatattataatcatcagcagcagcgttgtttcagcagactgactgtaaaagtgagaaggcagcaaaaagggaatacttatgatcgtgctcaatgccggcgttggaacggcttgatttggtcacagtagtttttttaatgataacatatttggtgttaatgagagtttg

SEQ ID NO: 23052 - DNA, 3841 bp, Zea Mays
agtttattttctttcctaaacattataacacatttgtaacatttttctataatattataacatatttgtacatgagttatcgtgatattttatctttttgttgtaacgcacgggcatccacctagttataaattaagaaattaagaccagggagtataacattagaggagagacgggtaagggtaaataaaaaaaattagcgactttgttagattgcttactggattaaaagtgctcatgtctgtagtcaggtgagcacaagccattttctttttctactgcgatgcgaagcaacaccctccggaagtccagtaccggacatcttcttcgatcatcccgtaccgccgtcgccgccaccaccacttccttctgtcgccgccaccacccactgtctctctcccgcgccaccgttttgggcgttgcgaaatggcgctctccgccagcgatgtgcccaccatgtacaccgtcctcgtcaattcgctcagcgccgacgaggcggcgcggcgcccggcggaggcagctctcgcgcagtgcgagacccgcccgggcttctgctcctgcctcctggagatcatctcggccaggggattggcttgtcgggaggatgtccgcctgctcgccacggtgtattttaagaacagtatcaaccgctactggcggcatcgtcgcgattcgtatggaattagcaacgaggagaaggaccaccttcggaaaaatcttttgctaaacatgcgtgaggaaaatagccagattgcactgcagctagctgtattaatctccaagattgcacgattggattacccaaaagagtggccagagcttctgtctgtattggcacaacagctgcagtccgctgacgttcttgcttcacatcgcgtgtttatggtcctgtttcgaacattaaaggagctgtcaactaaacggcttgctgtggatcagaagaactatgcagagatcactggccatttgtttgagtatacctggaacctttggaagagtgatgtgcagactatattgcagaatctttctatgctctcacagcggaatgacatagattccgtttttgagcaatccaatgaccttgctttgatttgcgaccggtggttgctctgcctaatgattgtccggctactaattttttcaggttatgctagtgattcaagaactgcacaggaggtctggcaggtcagggaagtttgtccaacagttttgactgccattaaatcccttcttccatattacgacaccttcaaagacaagcatgctaaactatgtgactttgcaaaaagggcatgcactaagttgatgaaagtcctcgttactctacaagactggcacaacttttgaggagttccttatacaaagcatggttttggttaaatcagtactggagtgcaaagaatacagaccaagtcccatgggacgtgtgatcaatgaaaatgagcctttaagtctggagcaaaggaagaaaaacttcgcagcagtggctagtgacatgctgaaggtcattttgtctggtgatcgagttgtgctgctttgcaacattttagtaaggaggtacttcattttcacagcaaaggatttggaagagtggtcagagaatcctgagtccttccaccatgagcagaatttggttcagtggaccgagaaaaaacggccatgtgctgaagccctcttcattgttatcttcgagaagtaccgagagcttctagctccagttgttgtttctgttcttcgtgaagctatggctatttctccaccacaagaaacagaggttactgcaggaatgcttttaaaggatgcttcctatacagctgccgggcatgtttattatgaactttcgaactatctcagttttaatgaatggttccatggatctctatctattgaaatttcaaatcatcaccccaatatgcgtatcattcgtagaaaaatcgcattgctacttgggcattggatttctgagatcaagggcgacactcggaaattggtataccgcgctttggttgggttgctgcaggataatgatatagctgttaggctagcagcatgctcttctctctgttatcttttccaagaatcttgcttttctgaattagatttgtttgagtgtcttcctacatgttggacaatgagtttcaagttgatagaagatgtacaagaatttgattcaaaggtgcaagtgttgaacttcatttcagttcttcttgaacatgcgggggacaaggttattccatttgcatgtcagctatcacaattttttcagatgatatggaatgaatctgcgggtgaaagcttgctacagatacaattactaacagcacttagaacttttgtttcttcgcttggattccagtcacctctttcttaccacatgcttattcctatactgcaaagtggtatcaatattgacagccctgatgctcttaatcttcttgaggacagtgttttgttgtgggaagcaaccctttcaaatgccccttccattgtacctcaacttctggatttattcccttaccttgtgggcatcatgaatagaagctttgaccatctggaggtcacaatgaaaataattgaggattacattatttttggcggttcagaatttttgaaaagccatggtgcaagcctagctaacatcattgatactattgttggaaatgtcaatgataaaggacttctcactgcacttcctattgttgatcttcttattcagatatttcctctggaagctccaccattgatatccagtgctcttcagaaacttaccttcatttcgttgagtcaagatgatggccaaaacccgtctaggacaactgtccgagcatcctctggggcgattcttgctaggcttctggtgatgaatacaaacttttcggcacaactattatcagagcctgctcttttggcaagcatccaacaagcagggatttctgtgaacaataatctgcttttttctttggttgatatgtggatcgacaaggtagatgacgcaaatgctatacagcagaaggaatacgcaatggcactttctgtaatcctgacattacaggtacctcaggtcattgacaaacttgatgacatactgagtgtctgcactactgtcattataggaagccgtgaagtaaagactgatgacgatactagcggcgatatcacaagctcttcatggataggcaacgatggttcaggttattccaacacttcaagcaaagagctgagaaagcgccaggtaaaggattcagatcctatcaaacaaacatcgctagagatggtgttaagagagaacttaaaagcatgtgctgttttccatggggatgcagcattcaacgctgccatcggcaggatccatccatcttcgtttgctcagctgcaacaggccctgaatactgcataagagtgcatagctgcttactggattgtatggagcattacgtggagcaggcattgctttgtgaggtgctgacagacagttgaatcgcggtatgacacagcagtgcagtgcagagagagcatgtcctgatcttccgaaatataattggattggattggattaccgcggtcaatgtggatggccagagtttttatagctgtccttccaacatgactgactcgatcttctcccctcccccttctcaaatcatggccaggcatccatcctagttgatttttatcccttgtttagcgaggtgacgccgagattgttgtttgagaaggaaatctggaatgcaattttgttgtacgttttatgttcccattaggaataaaaatgttctttacattcacgtatatctagattctcaaatatttgtcgacaaataaaaaagatgcatggttcgtg

SEQ ID NO: 23053 - DNA, 3922 bp, Zea Mays
agtttattttctttcctaaacattataacacatttgtaacatttttctataatattataacatatttgtacatgagttatcgtgatattttatctttttgttgtaacgcacgggcatccacctagttataaattaagaaattaagaccagggagtataacattagaggagagacgggtaagggtaaataaaaaaaattagcgactttgttagattgcttactggattaaaagtgctcatgtctgtagtcaggtgagcacaagccattttctttttctactgcgatgcgaagcaacaccctccggaagtccagtaccggacatcttcttcgatcatcccgtaccgccgtcgccgccaccaccacttccttctgtcgccgccaccacccactgtctctctcccgcgccaccgttttgggcgttgcgaaatggcgctctccgccagcgatgtgcccaccatgtacaccgtcctcgtcaattcgctcagcgccgacgaggcggcgcggcgcccggcggaggcagctctcgcgcagtgcgagacccgcccgggcttctgctcctgcctcctggagatcatctcggccaggggattggcttgtcgggaggatgtccgcctgctcgccacggtgtattttaagaacagtatcaaccgctactggcggcatcgtcgcgattcgtatggaattagcaacgaggagaaggaccaccttcggaaaaatcttttgctaaacatgcgtgaggaaaatagccagattgcactgcagctagctgtattaatctccaagattgcacgattggattacccaaaagagtggccagagcttctgtctgtattggcacaacagctgcagtccgctgacgttcttgcttcacatcgcgtgtttatggtcctgtttcgaacattaaaggagctgtcaactaaacggcttgctgtggatcagaagaactatgcagagatcactggccatttgtttgagtatacctggaacctttggaagagtgatgtgcagactatattgcagaatctttctatgctctcacagcggaatgacatagattccgtttttgagcaatccaatgaccttgctttgatttgcgaccggtggttgctctgcctaatgattgtccggctactaattttttcaggttatgctagtgattcaagaactgcacaggaggtctggcaggtcagggaagtttgtccaacagttttgactgccattaaatcccttcttccatattacgacaccttcaaagacaagcatgctaaactatgtgactttgcaaaaagggcatgcactaagttgatgaaagtcctcgttactctacaaggcagacatccatattcttttgttcacgaaactgtgctttcagctacagtagacttctgtttgaatatgattacaaatcctgaacagactggcacaacttttgaggagttccttatacaaagcatggttttggttaaatcagtactggagtgcaaagaatacagaccaagtcccatgggacgtgtgatcaatgaaaatgagcctttaagtctggagcaaaggaagaaaaacttcgcagcagtggctagtgacatgctgaaggtcattttgtctggtgatcgagttgtgctgctttgcaacattttagtaaggaggtacttcattttcacagcaaaggatttggaagagtggtcagagaatcctgagtccttccaccatgagcagaatttggttcagtggaccgagaaaaaacggccatgtgctgaagccctcttcattgttatcttcgagaagtaccgagagcttctagctccagttgttgtttctgttcttcgtgaagctatggctatttctccaccacaagaaacagaggttactgcaggaatgcttttaaaggatgcttcctatacagctgccgggcatgtttattatgaactttcgaactatctcagttttaatgaatggttccatggatctctatctattgaaatttcaaatcatcaccccaatatgcgtatcattcgtagaaaaatcgcattgctacttgggcattggatttctgagatcaagggcgacactcggaaattggtataccgcgctttggttgggttgctgcaggataatgatatagctgttaggctagcagcatgctcttctctctgttatcttttccaagaatcttgcttttctgaattagatttgtttgagtgtcttcctacatgttggacaatgagtttcaagttgatagaagatgtacaagaatttgattcaaaggtgcaagtgttgaacttcatttcagttcttcttgaacatgcgggggacaaggttattccatttgcatgtcagctatcacaattttttcagatgatatggaatgaatctgcgggtgaaagcttgctacagatacaattactaacagcacttagaacttttgtttcttcgcttggattccagtcacctctttcttaccacatgcttattcctatactgcaaagtggtatcaatattgacagccctgatgctcttaatcttcttgaggacagtgttttgttgtgggaagcaaccctttcaaatgccccttccattgtacctcaacttctggatttattcccttaccttgtgggcatcatgaatagaagctttgaccatctggaggtcacaatgaaaataattgaggattacattatttttggcggttcagaatttttgaaaagccatggtgcaagcctagctaacatcattgatactattgttggaaatgtcaatgataaaggacttctcactgcacttcctattgttgatcttcttattcagatatttcctctggaagctccaccattgatatccagtgctcttcagaaacttaccttcatttcgttgagtcaagatgatggccaaaacccgtctaggacaactgtccgagcatcctctggggcgattcttgctaggcttctggtgatgaatacaaacttttcggcacaactattatcagagcctgctcttttggcaagcatccaacaagcagggatttctgtgaacaataatctgcttttttctttggttgatatgtggatcgacaaggtagatgacgcaaatgctatacagcagaaggaatacgcaatggcactttctgtaatcctgacattacaggtacctcaggtcattgacaaacttgatgacatactgagtgtctgcactactgtcattataggaagccgtgaagtaaagactgatgacgatactagcggcgatatcacaagctcttcatggataggcaacgatggttcaggttattccaacacttcaagcaaagagctgagaaagcgccaggtaaaggattcagatcctatcaaacaaacatcgctagagatggtgttaagagagaacttaaaagcatgtgctgttttccatggggatgcagcattcaacgctgccatcggcaggatccatccatcttcgtttgctcagctgcaacaggccctgaatactgcataagagtgcatagctgcttactggattgtatggagcattacgtggagcaggcattgctttgtgctgacagacagttgaatcgcggtatgacacagcagtgcagtgcagagagagcatgtcctgatcttccgaaatataattggattggattggattaccgcggtcaatgtggatggccagagtttttatagctgtccttccaacatgactgactcgatcttctcccctcccccttctcaaatcatggccaggcatccatcctagttgatttttatcccttgtttagcgaggtgacgccgagattgttgtttgagaaggaaatctggaatgcaattttgttgtacgttttatgttcccattaggaataaaaatgttctttacattcacgtatatctagattctcaaatatttgtcgacaaataaaaaagatgcatggttcgtg

SEQ ID NO: 23054 - DNA, 4517 bp, Zea Mays
agtttattttctttcctaaacattataacacatttgtaacatttttctataatattataacatatttgtacatgagttatcgtgatattttatctttttgttgtaacgcacgggcatccacctagttataaattaagaaattaagaccagggagtataacattagaggagagacgggtaagggtaaataaaaaaaattagcgactttgttagattgcttactggattaaaagtgctcatgtctgtagtcaggtgagcacaagccattttctttttctactgcgatgcgaagcaacaccctccggaagtccagtaccggacatcttcttcgatcatcccgtaccgccgtcgccgccaccaccacttccttctgtcgccgccaccacccactgtctctctcccgcgccaccgttttgggcgttgcgaaatggcgctctccgccagcgatgtgcccaccatgtacaccgtcctcgtcaattcgctcagcgccgacgaggcggcgcggcgcccggcggaggcagctctcgcgcagtgcgagacccgcccgggcttctgctcctgcctcctggagatcatctcggccaggggattggcttgtcgggaggatgtccgcctgctcgccacggtgtattttaagaacagtatcaaccgctactggcggcatcgtcgcgattcgtatggaattagcaacgaggagaaggaccaccttcggaaaaatcttttgctaaacatgcgtgaggaaaatagccagattgcactgcagctagctgtattaatctccaagattgcacgattggattacccaaaagagtggccagagcttctgtctgtattggcacaacagctgcagtccgctgacgttcttgcttcacatcgcgtgtttatggtcctgtttcgaacattaaaggagctgtcaactaaacggcttgctgtggatcagaagaactatgcagagatcactggccatttgtttgagtatacctggaacctttggaagagtgatgtgcagactatattgcagaatctttctatgctctcacagcggaatgacatagattccgtttttgagcaatccaatgaccttgctttgatttgcgaccggtggttgctctgcctaatgattgtccggctactaattttttcaggttatgctagtgattcaagaactgcacaggaggtctggcaggtcagggaagtttgtccaacagttttgactgccattaaatcccttcttccatattacgacaccttcaaagacaagcatgctaaactatgtgactttgcaaaaagggcatgcactaagttgatgaaagtcctcgttactctacaaggcagacatccatattcttttgttcacgaaactgtgctttcagctacagtagacttctgtttgaatatgattacaaatcctgaacagactggcacaacttttgaggagttccttatacaaagcatggttttggttaaatcagtactggagtgcaaagaatacagaccaagtcccatgggacgtgtgatcaatgaaaatgagcctttaagtctggagcaaaggaagaaaaacttcgcagcagtggctagtgacatgctgaaggtcattttgtctggtgatcgagttgtgctgctttgcaacattttagtaaggaggtacttcattttcacagcaaaggatttggaagagtggtcagagaatcctgagtccttccaccatgagcagaatttggttcagtggaccgagaaaaaacggccatgtgctgaagccctcttcattgttatcttcgagaagtaccgagaggtgtgaacatttaagttttcattgtggctgtgagtatattcaatgctctaatgctcacatgatcacgtgtcgcttcagcttctagctccagttgttgtttctgttcttcgtgaagctatggctatttctccaccacaagaaacagaggttactgcaggaatgcttttaaaggatgcttcctatacagctgccgggcatgtttattatgaactttcgaactatctcagttttaatgaatggttccatggatctctatctattgaaatttcaaatcatcaccccaatatgcgtatcattcgtagaaaaatcgcattgctacttgggcattggatttctgagatcaagggcgacactcggaaattggtataccgcgctttggttgggttgctgcaggataatgatatagctgttaggctagcagcatgctcttctctctgttatcttttccaagaatcttgcttttctgaattagatttgtttgagtgtcttcctacatgttggacaatgagtttcaagttgatagaagatgtacaagaatttgattcaaaggtttgcatctcaaaaccgcaattcctattctccttctgtttaacctgatgcccctgtaggcattgaaacttcatattgtactattagtcaataacatgccgagtaaaagttagtcagaaagcagtgaatggttatgtttggcaggatctagttagtattgtgtgtttttttttgcgcaacaactcttgtacatctacatttttgaattttcaggtttgtcctctctcctaaaactctacctgcggggggtaagacagcctccgagcattatattaagaagaccgtcgagaaaacccccgaatccctggcccacccatacaaagcggtactgtagcccatgtgagaacactaccgcgaccggaactggaccgtagacctgtgctttgtcgttggacagacgaggggattttttaaccacagctgaaattcgctcccacggaaagtcgaacctaggacctgaggagtgctactcagaccacctaaccaactcggctttacctatttctttgtaggtgcaagtgttgaacttcatttcagttcttcttgaacatgcgggggacaaggttattccatttgcatgtcagctatcacaattttttcagatgatatggaatgaatctgcgggtgaaagcttgctacagatacaattactaacagcacttagaacttttgtttcttcgcttggattccagtcacctctttcttaccacatgcttattcctatactgcaaagtggtatcaatattgacagccctgatgctcttaatcttcttgaggacagtgttttgttgtgggaagcaaccctttcaaatgccccttccattgtacctcaacttctggatttattcccttaccttgtgggcatcatgaatagaagctttgaccatctggaggtcacaatgaaaataattgaggattacattatttttggcggttcagaatttttgaaaagccatggtgcaagcctagctaacatcattgatactattgttggaaatgtcaatgataaaggacttctcactgcacttcctattgttgatcttcttattcagatatttcctctggaagctccaccattgatatccagtgctcttcagaaacttaccttcatttcgttgagtcaagatgatggccaaaacccgtctaggacaactgtccgagcatcctctggggcgattcttgctaggcttctggtgatgaatacaaacttttcggcacaactattatcagagcctgctcttttggcaagcatccaacaagcagggatttctgtgaacaataatctgcttttttctttggttgatatgtggatcgacaaggtagatgacgcaaatgctatacagcagaaggaatacgcaatggcactttctgtaatcctgacattacaggtacctcaggtcattgacaaacttgatgacatactgagtgtctgcactactgtcattataggaagccgtgaagtaaagactgatgacgatactagcggcgatatcacaagctcttcatggataggcaacgatggttcaggttattccaacacttcaagcaaagagctgagaaagcgccaggtaaaggattcagatcctatcaaacaaacatcgctagagatggtgttaagagagaacttaaaagcatgtgctgttttccatggggatgcagcattcaacgctgccatcggcaggatccatccatcttcgtttgctcagctgcaacaggccctgaatactgcataagagtgcatagctgcttactggattgtatggagcattacgtggagcaggcattgctttgtgaggtgctgacagacagttgaatcgcggtatgacacagcagtgcagtgcagagagagcatgtcctgatcttccgaaatataattggattggattggattaccgcggtcaatgtggatggccagagtttttatagctgtccttccaacatgactgactcgatcttctcccctcccccttctcaaatcatggccaggcatccatcctagttgatttttatcccttgtttagcgaggtgacgccgagattgttgtttgagaaggaaatctggaatgcaattttgttgtacgttttatgttcccattaggaataaaaatgttctttacattcacgtatatctagattctcaaatatttgtcgacaaataaaaaagatgcatggttcgtg

SEQ ID NO: 23055 - DNA, 3904 bp, Zea Mays
agtttattttctttcctaaacattataacacatttgtaacatttttctataatattataacatatttgtacatgagttatcgtgatattttatctttttgttgtaacgcacgggcatccacctagttataaattaagaaattaagaccagggagtataacattagaggagagacgggtaagggtaaataaaaaaaattagcgactttgttagattgcttactggattaaaagtgctcatgtctgtagtcaggtgagcacaagccattttctttttctactgcgatgcgaagcaacaccctccggaagtccagtaccggacatcttcttcgatcatcccgtaccgccgtcgccgccaccaccacttccttctgtcgccgccaccacccactgtctctctcccgcgccaccgttttgggcgttgcgaaatggcgctctccgccagcgatgtgcccaccatgtacaccgtcctcgtcaattcgctcagcgccgacgaggcggcgcggcgcccggcggaggcagctctcgcgcagtgcgagacccgcccgggcttctgctcctgcctcctggagatcatctcggccaggggattggcttgtcgggaggatgtccgcctgctcgccacggtgtattttaagaacagtatcaaccgctactggcggcatcgtcgcgattcgtatggaattagcaacgaggagaaggaccaccttcggaaaaatcttttgctaaacatgcgtgaggaaaatagccagattgcactgcagctagctgtattaatctccaagattgcacgattggattacccaaaagagtggccagagcttctgtctgtattggcacaacagctgcagtccgctgacgttcttgcttcacatcgcgtgtttatggtcctgtttcgaacattaaaggagctgtcaactaaacggcttgctgtggatcagaagaactatgcagagatcactggccatttgtttgagtatacctggaacctttggaagagtgatgtgcagactatattgcagaatctttctatgctctcacagcggaatgacatagattccgtttttgagcaatccaatgaccttgctttgatttgcgaccggtggttgctctgcctaatgattgtccggctactaattttttcaggttatgctagtgattcaagaactgcacaggaggtctggcaggtcagggaagtttgtccaacagttttgactgccattaaatcccttcttccatattacgacaccttcaaagacaagcatgctaaactatgtgactttgcaaaaagggcatgcactaagttgatgaaagtcctcgttactctacaaggcagacatccatattcttttgttcacgaaactgtgctttcagctacagtagacttctgtttgaatatgattacaaatcctgaacagactggcacaacttttgaggagttccttatacaaagcatggttttggttaaatcagtactggagtgcaaagaatacagaccaagtcccatgggacgtgtgatcaatgaaaatgagcctttaagtctggagcaaaggaagaaaaacttcgcagcagtggctagtgacatgctgaaggtcattttgtctggtgatcgagttgtgctgctttgcaacattttagtaaggaggtacttcattttcacagcaaaggatttggaagagtggtcagagaatcctgagtccttccaccatgagcagaatttggttcagtggaccgagaaaaaacggccatgtgctgaagccctcttcattgttatcttcgagaagtaccgagagcttctagctccagttgttgtttctgttcttcgtgaagctatggctatttctccaccacaagaaacagaggttactgcaggaatgcttttaaaggatgcttcctatacagctgccgggcatgtttattatgaactttcgaactatctcagttttaatgaatggttccatggatctctatctattgaaatttcaaatcatcaccccaatatgcgtatcattcgtagaaaaatcgcattgctacttgggcattggatttctgagatcaagggcgacactcggaaattggtataccgcgctttggttgggttgctgcaggataatgatatagctgttaggctagcagcatgctcttctctctgttatcttttccaagaatcttgcttttctgaattagatttgtttgagtgtcttcctacatgttggacaatgagtttcaagttgatagaagatgtacaagaatttgattcaaaggtgcaagtgttgaacttcatttcagttcttcttgaacatgcgggggacaaggttattccatttgcatgtcagctatcacaattttttcagatgatatggaatgaatctgcgggtgaaagcttgctacagatacaattactaacagcacttagaacttttgtttcttcgcttggattccagtcacctctttcttaccacatgcttattcctatactgcaaagtggtatcaatattgacagccctgatgctcttaatcttcttgaggacagtgttttgttgtgggaagcaaccctttcaaatgccccttccattgtacctcaacttctggatttattcccttaccttgtgggcatcatgaatagaagctttgaccatctggaggtcacaatgaaaataattgaggattacattatttttggcggttcagaatttttgaaaagccatggtgcaagcctagctaacatcattgatactattgttggaaatgtcaatgataaaggacttctcactgcacttcctattgttgatcttcttattcagatatttcctctggaagctccaccattgatatccagtgctcttcagaaacttaccttcatttcgttgagtcaagatgatggccaaaacccgtctaggacaactgtccgagcatcctctggggcgattcttgctaggcttctggtgatgaatacaaacttttcggcacaactattatcagagcctgctcttttggcaagcatccaacaagcagggatttctgtgaacaataatctgcttttttctttggttgatatgtggatcgacaaggtagatgacgcaaatgctatacagcagaaggaatacgcaatggcactttctgtaatcctgacattacaggtacctcaggtcattgacaaacttgatgacatactgaggaagccgtgaagtaaagactgatgacgatactagcggcgatatcacaagctcttcatggataggcaacgatggttcaggttattccaacacttcaagcaaagagctgagaaagcgccaggtaaaggattcagatcctatcaaacaaacatcgctagagatggtgttaagagagaacttaaaagcatgtgctgttttccatggggatgcagcattcaacgctgccatcggcaggatccatccatcttcgtttgctcagctgcaacaggccctgaatactgcataagagtgcatagctgcttactggattgtatggagcattacgtggagcaggcattgctttgtgaggtgctgacagacagttgaatcgcggtatgacacagcagtgcagtgcagagagagcatgtcctgatcttccgaaatataattggattggattggattaccgcggtcaatgtggatggccagagtttttatagctgtccttccaacatgactgactcgatcttctcccctcccccttctcaaatcatggccaggcatccatcctagttgatttttatcccttgtttagcgaggtgacgccgagattgttgtttgagaaggaaatctggaatgcaattttgttgtacgttttatgttcccattaggaataaaaatgttctttacattcacgtatatctagattctcaaatatttgtcgacaaataaaaaagatgcatggttcgtg

SEQ ID NO: 23056 - DNA, 1700 bp, Zea Mays
gtttgtcctctctcctaaaactctacctgcggggggtgcaagtgttgaacttcatttcagttcttcttgaacatgcgggggacaaggttattccatttgcatgtcagctatcacaattttttcagatgatatggaatgaatctgcgggtgaaagcttgctacagatacaattactaacagcacttagaacttttgtttcttcgcttggattccagtcacctctttcttaccacatgcttattcctatactgcaaagtggtatcaatattgacagccctgatgctcttaatcttcttgaggacagtgttttgttgtgggaagcaaccctttcaaatgccccttccattgtacctcaacttctggatttattcccttaccttgtgggcatcatgaatagaagctttgaccatctggaggtcacaatgaaaataattgaggattacattatttttggcggttcagaatttttgaaaagccatggtgcaagcctagctaacatcattgatactattgttggaaatgtcaatgataaaggacttctcactgcacttcctattgttgatcttcttattcagatatttcctctggaagctccaccattgatatccagtgctcttcagaaacttaccttcatttcgttgagtcaagatgatggccaaaacccgtctaggacaactgtccgagcatcctctggggcgattcttgctaggcttctggtgatgaatacaaacttttcggcacaactattatcagagcctgctcttttggcaagcatccaacaagcagggatttctgtgaacaataatctgcttttttctttggttgatatgtggatcgacaaggtagatgacgcaaatgctatacagcagaaggaatacgcaatggcactttctgtaatcctgacattacaggtacctcaggtcattgacaaacttgatgacatactgagtgtctgcactactgtcattataggaagccgtgaagtaaagactgatgacgatactagcggcgatatcacaagctcttcatggataggcaacgatggttcaggttattccaacacttcaagcaaagagctgagaaagcgccaggtaaaggattcagatcctatcaaacaaacatcgctagagatggtgttaagagagaacttaaaagcatgtgctgttttccatggggatgcagcattcaacgctgccatcggcaggatccatccatcttcgtttgctcagctgcaacaggccctgaatactgcataagagtgcatagctgcttactggattgtatggagcattacgtggagcaggcattgctttgtgaggtgctgacagacagttgaatcgcggtatgacacagcagtgcagtgcagagagagcatgtcctgatcttccgaaatataattggattggattggattaccgcggtcaatgtggatggccagagtttttatagctgtccttccaacatgactgactcgatcttctcccctcccccttctcaaatcatggccaggcatccatcctagttgatttttatcccttgtttagcgaggtgacgccgagattgttgtttgagaaggaaatctggaatgcaattttgttgtacgttttatgttcccattaggaataaaaatgttctttacattcacgtatatctagattctcaaatatttgtcgacaaataaaaaagatgcatggttcgtg

SEQ ID NO: 23057 - DNA, 2050 bp, Zea Mays
ctctcctaaaactctacctgcggggggtaagacagcctccgagcattatattaagaagaccgtcgagaaaacccccgaatccctggcccacccatacaaagcggtactgtagcccatgtgagaacactaccgcgaccggaactggaccgtagacctgtgctttgtcgttggacagacgaggggattttttaaccacagctgaaattcgctcccacggaaagtcgaacctaggacctgaggagtgctactcagaccacctaaccaactcggctttacctatttctttgtaggtgcaagtgttgaacttcatttcagttcttcttgaacatgcgggggacaaggttattccatttgcatgtcagctatcacaattttttcagatgatatggaatgaatctgcgggtgaaagcttgctacagatacaattactaacagcacttagaacttttgtttcttcgcttggattccagtcacctctttcttaccacatgcttattcctatactgcaaagtggtatcaatattgacagccctgatgctcttaatcttcttgaggacagtgttttgttgtgggaagcaaccctttcaaatgccccttccattgtacctcaacttctggatttattcccttaccttgtgggcatcatgaatagaagctttgaccatctggaggtcacaatgaaaataattgaggattacattatttttggcggttcagaatttttgaaaagccatggtgcaagcctagctaacatcattgatactattgttggaaatgtcaatgataaaggacttctcactgcacttcctattgttgatcttcttattcagatatttcctctggaagctccaccattgatatccagtgctcttcagaaacttaccttcatttcgttgagtcaagatgatggccaaaacccgtctaggacaactgtccgagcatcctctggggcgattcttgctaggcttctggtgatgaatacaaacttttcggcacaactattatcagagcctgctcttttggcaagcatccaacaagcagggatttctgtgaacaataatctgcttttttctttggttgatatgtggatcgacaaggtagatgacgcaaatgctatacagcagaaggaatacgcaatggcactttctgtaatcctgacattacaggtacctcaggtcattgacaaacttgatgacatactgagtgtctgcactactgtcattataggaagccgtgaagtaaagactgatgacgatactagcggcgatatcacaagctcttcatggataggcaacgatggttcaggttattccaacacttcaagcaaagagctgagaaagcgccaggtatagcatgctttacctagctattcatttccaaatacatgcaggtcttctgtaagggcactgtttatgattttttgttgttgttgttgttgttgactaggtaaaggattcagatcctatcaaacaaacatcgctagagatggtgttaagagagaacttaaaagcatgtgctgttttccatggggatgcagcattcaacgctgccatcggcaggatccatccatcttcgtttgctcagctgcaacaggccctgaatactgcataagagtgcatagctgcttactggattgtatggagcattacgtggagcaggcattgctttgtgctgacagacagttgaatcgcggtatgacacagcagtgcagtgcagagagagcatgtcctgatcttccgaaatataattggattggattggattaccgcggtcaatgtggatggccagagtttttatagctgtccttccaacatgactgactcgatcttctcccctcccccttctcaaatcatggccaggcatccatcctagttgatttttatcccttgtttagcgaggtgacgccgagattgttgtttgagaaggaaatctggaatgcaattttgttgtacgttttatgttcccattaggaataaaaatgttctttacattcacgtatatctagattctcaaatatttgtcgacaaataaaaaagatgcatggttcgtg

SEQ ID NO: 23058 - DNA, 2826 bp, Zea Mays
ctccgtcatctcacaacccaaagagaaacagccaaatcacagctcccaccacggcgccgccaccacctccagccccaccgccacggcggccggtgcaaccctttccgtcgcacccattgcgtgcgcagccgccctcctccccaccgctcggctcctgcgcgggcgaatgggttactcatccgccgccgccgccgccttcgccgtccttcccgccccctccccatcgtcctccgacgactccgacgacgccaataccctccctaccaaccccatcgtggagccggaagtagcctccccgcaccaaactccgcctccaaagctgcagcagctggagcgcggctgcaacttggcaatgacgccgctggggcgcgccggggacgtcgaccaggtcgtccacctcttctccgacctcatgctctccacctcaagcgccggcgtcccgcccagcgtgctctgctacaacacgctcctcaacgcgctcgtggaggccggccgcgcggtggaggcccgcagcgtgttcgacggaatgctcgcggcgggcgtggcgcccaacgcgtcgtccttcaacatcctcgtcaagctgtacgcgtggcggaccgccgacttccatcttgcctacgaccagatccacgccatgcggcgccacgggttgctgcccgacgtcggcaccttctccacgctcgtcacggggctgtgccgggcggggaagcttgacgaggcctggggcgtgctcgattggatgctgcaggaagggtgccgccccatggtgcacacgtacacgcccatcgtgcagggctattgtcgtcagggccagatcgaggaggctaccaacctgattggcttcatggaggatgccggttgtcctcccaatgctgtcacttacaatgttctgataagggcgctgtgtgacgatgccaggttcgctgaggtcgagcaggtgttagcagagattgaaactaagggccacgagctcagtacggttacctataatatatacatggatgctcttggcaagaaaggcatggctaaggaagcactcaagcagtttgaggccttgcaatgtaaagggctgcatcccacagcttttactttgagcatcattctaaattgcctttgctgtacctcgaggttttcacaagccatttccatcttggagaggagcacagacttaaatttctgcgctgctgttgttgcttacaacactgtgatgagcagactgtgtgacatgggcagatggccagctgttctggagctcttggcagacatgatcaagaaatgtatcatacccaacacacgcacgctcaacattttcattcatagtctttgcatcgctgataagctttctgtagctatgaaactggtctgtaatcaagggtttcctgcaaatgctgtgacatacaatacactcatccattcgttttacttaagaggagaggcctatgaggcggacaacatgtttgcgtacatgacagaagtagcaaatattgctccagatgaagtcacctataccataatggttgatggattatgcagacaaggaaaatttgataaggctactgatttttttaaggagtctctgaggaataggcttaggctgtcaaaggatcttcttactgcccttctaaacgggcttgctcgcagtgatagaaacacaaacatccttgttgtattccaagaaatcgaaagacagggctttgtccgttgttacttgatatttggtgatacagttagatcaatctgtcaggttggttttcgtcagcacacaaagatgtatggtctgccttttttgctggaaggaatgttgggacctggcaaggaagtttacccagcccataagggccaaggaaagggaaaatgatcgcaagaaagatggcaactgatgaacttcagttcgctctgaggtacaggcaggaatatacaattacactatatttgtcacagtatccagtagtgggagttcagaggcaaaacgatgaagatggaatttgtaatgaggagcaccacctttgggatttttttttgcaaagcacacacatgggaatagccagattgcacagcaggtagctgtattaatctctaatattgcacgctgggattacccaaaagagcggtatgtgtttatgatacaggtctgccaatgttctaatttcccatcatgtgtttatggccttgtttcaaaccccgaagtaggtggcgattaaacattttgccatggctctgaagaattatggagagaaaactcagacgagtccttcaaagacaggcaaatcgctaagttgatttaagcaaggcagaaatccatccatattgtttcgttcaccaaagtgtgcttccagctacagttgactatggcagaagattattatagatcctgaacggactgactgctcgaggagtttcagtactggactgcaggtcccacagagggtcaatttttaatataccctgatgaaagctactgaacccaggtccaatccacacgccggatcgggcaccaaatccttccagctgcctggatcagcgcctcaggggagagaggaagaagctgcaatggaaggaaaggtttagcagaattggtatttaggggctgcacacagccaggtatgtgcgttgcagtcgggcaaggctgttatcgtctatgttgttgttctagttgccggcatagaattatactgccacgtgatgatggctcatttggattatatatgcaaaagcaaagtcattatcttccgcctaattaagttgtttctctcccaaatcagaccttccatccaaatatagcaaactcggcttaattgagcagtcaaatattctttgtcctctcca

SEQ ID NO: 23059 - DNA, 2825 bp, Zea Mays
ctccgtcatctcacaacccaaagagaaacagccaaatcacagctcccaccacggcgccgccaccacctccagccccaccgccacggcggccggtgcaaccctttccgtcgcacccattgcgtgcgcagccgccctcctccccaccgctcggctcctgcgcgggcgaatgggttactcatccgccgccgccgccgccttcgccgtccttcccgccccctccccatcgtcctccgacgactccgacgacgccaataccctccctaccaaccccatcgtggagccggaagtagcctccccgcaccaaactccgcctccaaagctgcagcagctggagcgcggctgcaacttggcaatgacgccgctggggcgcgccggggacgtcgaccaggtcgtccacctcttctccgacctcatgctctccacctcaagcgccggcgtcccgcccagcgtgctctgctacaacacgctcctcaacgcgctcgtggaggccggccgcgcggtggaggcccgcagcgtgttcgacggaatgctcgcggcgggcgtggcgcccaacgcgtcgtccttcaacatcctcgtcaagctgtacgcgtggcggaccgccgacttccatcttgcctacgaccagatccacgccatgcggcgccacgggttgctgcccgacgtcggcaccttctccacgctcgtcacggggctgtgccgggcggggaagcttgacgaggcctggggcgtgctcgattggatgctgcaggaagggtgccgccccatggtgcacacgtacacgcccatcgtgcagggctattgtcgtcagggccagatcgaggaggctaccaacctgattggcttcatggaggatgccggttgtcctcccaatgctgtcacttacaatgttctgataagggcgctgtgtgacgatgccaggttcgctgaggtcgagcaggtgttagcagagattgaaactaagggccacgagctcagtacggttacctataatatatacatggatgctcttggcaagaaaggcatggctaaggaagcactcaagcagtttgaggccttgcaatgtaaagggctgcatcccacagcttttactttgagcatcattctaaattgcctttgctgtacctcgaggttttcacaagccatttccatcttggagaggagcacagacttaaatttctgcgctgctgttgttgcttacaacactgtgatgagcagactgtgtgacatgggcagatggccagctgttctggagctcttggcagacatgatcaagaaatgtatcatacccaacacacgcacgctcaacattttcattcatagtctttgcatcgctgataagctttctgtagctatgaaactggtctgtaatcaagggtttcctgcaaatgctgtgacatacaatacactcatccattcgttttacttaagaggagaggcctatgaggcggacaacatgtttgcgtacatgacagaagtagcaaatattgctccagatgaagtcacctataccataatggttgatggattatgcagacaaggaaaatttgataaggctactgatttttttaaggagtctctgaggaataggcttaggctgtcaaaggatcttcttactgcccttctaaacgggcttgctcgcagtgatagaaacacaaacatccttgttgtattccaagaaatcgaaagacagggctttgtccgttgttacttgatatttggtgatacagttagatcaatctgtcaggttggttttcgtcagcacacaaagatgtatggtctgccttttttgctggaaggaatgttgggacctggcaaggaagtttacccagcccataagggccaaggaaagggaaaatgatcgcaagaaagatggcaactgatgaacttcagttcgctctgaggtacaggcaggaatatacaattacactatatttgtcacagtatccagtagtgggagttcagaggcaaaacgatgaagatggaatttgtaatgaggagcaccacctttgggatttttttttgcaaagcacacacatgggaatagccagattgcacagcaggtagctgtattaatctctaatattgcacgctgggattacccaaaagagcggtatgtgtttatgatacagtctgccaatgttctaatttcccatcatgtgtttatggccttgtttcaaaccccgaagtaggtggcgattaaacattttgccatggctctgaagaattatggagagaaaactcagacgagtccttcaaagacaggcaaatcgctaagttgatttaagcaaggcagaaatccatccatattgtttcgttcaccaaagtgtgcttccagctacagttgactatggcagaagattattatagatcctgaacggactgactgctcgaggagtttcagtactggactgcaggtcccacagagggtcaatttttaatataccctgatgaaagctactgaacccaggtccaatccacacgccggatcgggcaccaaatccttccagctgcctggatcagcgcctcaggggagagaggaagaagctgcaatggaaggaaaggtttagcagaattggtatttaggggctgcacacagccaggtatgtgcgttgcagtcgggcaaggctgttatcgtctatgttgttgttctagttgccggcatagaattatactgccacgtgatgatggctcatttggattatatatgcaaaagcaaagtcattatcttccgcctaattaagttgtttctctcccaaatcagaccttccatccaaatatagcaaactcggcttaattgagcagtcaaatattctttgtcctctcca

SEQ ID NO: 23060 - DNA, 3012 bp, Zea Mays
ctccgtcatctcacaacccaaagagaaacagccaaatcacagctcccaccacggcgccgccaccacctccagccccaccgccacggcggccggtgcaaccctttccgtcgcacccattgcgtgcgcagccgccctcctccccaccgctcggctcctgcgcgggcgaatgggttactcatccgccgccgccgccgccttcgccgtccttcccgccccctccccatcgtcctccgacgactccgacgacgccaataccctccctaccaaccccatcgtggagccggaagtagcctccccgcaccaaactccgcctccaaagctgcagcagctggagcgcggctgcaacttggcaatgacgccgctggggcgcgccggggacgtcgaccaggtcgtccacctcttctccgacctcatgctctccacctcaagcgccggcgtcccgcccagcgtgctctgctacaacacgctcctcaacgcgctcgtggaggccggccgcgcggtggaggcccgcagcgtgttcgacggaatgctcgcggcgggcgtggcgcccaacgcgtcgtccttcaacatcctcgtcaagctgtacgcgtggcggaccgccgacttccatcttgcctacgaccagatccacgccatgcggcgccacgggttgctgcccgacgtcggcaccttctccacgctcgtcacggggctgtgccgggcggggaagcttgacgaggcctggggcgtgctcgattggatgctgcaggaagggtgccgccccatggtgcacacgtacacgcccatcgtgcagggctattgtcgtcagggccagatcgaggaggctaccaacctgattggcttcatggaggatgccggttgtcctcccaatgctgtcacttacaatgttctgataagggcgctgtgtgacgatgccaggttcgctgaggtcgagcaggtgttagcagagattgaaactaagggccacgagctcagtacggttacctataatatatacatggatgctcttggcaagaaaggcatggctaaggaagcactcaagcagtttgaggccttgcaatgtaaagggctgcatcccacagcttttactttgagcatcattctaaattgcctttgctgtacctcgaggttttcacaagccatttccatcttggagaggagcacagacttaaatttctgcgctgctgttgttgcttacaacactgtgatgagcagactgtgtgacatgggcagatggccagctgttctggagctcttggcagacatgatcaagaaatgtatcatacccaacacacgcacgctcaacattttcattcatagtctttgcatcgctgataagctttctgtagctatgaaactggtctgtaatcaagggtttcctgcaaatgctgtgacatacaatacactcatccattcgttttacttaagaggagaggcctatgaggcggacaacatgtttgcgtacatgacagaagtagcaaatattgctccagatgaagtcacctataccataatggttgatggattatgcagacaaggaaaatttgataaggctactgatttttttaaggagtctctgaggaataggcttaggctgtcaaaggatcttcttactgcccttctaaacgggcttgctcgcagtgatagaaacacaaacatccttgttgtattccaagaaatcgaaagacagggctttgtccgttgttacttgatatttggtgatacagttagatcaatctgtcaggttggttttcgtcagcacacaaagatgtatggtctgccttttttgctggaaggaatgttgggacctggcaaggaagtttacccagcccataagggccaaggaaagggaaaatgatcgcaagaaagatggcaactggtacacgtctctttcaaatttgtcgtcaaatacatctgactagtgctaagtgcttccagatggattaacagcattacacatttctatcaccaactcttagattggaatagtgatcagtgggtggtcatgattttgccttcaaagtgcctcaatttttttcccaacatgaaatactgtgtatatattcaatttaatttgaaatattggctctatctaaatgtcaaccttttcttgattacaattgcagatgaacttcagttcgctctgaggtacaggcaggaatatacaattacactatatttgtcacagtatccagtagtgggagttcagaggcaaaacgatgaagatggaatttgtaatgaggagcaccacctttgggatttttttttgcaaagcacacacatgggaatagccagattgcacagcaggtagctgtattaatctctaatattgcacgctgggattacccaaaagagcggtatgtgtttatgatacaggtggcgattaaacattttgccatggctctgaagaattatggagagaaaactcagacgagtccttcaaagacaggcaaatcgctaagttgatttaagcaaggcagaaatccatccatattgtttcgttcaccaaagtgtgcttccagctacagttgactatggcagaagattattatagatcctgaacggactgactgctcgaggagtttcagtactggactgcaggtcccacagagggtcaatttttaatataccctgatgaaagctactgaacccaggtccaatccacacgccggatcgggcaccaaatccttccagctgcctggatcagcgcctcaggggagagaggaagaagctgcaatggaaggaaaggtttagcagaattggtatttaggggctgcacacagccaggtatgtgcgttgcagtcgggcaaggctgttatcgtctatgttgttgttctagttgccggcatagaattatactgccacgtgatgatggctcatttggattatatatgcaaaagcaaagtcattatcttccgcctaattaagttgtttctctcccaaatcagaccttccatccaaatatagcaaactcggcttaattgagcagtcaaatattctttgtcctctcca

SEQ ID NO: 23061 - DNA, 1428 bp, Zea Mays
ttaaaaaaatatctctaatatagatatttgcttatagaggacatgatttataggacgttgttggagaaaaaggagatatagaggatagaatattttagaaaagactatagatgacagatatagaaacggatatagagtacattgctggtctaacgatgtggctaggccgataacagaaaacctgacctgaacggctgtaggcaaaccagttgggtgacactgacagcaggggcgggcggggccgatggattttttgaatcggattaggcagccacccatttcaagccgaagagaggaggagagccaagcggcgactggacctggagagccggcatggcacgcctgctcctctccgtctcagtccccatgtccgctagcagcagccgccgcattgtggttcctggtaccgcgcggcaccgaggccgcagcggcgtctgtgtcgctgtgcccgccacctccaccgccaccgccacccaacaagaatttgaccccgcggcggcgccaccgttcgggctgggcgacatccgcgccgccatccccaagcactgctgggtgaaggacccctggcgctccatgggctacgtggtgcgcgacgtggtcctggtgctgggtctcgccgccgccgcggcgcgcctcgacagctggctcgtctggccgctctactgggcggcacagggcaccatgttctgggcgctcttcgtgctgggacacgactgcggccacggcagcttctccaacaaccccagactcaacagcgtggtcggtcacattctgcactcctccatcctggtgccatacaacggctggcggattagccacaggacgcaccaccagaaccacggccacgtggacaaggacgagtcatggcatcccctccccgagcgtctgttcaagagcctggacagcgtcgtcctgatgctgcgcttcaggctgcccttccctatgctcgtctacccattctacctggccaacaggagccccggcaagtccggctcccatttccacccggccagcgacctcttccagcccagcgagagcaaacaagtgctcacctccacggcgtgctggctcgccatggtcgcactcctagctggcctcgccttcctcatgggccctctgcagatgctcaagctctacctggtcccctactgggtttttgtcatgtggctcgacttcgtcacctacctccgcttattgctgtcctcacatatgcagtacattatttgcaaaatgtaagtggactacctgcgccttagatctctctgcaaaagttggagacatggggcttttcctgacaaatcatgtattgctgcttgatgacaaaatgagaatattctgacaaaataaataatgcatggaaatagaaaacgaggtaccaagtcttctttctggtccatacagtgcaatgtattaagctgttataaattg

SEQ ID NO: 23062 - DNA, 2361 bp, Zea Mays
cgggagtggagtgcggagagcagaaagcaagagcgcagctgcagtgggaggaggcatcacgtgccgtccccttcccttcccttcccttccatcctcacccacattccattcggatcgattccatccccagccccaaaccctaaccctaccaccgccaccatgtccgagcgcatcgacctcaacaacacgtcccaaaccctggcgccacccaagcgcggccgcggccgcccccgcaagaaccccccgcctcccgctcacccgcgccctccggatcccgacacccccatggtcagcggcttcgctccgggcgacatggtctggggaaagaagctcaaccacgccgcctggccgggcctcatctactccgccggagggaacagcaccggccacgaggcccagctcctcgtctcctacttcggcgacaaggccttcgcctggtgcgacgcagccgagctcaggccctacgagccctacttccccgtcgccgagctctacgacgacggcggcgaggactttgacgccgccgtcgaggcctctctcgacgagttctcccgccgcgtcgaggccgccctcgcctccgccgcccgccccttcgcctccgccgatttcctcgcctcgctccacgatctcgccgcggatcgcatgggcttcaccaacagggtgcaagccgccgtcgccaaggcgcatctcagagccttcgacgccttcagggctctgccggacccacctcagtacaccttggagctcggtctactcccacacgtcccgctcccgctgcccgatcctaaagctgacacggatgccgccgccgccttcaccacccccgcatccagttccaggaggggcaggaagaggaaggaggaactcgtcaaggacgacgactccgatgaggactgggaccccagcaagaggggtgccaccgacttggattccgatgtggacttcgaccacaggagggggtccaggggcaggggcagggggagggggggcagcagcggtggcagcggcaggcctcgaggaaggcccaggaaaacagatgcctgcagggacgcaccacagctcaaggacgaagatggcattcaagagtatccatcggctgatgagatgttgctgcagcttctgtccatcgccactgatcctgtaaatggcaattatgactctgctcctgtgatcgttagcttcttctcaaagcacaaggactccaaggcgcctagtgtatatgaagataaagagctgcttgagaattttggttgcaagaagggtaggaaaaagcccgtcagaagcttgggcctagctccaaagccagaagccagtgatgataaggatcagttcatgactgtggatggccagaggggccgtaggaagtctgctgggagcttgtactcagctagaaaggccgaagattcatattggtgtgatattatcatcagcgatttcgacgacggtgatagtgactatgaaggttgcaagaggaagcggccctctcagaacactaacaggagcgctaataagaagatgaagcaagaggaaccacctcaaggagccccatcagatatggaaaatggggctcctgcagatccttcgtcgaatgaaaaacctgcagatggcccagccgctcttattctacattttagcagtccagaagctattccttctgttgatgacatcaatagcatattccgtattcatggaccgatcgtggagcgtgagactgtgatcactaagaagtcaaagattgcaaaagtagttttctctaagagcgctgatgcagagagcgcatatcacagttcggggaagcataacgcatttggtccatcgcttctcacatctgaaattaaatacttgccatcggagcctcaggcttcttaaatggtgcagtctgatggactggatacactgcgattcacagaggaaatgcaccatgaagcttggagcaacgaagcataagctggtgtcactgactttagagttaggatggctcactgaccaggtcacatcaagtcactgtgttgagtgagcaaattttaggctgtctacttggtaccggagttaatttatgttgaattattagttggtagattagattatgtagcgtgatgcgcttccttttatgttagaaacttatcttttttttttgtattgcctattaattgcacagctgtggtctgtggatgtctctattatgttggtttttttctcttctatcagcagcaactgcttatttgattgtggcgaggctagtgaagcagttttttctctctccatattattagtttattactatgatgagtgagctgaagccgtgttgtacatgctcttgtgtagtgtgctgtgcttgctatgcattttgtttattagaaa

SEQ ID NO: 23063 - DNA, 3072 bp, Zea Mays
cggattttgatttcatcgtatcgtatctttcttcagaggggagcggggccggcgggccaccagcaacctcctcctttttgctccacctggcttgccttgcctggtcctgcttgcttgcactttttgcctttttcggaggccacgggtcaccgctaacctccatccatccatttgccgattcacctacacagcaggaacaaacgaggagccctccaaggatatgcgccccgccgcttatacattaaccaaagacttgcctccaatcactcgtgtctacctcttcgagttgcgaggatgcctgcgaatgaccaccatcccaacggcctgctccaggagtcagcccctggactccagcatgatgatatggaaaaccagcagcagcaagtctgctgggagcgcttcctcctaaaggacactctcaacgtcttgctcgtggagagtgatgcttcaaccaggcaggttgtcagtgccctgcttcgttgctgcatgtaccaagttatctctgccaaaaatggccagcaagcatgggcttatcttgaagataagggaaacaacatagatcttgttttgactgaggtttttatgcccggtgtatctgggatttctctgctgagtaggatcatgagacacaatattttcaagaatattccagtgattatgatgtcttcgagtgatgatatgagtacagtctttaaatgtctgtcaaaaggtgctgttgactttttggtcaagcctatacgtaagaatgaacttaagaacctttggcagcatgtatggagacaacggtgtcacagctccagtggtagtggaagtgaaagtggcattcagacccagaagtgtgccaaatcaaaaggtgtcaatgaatccggtaacaacagtggtagcaacgatgacgaagcaggcatgggacttaatgcaagggatgacagtgataatggcagtggcactcaagatttaaacgatctagtggggttgggtggcgttcagagaatggcacagaactcgtggactaagcttgctgtggagatcgacagtccacaagctacgtctctggatcagttagccgatccacccaatagtacctgtgcgcaagtaatccactcaaagtcagagatatgtagcaacagatggctaccagataagagcaacagaaactgcaagaagccaaaaaacactaatgatgactttaagggaaaggacctggagataggtggccctgaaaatttatatatgggtcaccaatcttccccaaatgggagatccatcaaagcagcagatcatgaaaacaattcaaaggaatcaatgatggaaaatttagaggagccaactgttcgagctgctgacctaattggttcaatggccaaaaacatggataccccacaggcagcaagagctgcagaagatacccctaatttctcttccaaagtgccagaagggaaaggtaagaataaccagaatgataagtatgttttgccatcacttgagctgagtttgaagaggtcgagatcatgtggagatggtgccaacaacaaaaatacagtcaaagacgacgaacaacggaattgtgtattaagacgatcaaatctgtcggcttttacaaggtaccacacatctgcggcttccaatcaaggtgggacaggattggtaggtagctgttcgccgcatgataacagctcggaggctgtgaaaacggattctacctacaacatgaagtcaaattcagatgctgccccgataaaacaaggctccaacggcagtagcaatgacaatgacatgggttccactacaaaggatgttgtgacaaaacccatgttgccctctgctattaaggctaatggatacacatcagcgttccatcctgtgcagcagtggatggttccagctaatgcaacagcagggaaaacgaaggctgatgaaaatacagccagaaatcactgcgtccattttgagaatggtgggtcaggagccctgcaatgtggttcctccaacgtatttgatcccccacttgaaggccaagctacaaataactatggtggtgtgaaagccgggagcaactcaggcagcaacaaggggcagaacaatgggagtacggctgctgcaaatgctggactggcagaaacggagatacaggccatggacaaaagtggagttggaggtggcaatggcaatggcaatgggagtggcagtggcagtggcaatgacacatatgtcagacggcttgctgcgaacatgacaccgcgacaagcacagctaaagaaatatagagagaaaaagaaagaccggaactttgggaagaaggtgcggtaccagagcagaaagaggctagccgaccagcggccacgggttcgtggacagttcgtcaagcaagctgtgcaaaatcaggacggagctagagagagatgaccgacacccccccccccctcccctgtggctgtgctgctctctggcttcagctccctactgactccgactccacctctgctggcatgcatggttgccgctttggactcaaaacacttgacagttagacgtgcggttgatgattcttccttctctcgtggtgtggactgatatggtcaacaacacagcctccttccttttcatcattggtttcttcacatctagaatctactgcctgaccgggaaagaataaacaaggaacttcttcttctatacatgtgtatgtatgtatgcattcctaagcatgtaatgtagaagaataagtgcgtggcttgactctagatggactttaattttagacagagtcttgctcgctctcctacatcatctagtgtaactaaagtgttgtcatgtatggtcttggatcactgtctatcaatatattatatcgtggcgttccttgataagtctgcaggcagaagcatgacaaaaattcagggagggccaagaaaccatatgacaaaatcaaccaacaccgtaaaataactattgtcatatagaattcaagttttatatcaatacatgatacaagttcaaagaagtaaatcatacaaataaaaaagaaacataccgttaagtttttgttgacctcacaattgtctcttagttttg

SEQ ID NO: 23064 - DNA, 2974 bp, Zea Mays
ccaccagcaacctcctcctttttgctccacctggcttgccttgcctggtcctgcttgcttgcactttttgcctttttcggaggccacgggtcaccgctaacctccatccatccatttgccgattcacctacacagcaggaacaaacgaggagccctccaaggatatgcgccccgccgcttatacattaaccaaagacttgcctccaatcactcgtgtctacctcttcgagttgcgaggatgcctgcgaatgaccaccatcccaacggcctgctccaggagtcagcccctggactccagcatgatgatatggaaaaccagcagcagcaagtctgctgggagcgcttcctcctaaaggacactctcaacgtcttgctcgtggagagtgatgcttcaaccaggcaggttgtcagtgccctgcttcgttgctgcatgtaccaagttatctctgccaaaaatggccagcaagcatgggcttatcttgaagataagggaaacaacatagatcttgttttgactgaggtttttatgcccggtgtatctgggatttctctgctgagtaggatcatgagacacaatattttcaagaatattccagtgattatgatgtcttcgagtgatgatatgagtacagtctttaaatgtctgtcaaaaggtgctgttgactttttggtcaagcctatacgtaagaatgaacttaagaacctttggcagcatgtatggagacaacggtgtcacagctccagtggtagtggaagtgaaagtggcattcagacccagaagtgtgccaaatcaaaaggtgtcaatgaatccggtaacaacagtggtagcaacgatgacgaagcaggcatgggacttaatgcaagggatgacagtgataatggcagtggcactcaagcacagaactcgtggactaagcttgctgtggagatcgacagtccacaagctacgtctctggatcagttagccgatccacccaatagtacctgtgcgcaagtaatccactcaaagtcagagatatgtagcaacagatggctaccagataagagcaacagaaactgcaagaagccaaaaaacactaatgatgactttaagggaaaggacctggagataggtggccctgaaaatttatatatgggtcaccaatcttccccaaatgggagatccatcaaagcagcagatcatgaaaacaattcaaaggaatcaatgatggaaaatttagaggagccaactgttcgagctgctgacctaattggttcaatggccaaaaacatggataccccacaggcagcaagagctgcagaagatacccctaatttctcttccaaagtgccagaagggaaaggtaagaataaccagaatgataagtatgttttgccatcacttgagctgagtttgaagaggtcgagatcatgtggagatggtgccaacaacaaaaatacagtcaaagacgacgaacaacggaattgtgtattaagacgatcaaatctgtcggcttttacaaggtaccacacatctgcggcttccaatcaaggtgggacaggattggtaggtagctgttcgccgcatgataacagctcggaggctgtgaaaacggattctacctacaacatgaagtcaaattcagatgctgccccgataaaacaaggctccaacggcagtagcaatgacaatgacatgggttccactacaaaggatgttgtgacaaaacccatgttgccctctgctattaaggctaatggatacacatcagcgttccatcctgtgcagcagtggatggttccagctaatgcaacagcagggaaaacgaaggctgatgaaaatacagccagaaatcactgcgtccattttgagaatggtgggtcaggagccctgcaatgtggttcctccaacgtatttgatcccccacttgaaggccaagctacaaataactatggtggtgtgaaagccgggagcaactcaggcagcaacaaggggcagaacaatgggagtacggctgctgcaaatgctggactggcagaaacggagatacaggccatggacaaaagtggagttggaggtggcaatggcaatggcaatgggagtggcagtggcagtggcaatgacacatatgtcagacggcttgctgcgaacatgacaccgcgacaagcacagctaaagaaatatagagagaaaaagaaagaccggaactttgggaagaaggtgcggtaccagagcagaaagaggctagccgaccagcggccacgggttcgtggacagttcgtcaagcaagctgtgcaaaatcaggacggagctagagagagatgaccgacacccccccccccctcccctgtggctgtgctgctctctggcttcagctccctactgactccgactccacctctgctggcatgcatggttgccgctttggactcaaaacacttgacagttagacgtgcggttgatgattcttccttctctcgtggtgtggactgatatggtcaacaacacagcctccttccttttcatcattggtttcttcacatctagaatctactgcctgaccgggaaagaataaacaaggaacttcttcttctatacatgtgtatgtatgtatgcattcctaagcatgtaatgtagaagaataagtgcgtggcttgactctagatggactttaattttagacagagtcttgctcgctctcctacatcatctagtgtaactaaagtgttgtcatgtatggtcttggatcactgtctatcaatatattatatcgtggcgttccttgataagtctgcaggcagaagcatgacaaaaattcagggagggccaagaaaccatatgacaaaatcaaccaacaccgtaaaataactattgtcatatagaattcaagttttatatcaatacatgatacaagttcaaagaagtaaatcatacaaataaaaaagaaacataccgttaagtttttgttgacctcacaattgtctcttagttttg

SEQ ID NO: 23065 - DNA, 2599 bp, Zea Mays
cagcaacctcctcctttttgctccacctggcttgccttgcctggtcctgcttgcttgcactttttgcctttttcggaggccacgggtcaccgctaacctccatccatccatttgccgattcacctacacagcaggaacaaacgaggagccctccaaggatatgcgccccgccgcttatacattaaccaaagacttgcctccaatcactcgtgtctacctcttcgagttgcgaggatgcctgcgaatgaccaccatcccaacggcctgctccaggagtcagcccctggactccagcatgatgatatggaaaaccagcagcagcaagtctgctgggagcgcttcctcctaaaggacactctcaacgtcttgctcgtggagagtgatgcttcaaccaggcaggttgtcagtgccctgcttcgttgctgcatgtaccaaggcacagaactcgtggactaagcttgctgtggagatcgacagtccacaagctacgtctctggatcagttagccgatccacccaatagtacctgtgcgcaagtaatccactcaaagtcagagatatgtagcaacagatggctaccagataagagcaacagaaactgcaagaagccaaaaaacactaatgatgactttaagggaaaggacctggagataggtggccctgaaaatttatatatgggtcaccaatcttccccaaatgggagatccatcaaagcagcagatcatgaaaacaattcaaaggaatcaatgatggaaaatttagaggagccaactgttcgagctgctgacctaattggttcaatggccaaaaacatggataccccacaggcagcaagagctgcagaagatacccctaatttctcttccaaagtgccagaagggaaaggtaagaataaccagaatgataagtatgttttgccatcacttgagctgagtttgaagaggtcgagatcatgtggagatggtgccaacaacaaaaatacagtcaaagacgacgaacaacggaattgtgtattaagacgatcaaatctgtcggcttttacaaggtgcaaaacataatatcagtgtcattagtgagttatgagagcaacagtatgttacgtactaacagttaccacttttattgcaaggtaccacacatctgcggcttccaatcaaggtgggacaggattggtaggtagctgttcgccgcatgataacagctcggaggctgtgaaaacggattctacctacaacatgaagtcaaattcagatgctgccccgataaaacaaggctccaacggcagtagcaatgacaatgacatgggttccactacaaaggatgttgtgacaaaacccatgttgccctctgctattaaggctaatggatacacatcagcgttccatcctgtgcagcagtggatggttccagctaatgcaacagcagggaaaacgaaggctgatgaaaatacagccagaaatcactgcgtccattttgagaatggtgggtcaggagccctgcaatgtggttcctccaacgtatttgatcccccacttgaaggccaagctacaaataactatggtggtgtgaaagccgggagcaactcaggcagcaacaaggggcagaacaatgggagtacggctgctgcaaatgctggactggcagaaacggagatacaggccatggacaaaagtggagttggaggtggcaatggcaatggcaatgggagtggcagtggcagtggcaatgacacatatgtcagacggcttgctgcgaacatgacaccgcgacaagcacagctaaagaaatatagagagaaaaagaaagaccggaactttgggaagaaggtgcggtaccagagcagaaagaggctagccgaccagcggccacgggttcgtggacagttcgtcaagcaagctgtgcaaaatcaggacggagctagagagagatgaccgacacccccccccccctcccctgtggctgtgctgctctctggcttcagctccctactgactccgactccacctctgctggcatgcatggttgccgctttggactcaaaacacttgacagttagacgtgcggttgatgattcttccttctctcgtggtgtggactgatatggtcaacaacacagcctccttccttttcatcattggtttcttcacatctagaatctactgcctgaccgggaaagaataaacaaggaacttcttcttctatacatgtgtatgtatgtatgcattcctaagcatgtaatgtagaagaataagtgcgtggcttgactctagatggactttaattttagacagagtcttgctcgctctcctacatcatctagtgtaactaaagtgttgtcatgtatggtcttggatcactgtctatcaatatattatatcgtggcgttccttgataagtctgcaggcagaagcatgacaaaaattcagggagggccaagaaaccatatgacaaaatcaaccaacaccgtaaaataactattgtcatatagaattcaagttttatatcaatacatgatacaagttcaaagaagtaaatcatacaaataaaaaagaaacataccgttaagtttttgttgacctcacaattgtctcttagttttg

SEQ ID NO: 23066 - DNA, 477 bp, Zea Mays
cttccctcctcctcctcctcctgctgctgctcctcctcctcctcccccctgggacgtctaaagcttgcttgcactttttgcctttttcggaggccacgggtcaccgctaacctccatccatccatttgccgattcacctacacagcaggaacaaacgaggagccctccaaggatatgcgccccgccgcttatacattaaccaaagacttgcctccaatcactcgtgtctacctcttcgagttgcgaggatgcctgcgaatgaccaccatcccaacggcctgctccaggagtcagcccctggactccagcatgatgatatggaaaaccagcagcagcaagtctgctgggagcgcttcctcctaaaggacactctcaacgtcttgctcgtggagagtgatgcttcaaccaggcaggttgtcagtgccctgcttcgttgctgcatgtaccaaggtccaacccccgcacgctgtgttgtcc

SEQ ID NO: 23067 - DNA, 565 bp, Zea Mays
cttccctcctcctcctcctcctgctgctgctcctcctcctcctcccccctgggacgtctaaagcttgcttgcactttttgcctttttcggaggccacgggtcaccgctaacctccatccatccatttgccgattcacctacacagcaggaacaaacgaggagccctccaaggatatgcgccccgccgcttatacattaaccaaagacttgcctccaatcactcgtgtctacctcttcgagttgcgaggatgcctgcgaatgaccaccatcccaacggcctgctccaggagtcagcccctggactccagcatgatgatatggaaaaccagcagcagcaagtctgctgggagcgcttcctcctaaaggacactctcaacgtcttgctcgtggagagtgatgcttcaaccaggcaggttgtcagtgccctgcttcgttgctgcatgtaccaaggtttatgcatccggaggctcaagttggatactccacagcgggtgcacaaaccacatgaccggggagaaaaggatgttctcctcatatgagaaaaatcaagatccccaacgagcta

SEQ ID NO: 23068 - DNA, 3026 bp, Zea Mays
cttccctcctcctcctcctcctgctgctgctcctcctcctcctcccccctgggacgtctaaagcttgcttgcactttttgcctttttcggaggccacgggtcaccgctaacctccatccatccatttgccgattcacctacacagcaggaacaaacgaggagccctccaaggatatgcgccccgccgcttatacattaaccaaagacttgcctccaatcactcgtgtctacctcttcgagttgcgaggatgcctgcgaatgaccaccatcccaacggcctgctccaggagtcagcccctggactccagcatgatgatatggaaaaccagcagcagcaagtctgctgggagcgcttcctcctaaaggacactctcaacgtcttgctcgtggagagtgatgcttcaaccaggcaggttgtcagtgccctgcttcgttgctgcatgtaccaagttatctctgccaaaaatggccagcaagcatgggcttatcttgaagataagggaaacaacatagatcttgttttgactgaggtttttatgcccggtgtatctgggatttctctgctgagtaggatcatgagacacaatattttcaagaatattccagtgattatgatgtcttcgagtgatgatatgagtacagtctttaaatgtctgtcaaaaggtgctgttgactttttggtcaagcctatacgtaagaatgaacttaagaacctttggcagcatgtatggagacaacggtgtcacagctccagtggtagtggaagtgaaagtggcattcagacccagaagtgtgccaaatcaaaaggtgtcaatgaatccggtaacaacagtggtagcaacgatgacgaagcaggcatgggacttaatgcaagggatgacagtgataatggcagtggcactcaagatttaaacgatctagtggggttgggtggcgttcagagaatggcacagaactcgtggactaagcttgctgtggagatcgacagtccacaagctacgtctctggatcagttagccgatccacccaatagtacctgtgcgcaagtaatccactcaaagtcagagatatgtagcaacagatggctaccagataagagcaacagaaactgcaagaagccaaaaaacactaatgatgactttaagggaaaggacctggagataggtggccctgaaaatttatatatgggtcaccaatcttccccaaatgggagatccatcaaagcagcagatcatgaaaacaattcaaaggaatcaatgatggaaaatttagaggagccaactgttcgagctgctgacctaattggttcaatggccaaaaacatggataccccacaggcagcaagagctgcagaagatacccctaatttctcttccaaagtgccagaagggaaaggtaagaataaccagaatgataagtatgttttgccatcacttgagctgagtttgaagaggtcgagatcatgtggagatggtgccaacaacaaaaatacagtcaaagacgacgaacaacggaattgtgtattaagacgatcaaatctgtcggcttttacaaggtaccacacatctgcggcttccaatcaaggtgggacaggattggtaggtagctgttcgccgcatgataacagctcggaggctgtgaaaacggattctacctacaacatgaagtcaaattcagatgctgccccgataaaacaaggctccaacggcagtagcaatgacaatgacatgggttccactacaaaggatgttgtgacaaaacccatgttgccctctgctattaaggctaatggatacacatcagcgttccatcctgtgcagcagtggatggttccagctaatgcaacagcagggaaaacgaaggctgatgaaaatacagccagaaatcactgcgtccattttgagaatggtgggtcaggagccctgcaatgtggttcctccaacgtatttgatcccccacttgaaggccaagctacaaataactatggtggtgtgaaagccgggagcaactcaggcagcaacaaggggcagaacaatgggagtacggctgctgcaaatgctggactggcagaaacggagatacaggccatggacaaaagtggagttggaggtggcaatggcaatggcaatgggagtggcagtggcagtggcaatgacacatatgtcagacggcttgctgcgaacatgacaccgcgacaagcacagctaaagaaatatagagagaaaaagaaagaccggaactttgggaagaaggtgcggtaccagagcagaaagaggctagccgaccagcggccacgggttcgtggacagttcgtcaagcaagctgtgcaaaatcaggacggagctagagagagatgaccgacacccccccccccctcccctgtggctgtgctgctctctggcttcagctccctactgactccgactccacctctgctggcatgcatggttgccgctttggactcaaaacacttgacagttagacgtgcggttgatgattcttccttctctcgtggtgtggactgatatggtcaacaacacagcctccttccttttcatcattggtttcttcacatctagaatctactgcctgaccgggaaagaataaacaaggaacttcttcttctatacatgtgtatgtatgtatgcattcctaagcatgtaatgtagaagaataagtgcgtggcttgactctagatggactttaattttagacagagtcttgctcgctctcctacatcatctagtgtaactaaagtgttgtcatgtatggtcttggatcactgtctatcaatatattatatcgtggcgttccttgataagtctgcaggcagaagcatgacaaaaattcagggagggccaagaaaccatatgacaaaatcaaccaacaccgtaaaataactattgtcatatagaattcaagttttatatcaatacatgatacaagttcaaagaagtaaatcatacaaataaaaaagaaacataccgttaagtttttgttgacctcacaattgtctcttagttttg

SEQ ID NO: 23069 - DNA, 2909 bp, Zea Mays
cttccctcctcctcctcctcctgctgctgctcctcctcctcctcccccctgggacgtctaaagcttgcttgcactttttgcctttttcggaggccacgggtcaccgctaacctccatccatccatttgccgattcacctacacagcaggaacaaacgaggagccctccaaggatatgcgccccgccgcttatacattaaccaaagacttgcctccaatcactcgtgtctacctcttcgagttgcgaggatgcctgcgaatgaccaccatcccaacggcctgctccaggagtcagcccctggactccagcatgatgatatggaaaaccagcagcagcaagtctgctgggagcgcttcctcctaaaggacactctcaacgtcttgctcgtggagagtgatgcttcaaccaggcaggttgtcagtgccctgcttcgttgctgcatgtaccaagttatctctgccaaaaatggccagcaagcatgggcttatcttgaagataagggaaacaacatagatcttgttttgactgaggtttttatgcccggtgtatctgggatttctctgctgagtaggatcatgagacacaatattttcaagaatattccagtgattatgatgtcttcgagtgatgatatgagtacagtctttaaatgtctgtcaaaaggtgctgttgactttttggtcaagcctatacgtaagaatgaacttaagaacctttggcagcatgtatggagacaacggtgtcacagctccagtggtagtggaagtgaaagtggcattcagacccagaagtgtgccaaatcaaaaggtgtcaatgaatccggtaacaacagtggtagcaacgatgacgaagcaggcatgggacttaatgcaagggatgacagtgataatggcagtggcactcaagcacagaactcgtggactaagcttgctgtggagatcgacagtccacaagctacgtctctggatcagttagccgatccacccaatagtacctgtgcgcaagtaatccactcaaagtcagagatatgtagcaacagatggctaccagataagagcaacagaaactgcaagaagccaaaaaacactaatgatgactttaagggaaaggacctggagataggtggccctgaaaatttatatatgggtcaccaatcttccccaaatgggagatccatcaaagcagcagatcatgaaaacaattcaaaggaatcaatgatggaaaatttagaggagccaactgttcgagctgctgacctaattggttcaatggccaaaaacatggataccccacaggcagcaagagctgcagaagatacccctaatttctcttccaaagtgccagaagggaaagatggtgccaacaacaaaaatacagtcaaagacgacgaacaacggaattgtgtattaagacgatcaaatctgtcggcttttacaaggtaccacacatctgcggcttccaatcaaggtgggacaggattggtaggtagctgttcgccgcatgataacagctcggaggctgtgaaaacggattctacctacaacatgaagtcaaattcagatgctgccccgataaaacaaggctccaacggcagtagcaatgacaatgacatgggttccactacaaaggatgttgtgacaaaacccatgttgccctctgctattaaggctaatggatacacatcagcgttccatcctgtgcagcagtggatggttccagctaatgcaacagcagggaaaacgaaggctgatgaaaatacagccagaaatcactgcgtccattttgagaatggtgggtcaggagccctgcaatgtggttcctccaacgtatttgatcccccacttgaaggccaagctacaaataactatggtggtgtgaaagccgggagcaactcaggcagcaacaaggggcagaacaatgggagtacggctgctgcaaatgctggactggcagaaacggagatacaggccatggacaaaagtggagttggaggtggcaatggcaatggcaatgggagtggcagtggcagtggcaatgacacatatgtcagacggcttgctgcgaacatgacaccgcgacaagcacagctaaagaaatatagagagaaaaagaaagaccggaactttgggaagaaggtgcggtaccagagcagaaagaggctagccgaccagcggccacgggttcgtggacagttcgtcaagcaagctgtgcaaaatcaggacggagctagagagagatgaccgacacccccccccccctcccctgtggctgtgctgctctctggcttcagctccctactgactccgactccacctctgctggcatgcatggttgccgctttggactcaaaacacttgacagttagacgtgcggttgatgattcttccttctctcgtggtgtggactgatatggtcaacaacacagcctccttccttttcatcattggtttcttcacatctagaatctactgcctgaccgggaaagaataaacaaggaacttcttcttctatacatgtgtatgtatgtatgcattcctaagcatgtaatgtagaagaataagtgcgtggcttgactctagatggactttaattttagacagagtcttgctcgctctcctacatcatctagtgtaactaaagtgttgtcatgtatggtcttggatcactgtctatcaatatattatatcgtggcgttccttgataagtctgcaggcagaagcatgacaaaaattcagggagggccaagaaaccatatgacaaaatcaaccaacaccgtaaaataactattgtcatatagaattcaagttttatatcaatacatgatacaagttcaaagaagtaaatcatacaaataaaaaagaaacataccgttaagtttttgttgacctcacaattgtctcttagttttg

SEQ ID NO: 23070 - DNA, 2947 bp, Zea Mays
ctcctcccccctgggacgtctaaaggcttgcttgcactttttgcctttttcggaggccacgggtcaccgctaacctccatccatccatttgccgattcacctacacagcaggaacaaacgaggagccctccaaggatatgcgccccgccgcttatacattaaccaaagacttgcctccaatcactcgtgtctacctcttcgagttgcgaggatgcctgcgaatgaccaccatcccaacggcctgctccaggagtcagcccctggactccagcatgatgatatggaaaaccagcagcagcaagtctgctgggagcgcttcctcctaaaggacactctcaacgtcttgctcgtggagagtgatgcttcaaccaggcaggttgtcagtgccctgcttcgttgctgcatgtaccaagttatctctgccaaaaatggccagcaagcatgggcttatcttgaagataagggaaacaacatagatcttgttttgactgaggtttttatgcccggtgtatctgggatttctctgctgagtaggatcatgagacacaatattttcaagaatattccagtgattatgatgtcttcgagtgatgatatgagtacagtctttaaatgtctgtcaaaaggtgctgttgactttttggtcaagcctatacgtaagaatgaacttaagaacctttggcagcatgtatggagacaacggtgtcacagctccagtggtagtggaagtgaaagtggcattcagacccagaagtgtgccaaatcaaaaggtgtcaatgaatccggtaacaacagtggtagcaacgatgacgaagcaggcatgggacttaatgcaagggatgacagtgataatggcagtggcactcaagcacagaactcgtggactaagcttgctgtggagatcgacagtccacaagctacgtctctggatcagttagccgatccacccaatagtacctgtgcgcaagtaatccactcaaagtcagagatatgtagcaacagatggctaccagataagagcaacagaaactgcaagaagccaaaaaacactaatgatgactttaagggaaaggacctggagataggtggccctgaaaatttatatatgggtcaccaatcttccccaaatgggagatccatcaaagcagcagatcatgaaaacaattcaaaggaatcaatgatggaaaatttagaggagccaactgttcgagctgctgacctaattggttcaatggccaaaaacatggataccccacaggcagcaagagctgcagaagatacccctaatttctcttccaaagtgccagaagggaaaggtaagaataaccagaatgataagtatgttttgccatcacttgagctgagtttgaagaggtcgagatcatgtggagatggtgccaacaacaaaaatacagtcaaagacgacgaacaacggaattgtgtattaagacgatcaaatctgtcggcttttacaaggtaccacacatctgcggcttccaatcaaggtgggacaggattggtaggtagctgttcgccgcatgataacagctcggaggctgtgaaaacggattctacctacaacatgaagtcaaattcagatgctgccccgataaaacaaggctccaacggcagtagcaatgacaatgacatgggttccactacaaaggatgttgtgacaaaacccatgttgccctctgctattaaggctaatggatacacatcagcgttccatcctgtgcagcagtggatggttccagctaatgcaacagcagggaaaacgaaggctgatgaaaatacagccagaaatcactgcgtccattttgagaatggtgggtcaggagccctgcaatgtggttcctccaacgtatttgatcccccacttgaaggccaagctacaaataactatggtggtgtgaaagccgggagcaactcaggcagcaacaaggggcagaacaatgggagtacggctgctgcaaatgctggactggcagaaacggagatacaggccatggacaaaagtggagttggaggtggcaatggcaatggcaatgggagtggcagtggcagtggcaatgacacatatgtcagacggcttgctgcgaacatgacaccgcgacaagcacagctaaagaaatatagagagaaaaagaaagaccggaactttgggaagaaggtgcggtaccagagcagaaagaggctagccgaccagcggccacgggttcgtggacagttcgtcaagcaagctgtgcaaaatcaggacggagctagagagagatgaccgacacccccccccccctcccctgtggctgtgctgctctctggcttcagctccctactgactccgactccacctctgctggcatgcatggttgccgctttggactcaaaacacttgacagttagacgtgcggttgatgattcttccttctctcgtggtgtggactgatatggtcaacaacacagcctccttccttttcatcattggtttcttcacatctagaatctactgcctgaccgggaaagaataaacaaggaacttcttcttctatacatgtgtatgtatgtatgcattcctaagcatgtaatgtagaagaataagtgcgtggcttgactctagatggactttaattttagacagagtcttgctcgctctcctacatcatctagtgtaactaaagtgttgtcatgtatggtcttggatcactgtctatcaatatattatatcgtggcgttccttgataagtctgcaggcagaagcatgacaaaaattcagggagggccaagaaaccatatgacaaaatcaaccaacaccgtaaaataactattgtcatatagaattcaagttttatatcaatacatgatacaagttcaaagaagtaaatcatacaaataaaaaagaaacataccgttaagtttttgttgacctcacaattgtctcttagttttg

SEQ ID NO: 23071 - DNA, 2610 bp, Zea Mays
atgtggcttgggcaaagccacgtgggggcatggtcgggcacgcgacgcgcgcgccagggtggttcgggtgatggaccgttgggtgtatactcatacatgggtgacgcggttatctctgccaaaaatggccagcaagcatgggcttatcttgaagataagggaaacaacatagatcttgttttgactgaggtttttatgcccggtgtatctgggatttctctgctgagtaggatcatgagacacaatattttcaagaatattccagtgattatgatgtcttcgagtgatgatatgagtacagtctttaaatgtctgtcaaaaggtgctgttgactttttggtcaagcctatacgtaagaatgaacttaagaacctttggcagcatgtatggagacaacggtgtcacagctccagtggtagtggaagtgaaagtggcattcagacccagaagtgtgccaaatcaaaaggtgtcaatgaatccggtaacaacagtggtagcaacgatgacgaagcaggcatgggacttaatgcaagggatgacagtgataatggcagtggcactcaagatttaaacgatctagtggggttgggtggcgttcagagaatggcacagaactcgtggactaagcttgctgtggagatcgacagtccacaagctacgtctctggatcagttagccgatccacccaatagtacctgtgcgcaagtaatccactcaaagtcagagatatgtagcaacagatggctaccagataagagcaacagaaactgcaagaagccaaaaaacactaatgatgactttaagggaaaggacctggagataggtggccctgaaaatttatatatgggtcaccaatcttccccaaatgggagatccatcaaagcagcagatcatgaaaacaattcaaaggaatcaatgatggaaaatttagaggagccaactgttcgagctgctgacctaattggttcaatggccaaaaacatggataccccacaggcagcaagagctgcagaagatacccctaatttctcttccaaagtgccagaagggaaagatggtgccaacaacaaaaatacagtcaaagacgacgaacaacggaattgtgtattaagacgatcaaatctgtcggcttttacaaggtaccacacatctgcggcttccaatcaaggtgggacaggattggtaggtagctgttcgccgcatgataacagctcggaggctgtgaaaacggattctacctacaacatgaagtcaaattcagatgctgccccgataaaacaaggctccaacggcagtagcaatgacaatgacatgggttccactacaaaggatgttgtgacaaaacccatgttgccctctgctattaaggctaatggatacacatcagcgttccatcctgtgcagcagtggatggttccagctaatgcaacagcagggaaaacgaaggctgatgaaaatacagccagaaatcactgcgtccattttgagaatggtgggtcaggagccctgcaatgtggttcctccaacgtatttgatcccccacttgaaggccaagctacaaataactatggtggtgtgaaagccgggagcaactcaggcagcaacaaggggcagaacaatgggagtacggctgctgcaaatgctggactggcagaaacggagatacaggccatggacaaaagtggagttggaggtggcaatggcaatggcaatgggagtggcagtggcagtggcaatgacacatatgtcagacggcttgctgcgaacatgacaccgcgacaagcacagctaaagaaatatagagagaaaaagaaagaccggaactttgggaagaaggtgcggtaccagagcagaaagaggctagccgaccagcggccacgggttcgtggacagttcgtcaagcaagctgtgcaaaatcaggacggagctagagagagatgaccgacacccccccccccctcccctgtggctgtgctgctctctggcttcagctccctactgactccgactccacctctgctggcatgcatggttgccgctttggactcaaaacacttgacagttagacgtgcggttgatgattcttccttctctcgtggtgtggactgatatggtcaacaacacagcctccttccttttcatcattggtttcttcacatctagaatctactgcctgaccgggaaagaataaacaaggaacttcttcttctatacatgtgtatgtatgtatgcattcctaagcatgtaatgtagaagaataagtgcgtggcttgactctagatggactttaattttagacagagtcttgctcgctctcctacatcatctagtgtaactaaagtgttgtcatgtatggtcttggatcactgtctatcaatatattatatcgtggcgttccttgataagtctgcaggcagaagcatgacaaaaattcagggagggccaagaaaccatatgacaaaatcaaccaacaccgtaaaataactattgtcatatagaattcaagttttatatcaatacatgatacaagttcaaagaagtaaatcatacaaataaaaaagaaacataccgttaagtttttgttgacctcacaattgtctcttagttttg

SEQ ID NO: 23072 - DNA, 2103 bp, Zea Mays
ttttatgattgtcaggagcactaggcacagaactcgtggactaagcttgctgtggagatcgacagtccacaagctacgtctctggatcagttagccgatccacccaatagtacctgtgcgcaagtaatccactcaaagtcagagatatgtagcaacagatggctaccagataagagcaacagaaactgcaagaagccaaaaaacactaatgatgactttaagggaaaggacctggagataggtggccctgaaaatttatatatgggtcaccaatcttccccaaatgggagatccatcaaagcagcagatcatgaaaacaattcaaaggaatcaatgatggaaaatttagaggagccaactgttcgagctgctgacctaattggttcaatggccaaaaacatggataccccacaggcagcaagagctgcagaagatacccctaatttctcttccaaagtgccagaagggaaaggtaagaataaccagaatgataagtatgttttgccatcacttgagctgagtttgaagaggtcgagatcatgtggagatggtgccaacaacaaaaatacagtcaaagacgacgaacaacggaattgtgtattaagacgatcaaatctgtcggcttttacaaggtaccacacatctgcggcttccaatcaaggtgggacaggattggtaggtagctgttcgccgcatgataacagctcggaggctgtgaaaacggattctacctacaacatgaagtcaaattcagatgctgccccgataaaacaaggctccaacggcagtagcaatgacaatgacatgggttccactacaaaggatgttgtgacaaaacccatgttgccctctgctattaaggctaatggatacacatcagcgttccatcctgtgcagcagtggatggttccagctaatgcaacagcagggaaaacgaaggctgatgaaaatacagccagaaatcactgcgtccattttgagaatggtgggtcaggagccctgcaatgtggttcctccaacgtatttgatcccccacttgaaggccaagctacaaataactatggtggtgtgaaagccgggagcaactcaggcagcaacaaggggcagaacaatgggagtacggctgctgcaaatgctggactggcagaaacggagatacaggccatggacaaaagtggagttggaggtggcaatggcaatggcaatgggagtggcagtggcagtggcaatgacacatatgtcagacggcttgctgcgaacatgacaccgcgacaagcacagctaaagaaatatagagagaaaaagaaagaccggaactttgggaagaaggtgcggtaccagagcagaaagaggctagccgaccagcggccacgggttcgtggacagttcgtcaagcaagctgtgcaaaatcaggacggagctagagagagatgaccgacacccccccccccctcccctgtggctgtgctgctctctggcttcagctccctactgactccgactccacctctgctggcatgcatggttgccgctttggactcaaaacacttgacagttagacgtgcggttgatgattcttccttctctcgtggtgtggactgatatggtcaacaacacagcctccttccttttcatcattggtttcttcacatctagaatctactgcctgaccgggaaagaataaacaaggaacttcttcttctatacatgtgtatgtatgtatgcattcctaagcatgtaatgtagaagaataagtgcgtggcttgactctagatggactttaattttagacagagtcttgctcgctctcctacatcatctagtgtaactaaagtgttgtcatgtatggtcttggatcactgtctatcaatatattatatcgtggcgttccttgataagtctgcaggcagaagcatgacaaaaattcagggagggccaagaaaccatatgacaaaatcaaccaacaccgtaaaataactattgtcatatagaattcaagttttatatcaatacatgatacaagttcaaagaagtaaatcatacaaataaaaaagaaacataccgttaagtttttgttgacctcacaattgtctcttagttttg

SEQ ID NO: 23073 - DNA, 2125 bp, Zea Mays
ctcagctggttgggtggtaggttggtcgtgtacccaatcacctaaggcacagaactcgtggactaagcttgctgtggagatcgacagtccacaagctacgtctctggatcagttagccgatccacccaatagtacctgtgcgcaagtaatccactcaaagtcagagatatgtagcaacagatggctaccagataagagcaacagaaactgcaagaagccaaaaaacactaatgatgactttaagggaaaggacctggagataggtggccctgaaaatttatatatgggtcaccaatcttccccaaatgggagatccatcaaagcagcagatcatgaaaacaattcaaaggaatcaatgatggaaaatttagaggagccaactgttcgagctgctgacctaattggttcaatggccaaaaacatggataccccacaggcagcaagagctgcagaagatacccctaatttctcttccaaagtgccagaagggaaaggtaagaataaccagaatgataagtatgttttgccatcacttgagctgagtttgaagaggtcgagatcatgtggagatggtgccaacaacaaaaatacagtcaaagacgacgaacaacggaattgtgtattaagacgatcaaatctgtcggcttttacaaggtaccacacatctgcggcttccaatcaaggtgggacaggattggtaggtagctgttcgccgcatgataacagctcggaggctgtgaaaacggattctacctacaacatgaagtcaaattcagatgctgccccgataaaacaaggctccaacggcagtagcaatgacaatgacatgggttccactacaaaggatgttgtgacaaaacccatgttgccctctgctattaaggctaatggatacacatcagcgttccatcctgtgcagcagtggatggttccagctaatgcaacagcagggaaaacgaaggctgatgaaaatacagccagaaatcactgcgtccattttgagaatggtgggtcaggagccctgcaatgtggttcctccaacgtatttgatcccccacttgaaggccaagctacaaataactatggtggtgtgaaagccgggagcaactcaggcagcaacaaggggcagaacaatgggagtacggctgctgcaaatgctggactggcagaaacggagatacaggccatggacaaaagtggagttggaggtggcaatggcaatggcaatgggagtggcagtggcagtggcaatgacacatatgtcagacggcttgctgcgaacatgacaccgcgacaagcacagctaaagaaatatagagagaaaaagaaagaccggaactttgggaagaaggtgcggtaccagagcagaaagaggctagccgaccagcggccacgggttcgtggacagttcgtcaagcaagctgtgcaaaatcaggacggagctagagagagatgaccgacacccccccccccctcccctgtggctgtgctgctctctggcttcagctccctactgactccgactccacctctgctggcatgcatggttgccgctttggactcaaaacacttgacagttagacgtgcggttgatgattcttccttctctcgtggtgtggactgatatggtcaacaacacagcctccttccttttcatcattggtttcttcacatctagaatctactgcctgaccgggaaagaataaacaaggaacttcttcttctatacatgtgtatgtatgtatgcattcctaagcatgtaatgtagaagaataagtgcgtggcttgactctagatggactttaattttagacagagtcttgctcgctctcctacatcatctagtgtaactaaagtgttgtcatgtatggtcttggatcactgtctatcaatatattatatcgtggcgttccttgataagtctgcaggcagaagcatgacaaaaattcagggagggccaagaaaccatatgacaaaatcaaccaacaccgtaaaataactattgtcatatagaattcaagttttatatcaatacatgatacaagttcaaagaagtaaatcatacaaataaaaaagaaacataccgttaagtttttgttgacctcacaattgtctcttagttttg

SEQ ID NO: 23074 - DNA, 2103 bp, Zea Mays
gtttaaatatgaggatggaaatgggcacagaactcgtggactaagcttgctgtggagatcgacagtccacaagctacgtctctggatcagttagccgatccacccaatagtacctgtgcgcaagtaatccactcaaagtcagagatatgtagcaacagatggctaccagataagagcaacagaaactgcaagaagccaaaaaacactaatgatgactttaagggaaaggacctggagataggtggccctgaaaatttatatatgggtcaccaatcttccccaaatgggagatccatcaaagcagcagatcatgaaaacaattcaaaggaatcaatgatggaaaatttagaggagccaactgttcgagctgctgacctaattggttcaatggccaaaaacatggataccccacaggcagcaagagctgcagaagatacccctaatttctcttccaaagtgccagaagggaaaggtaagaataaccagaatgataagtatgttttgccatcacttgagctgagtttgaagaggtcgagatcatgtggagatggtgccaacaacaaaaatacagtcaaagacgacgaacaacggaattgtgtattaagacgatcaaatctgtcggcttttacaaggtaccacacatctgcggcttccaatcaaggtgggacaggattggtaggtagctgttcgccgcatgataacagctcggaggctgtgaaaacggattctacctacaacatgaagtcaaattcagatgctgccccgataaaacaaggctccaacggcagtagcaatgacaatgacatgggttccactacaaaggatgttgtgacaaaacccatgttgccctctgctattaaggctaatggatacacatcagcgttccatcctgtgcagcagtggatggttccagctaatgcaacagcagggaaaacgaaggctgatgaaaatacagccagaaatcactgcgtccattttgagaatggtgggtcaggagccctgcaatgtggttcctccaacgtatttgatcccccacttgaaggccaagctacaaataactatggtggtgtgaaagccgggagcaactcaggcagcaacaaggggcagaacaatgggagtacggctgctgcaaatgctggactggcagaaacggagatacaggccatggacaaaagtggagttggaggtggcaatggcaatggcaatgggagtggcagtggcagtggcaatgacacatatgtcagacggcttgctgcgaacatgacaccgcgacaagcacagctaaagaaatatagagagaaaaagaaagaccggaactttgggaagaaggtgcggtaccagagcagaaagaggctagccgaccagcggccacgggttcgtggacagttcgtcaagcaagctgtgcaaaatcaggacggagctagagagagatgaccgacacccccccccccctcccctgtggctgtgctgctctctggcttcagctccctactgactccgactccacctctgctggcatgcatggttgccgctttggactcaaaacacttgacagttagacgtgcggttgatgattcttccttctctcgtggtgtggactgatatggtcaacaacacagcctccttccttttcatcattggtttcttcacatctagaatctactgcctgaccgggaaagaataaacaaggaacttcttcttctatacatgtgtatgtatgtatgcattcctaagcatgtaatgtagaagaataagtgcgtggcttgactctagatggactttaattttagacagagtcttgctcgctctcctacatcatctagtgtaactaaagtgttgtcatgtatggtcttggatcactgtctatcaatatattatatcgtggcgttccttgataagtctgcaggcagaagcatgacaaaaattcagggagggccaagaaaccatatgacaaaatcaaccaacaccgtaaaataactattgtcatatagaattcaagttttatatcaatacatgatacaagttcaaagaagtaaatcatacaaataaaaaagaaacataccgttaagtttttgttgacctcacaattgtctcttagttttg

SEQ ID NO: 23075 - DNA, 3921 bp, Zea Mays
ctgcgcagggctgctgctctagagtgacacacttcacccacacgccatatatatctcaaaagacaaagccctcctttccacaacgaacgaacatattcctcccgtcgatcgctccagacactatcaccttccacctctcagcttcactctcaagcctctactccatcttcttgtgaagcttctcaagattctcgcgatcgcatgcctttacccttcctctctctctttctctctctggtcatcttactaaactacctccaatgccggtgccaatggcggcagctcagttcctctagctagtctcccaccgtaattagcaaacccggagaaaaaaagggaacattcgacgccaccccgtgatgaggccttcgccacctttgctcctgttcgtgctcctgcacttcgcgctcctgtccaccattgccgccgccgatgggaatgggaatgggaatgggaacggcgacctgcgcggcgacgcgatggcgctgctcgccctcaaggccgcgctcggctgccggccgggcgcgctgcggtcgtggtcggagggcaatgccgggtccgtgtgcgcgtggacgggcgtccggtgcgcggccggacgcgttgtcgccgtcgacatcgccaacatgaacgtgtccagcggcgcgcccgtctcggcacgggtgacggggctcagcgcgctcgagaccatctcgctcgccgggaacggcatcgtgggcgccgtcgccgcgtcgtcgctcccggcgctgcgccacgtcaacgtgtcggggaaccagctcggcggcggcctcgacggctgggacttcgcgtcgctgcccggcctcgaggtgctggacgcctacgacaacaacttctcggctccgctcccgctcggcgtcgccgcgctcccgaggctccgctacctggacctcggcggcaactacttcacgggcgagatcccggcggcgtacggcgcgatgcccgcggtggagtacctgtcccttaacggcaacaacctgcaaggccgcatcccaccggagctcggcaacctcaccaccctccgggagctctacctcggttactacaacgtgttcgacggcggcatccccccggcgcttggccggttgcgcagcctcaccgtgctggacgtctccaactgcggcctcacggggcgcgtccccgcggagcttggcgcgctcgcctccatcgagacgctcttcctccacaccaaccaactctccgcgcccatcccgccggagctcggcaacctcacgtcgctcaccgcgctggacctctccaacaatgcgctcaccggcgaggtccctcgctcgctggcgtccctcacctcgctcaagttgctcaacctgttcctgaaccggctccacggaccggtgcccgacttcatcgccgcgctgccgcgtctggagacggtgcagctgttcatgaacaacctcaccggccgcgtccccgcagggctcggcgccaacgccgcgctccggctcgtcgacctgtcctcgaaccgcctcaccggcgtcatcccggaggcgctgtgcgcgtccggcgatctccacacggtcatcctcatgaacaatttcctcttcgggcccatccccggctcgttcggctcgtgcacgagcctcacccgcgtccggctcggccagaactacctcaacggcagcatccccgccggcctgctgtacctgccgcggctgagcctgctggagctccacaacaacctgctctcaggcgccgtgccgtcgaacccgagcccgagcgcgtccagttcgcagctggcgcagctcaacctgtccaacaacctgctggcggggccgctgccgagcacgctggccaacctcaccgcgctgcagacgctgcttgcgagcaacaaccggatcggcggcgccgtgccgccggaggtcggggagctccggcggctcgtgaagctcgacctcagcggcaacgagctgtcggggccgattcccggggcggtcgggcagtgcggcgagctgacgtatctcgatctcagcaggaacaacctgtccggggcgatcccagaggcgatcgcgggcgtccgggtgctgaattacctcaacctgtcgcggaacgcgctggaggacgcgatcccgacggcgatcggggccatgagcagcctgacggcggcggacttctcgtacaacgacctgtcagggcagctcccggacacggggcagctggggtacatgaacgcgacggcgttcgcgggcaacccgaggctgtgcggctctgtggtgagccggccgtgcaactacacgggaggaggcggagtcgcgggcgcggcgacgacgcggctcggcgggctgaagctggtgcttgcgctgggactgctcgcctgctcggttgtgttcgccgtggcggccgtgctccgggcgcggtcgttccgcgtggacgtcggcgcgggcaggtggcggttgacggcgttccacaaggtggactttggcgtggcggaggtgatcgagtgcatgaaggacggcaacgtggtgggccgcggcggcgccggggtggtgtacgcggggcgcacccggtcgggcggcgcgatcgcggtgaagcggctgcaggcccagggcggcgccggcgcgcagcagggcgacgaccgcgggttccgcgcggaggtccggacgctcggcagcatccggcaccggaacatcgtgcgcctgctggccttctgcacgaaccgggaggcgaacgtgctggtgtacgagtacatgggcggcggcagcctcggggtggtgctgcacggcaagggcggcgcgttcctggcgtgggagcggcggtaccggatcgcgctggaggcggcgcgcgggctgtgctacctccaccacgactgcacgcccatgatcgtgcaccgggacgtcaagtccaacaacatcctcctcggcgacaacctggaggcccgcgtcgcggacttcggcctcgccaagttcctccggtgcggcgccacctccgagtccatgtccgccgtcgctggatcctacggctacatcgcccctgagtacgcgtacacgctgcgggtggacgagaagagcgacgtgtacagctacggcgtggtcctgctggagctcatcacgggccgccgccccgtgggggacttcggggaaggtgtggacatcgtgcagtgggcgaagcgggccacggccggccgccgggaggccgtgccggggatcgtggaccgccggctcgtcggcggcgcgccggccgacgaggtggcgcacctattcttcgtctccatgctctgcgtgcaggacaatagcgtggagcgccccaccatgcgcgaggtggtgcagatgctcgccgagctcccgcgccacgagtcgtcgccgtccacctcctcctcctcctcgtcgtcgtcggcggtggaaccgccaccaccgcaggccggcgaggagagcagccccgacgacgggaaggagccgccggccaactgctacaagctgttcccggacctgctggcctgataaactgaagcgcagacgacggaacctattttgctgccattgttacaagacacaaggctactactcaatcgtcgtgcagggctaaagttacagcatgtagtgcagaatggagctagacgttcaacaggttggtcggccgacattggaaatggtgacaagatagagctgggaatcaataacatgtaacttttttttgtctttcttcttcttcttctatctcctctccgaattattttctttttgttcatctatcaattcaaagctgtatagggtctgatcatatgctaccgcctatctaggggattatgctgtccgagatgcagtagcatcccttccatcatcatagctttcgcacttttgtaatctcctgggaaagcatggaagataaatgagaaaaaaaagagagcgcgcgatactggacagtctttgaaaacatctcagttcccaacgctct

SEQ ID NO: 23076 - DNA, 1313 bp, Zea Mays
aaaaatcagtcgcccgtccgaggcaaaatccattggagtattcgacgtctcgtaacccctgcctcccacgcaccccaatgtctgacaagaaggacgacgaggccggcacctcaacgccgagtgttgcggcggcggcggccccggccccggccccgaggccatccacctacgcgcccatgggcgcgctgcgggacgaggagtgcgctaatctcctggccctggtatccaccgtctcgcgcccgctcgaggacgccgtcgcggatttcctcgcacgcgtgccccccgatcgccgcctccggttcggcacctccatcagcttcgtcctcgaggacaagatgatgcttcaacctgctgagcgtttagttgcatttgcaattctacatcaaggttattcctcacagttggcaaatccatttcttcctcttttaataaatgctgcatgtgatgaaacttctgaggaagcagaacaagcatttctccaacttctgttaagttcgactaatggggacaacattgaggttctaaagcagtctgctgtcgcttacttgaacggatctgattatgcatctcaggtctttttgccaagagaacagcttgagaaacaatgttcctatgatgctgcacgacctctgcccttctctagtaatttcagagatgccactgtcagaagtactattcctgacccagatgttctccaaagctttggtagttcatcagagctgtcctcaataataccaaatagagatgacatggttgctactttacttcaacaaacatcacttaaaggattgcctcctcaatggatacgaccctctccaccaagacttgaaatttttgaaggggaattacagtggctgaacatagacaataaccatgagctactatgggacagtaccatgtgtgcagacactagccgaggtgctgtgattcgagatctggtcgaacaagcttgtaaagctccacttgcattggcccagcatgagaaatgcatagttatgcctcctaaggatgcattcctcggcaaggtctacagcaggcgcaaccggaaacatggtagcgggccaacccaagatttcaaacagcattaaaattggaaatataaatatcataggcatcgttgaatcgttactatgttccaagatttaatatactatttgatttcattagcattattgttgagtacttgtagataggacaatgtgggattggtccacataagagagagcatattatatatagtattgtgagaatgtgaatattggatatttgtattgaaccccgtgagttatttaaacaatcctagagatagaaat

SEQ ID NO: 23077 - DNA, 1882 bp, Zea Mays
aatccattggagtattcgacgtctcgtaacccctgcctcccacgcaccccaatgtctgacaagaaggacgacgaggccggcacctcaacgccgagtgttgcggcggcggcggccccggccccggccccgaggccatccacctacgcgcccatgggcgcgctgcgggacgaggagtgcgctaatctcctggccctggtatccaccgtctcgcgcccgctcgaggacgccgtcgcggatttcctcgcacgcgtgccccccgatcgccgcctccggttcggcacctccatcagcttcgtcctcgaggctgcatgtgatgaaacttctgaggaagcagaacaagcatttctccaacttctgttaagttcgactaatggggacaacattgaggttctaaagcagtctgctgtcgcttacttgaacggatctgattatgcatctcaggtctttttgccaagagaacagcttgagaaacaatgttcctatgatgctgcacgacctctgcccttctctagtaatttcagagatgccactgtcagaagtactattcctgacccagatgttctccaaagctttggtagttcatcagagctgtcctcaataataccaaatagagatgacatggttgctactttacttcaacaaacatcacttaaaggattgcctcctcaatggatacgaccctctccaccaagacttgaaatttttgaaggggaattacagtggctgaacatagacaataaccatgagctactatgggacagtaccatgtgtgcagacactagccgaggtgctgtgattcgagatctggtcgaacaagcttgtaaagctccacttgcattggcccagcatgaggaaattaccaaatatctgcggaaggactggaagctagtttatcattgtggaatgacaccacagaagctccctgatcttgttgaacataatccacatatagctgttgaagttctttcaaagctaatcaactctccggacatggatgcgtactttgatgctattgttcatatggatatgagcttgcattcaatggaagtagtaaatcggctcactactgcagtagttttaccaccaggatttgttcatgactatatctcaaactgtattcgatcatgtgaagacattaaggacaagtatatgcaaaatagactagtgagactagtatgtgtttttctacagagcctcattcggaacaggataatagatgtgcaagatctcttcgtggaggtgcaagcattttgcatcgccttctcgcgaataagggaggcagtggggttgttcaggctcctgaaatctctagaatgaagagcgctgcaccatcagttgggcgctggattctcagaacagaaattcccaaggtgtacatccatggctctgccttttgcttccaagctgctgaccctgcataggtctggactctgtagggcgtggattttgctggtatattggttatcatcaagctgcgtcccctgcatcatccccgaaagacattgaggagaaacaaatccataggtctgacaggttgggttcgaggtagagttagttctgttggaagtgtccacggggcttgtcgttcttgtgcagtaggcaacaatggcaagccccgtagttggtttgctcgaaatgagcgaatggtacggtgaactcagaaataaccgggatagagtatccgactgtcagtcatacttgctctacggcatggtatatttattcattagcctcataaacggttgcttgctatttaggctgtcatacctgtatttcgaagttcattgttacatcatgcagatgtgagacagctattgcctggcataccgtatcatgtagtacgtatgaaaaatgaaaggcagcagggctgtatccagtggct

SEQ ID NO: 23078 - DNA, 1883 bp, Zea Mays
ccattggagtattcgacgtctcgtaacccctgcctcccacgcaccccaatgtctgacaagaaggacgacgaggccggcacctcaacgccgagtgttgcggcggcggcggccccggccccggccccgaggccatccacctacgcgcccatgggcgcgctgcgggacgaggagtgcgctaatctcctggccctggtatccaccgtctcgcgcccgctcgaggacgccgtcgcggatttcctcgcacgcgtgccccccgatcgccgcctccggttcggcacctccatcagcttcgtcctcgaggacaagatgatgcttcaacctgctgagcgtttagttgcatttgcaattctacatcaaggttattcctcacagttggcaaatccatttcttcctcttttaataaatgctgcatgtgatgaaacttctgaggaagcagaacaagcatttctccaacttctgttaagttcgactaatggggacaacattgaggttctaaagcagtctgctgtcgcttacttgaacggatctgattatgcatctcaggtctttttgccaagagaacagcttgagaaacaatgttcctatgatgctgcacgacctctgcccttctctagtaatttcagagatgccactgtcagaagtactattcctgacccagatgttctccaaagctttggtagttcatcagagctgtcctcaataataccaaatagagatgacatggttgctactttacttcaacaaacatcacttaaaggattgcctcctcaatggatacgaccctctccaccaagacttgaaatttttgaaggggaattacagtggctgaacatagacaataaccatgagctactatgggacagtaccatgtgtgcagacactagccgaggtgctgtgattcgagatctggtcgaacaagcttgtaaagctccacttgcattggcccagcatgaggaaattaccaaatatctgcggaaggactggaagctagtttatcattgtggaatgacaccacagaagctccctgatcttgttgaacataatccacatatagctgttgaagttctttcaaagctaatcaactctccggacatggatgcgtactttgatgctattgttcatatggatatgagcttgcattcaatggaagtagtaaatcggctcactactgcagtagttttaccaccaggatttgttcatgactatatctcaaactgtattcgatcatgtgaagacattaaggacaagtatatgcaaaatagactagtgagactagtatgtgtttttctacagagcctcattcggaacaggataatagatgtgcaagatctcttcgtggaggtgcaagcattttgcatcgccttctcgcgaataagggaggcagtggggttgttcaggctcctgaaatctctagaatgaagagcgctgcaccatcagggcgtggattttgctggtatattggttatcatcaagctgcgtcccctgcatcatccccgaaagacattgaggagaaacaaatccataggtctgacaggttgggttcgaggtagagttagttctgttggaagtgtccacggggcttgtcgttcttgtgcagtaggcaacaatggcaagccccgtagttggtttgctcgaaatgagcgaatggtacggtgaactcagaaataaccgggatagagtatccgactgtcagtcatacttgctctacggcatggtatatttattcattagcctcataaacggttgcttgctatttaggctgtcatacctgtatttcgaagttcattgttacatcatgcagatgtgagacagctattgcctggcataccgtatcatgtagtacgtatgaaaaatgaaaggcagcagggctgtatccagtggct

SEQ ID NO: 23079 - DNA, 1955 bp, Zea Mays
ccattggagtattcgacgtctcgtaacccctgcctcccacgcaccccaatgtctgacaagaaggacgacgaggccggcacctcaacgccgagtgttgcggcggcggcggccccggccccggccccgaggccatccacctacgcgcccatgggcgcgctgcgggacgaggagtgcgctaatctcctggccctggtatccaccgtctcgcgcccgctcgaggacgccgtcgcggatttcctcgcacgcgtgccccccgatcgccgcctccggttcggcacctccatcagcttcgtcctcgaggacaagatgatgcttcaacctgctgagcgtttagttgcatttgcaattctacatcaaggctgcatgtgatgaaacttctgaggaagcagaacaagcatttctccaacttctgttaagttcgactaatggggacaacattgaggttctaaagcagtctgctgtcgcttacttgaacggatctgattatgcatctcaggtctttttgccaagagaacagcttgagaaacaatgttcctatgatgctgcacgacctctgcccttctctagtaatttcagagatgccactgtcagaagtactattcctgacccagatgttctccaaagctttggtagttcatcagagctgtcctcaataataccaaatagagatgacatggttgctactttacttcaacaaacatcacttaaaggattgcctcctcaatggatacgaccctctccaccaagacttgaaatttttgaaggggaattacagtggctgaacatagacaataaccatgagctactatgggacagtaccatgtgtgcagacactagccgaggtgctgtgattcgagatctggtcgaacaagcttgtaaagctccacttgcattggcccagcatgaggaaattaccaaatatctgcggaaggactggaagctagtttatcattgtggaatgacaccacagaagctccctgatcttgttgaacataatccacatatagctgttgaagttctttcaaagctaatcaactctccggacatggatgcgtactttgatgctattgttcatatggatatgagcttgcattcaatggaagtagtaaatcggctcactactgcagtagttttaccaccaggatttgttcatgactatatctcaaactgtattcgatcatgtgaagacattaaggacaagtatatgcaaaatagactagtgagactagtatgtgtttttctacagagcctcattcggaacaggataatagatgatgcttggttgtgtgcagtgcaagatctcttcgtggaggtgcaagcattttgcatcgccttctcgcgaataagggaggcagtggggttgttcaggctcctgaaatctctagaatgaagagcgctgcaccatcagttgggcgctggattctcagaacagaaattcccaaggtgtacatccatggctctgccttttgcttccaagctgctgaccctgcataggtctggactctgtagggcgtggattttgctggtatattggttatcatcaagctgcgtcccctgcatcatccccgaaagacattgaggagaaacaaatccataggtctgacaggttgggttcgaggtagagttagttctgttggaagtgtccacggggcttgtcgttcttgtgcagtaggcaacaatggcaagccccgtagttggtttgctcgaaatgagcgaatggtacggtgaactcagaaataaccgggatagagtatccgactgtcagtcatacttgctctacggcatggtatatttattcattagcctcataaacggttgcttgctatttaggctgtcatacctgtatttcgaagttcattgttacatcatgcagatgtgagacagctattgcctggcataccgtatcatgtagtacgtatgaaaaatgaaaggcagcagggctgtatccagtggct

SEQ ID NO: 23080 - DNA, 842 bp, Zea Mays
aaaatataaagatgaattacatctgaaaatataaggcatgttttaaggttctaaagcagtctgctgtcgcttacttgaacggatctgattatgcatctcaggtctttttgccaagagaacagcttgagaaacaatgttcctatgatgctgcacgacctctgcccttctctagtaatttcagagatgccactgtcagaagtactattcctgacccagatgttctccaaagctttggtagttcatcagagctgtcctcaataataccaaatagagatgacatggttgctactttacttcaacaaacatcacttaaaggattgcctcctcaatggatacgaccctctccaccaagacttgaaatttttgaaggggaattacagtggctgaacatagacaataaccatgagctactatgggacagtaccatgtgtgcagacactagccgaggtgctgtgattcgagatctggtcgaacaagcttgtaaagctccacttgcattggcccagcatgagaaatgcatagttatgcctcctaaggatgcattcctcggcaaggtctacagcaggcgcaaccggaaacatggtagcgggccaacccaagatttcaaacagcattaaaattggaaatataaatatcataggcatcgttgaatcgttactatgttccaagatttaatatactatttgatttcattagcattattgttgagtacttgtagataggacaatgtgggattggtccacataagagagagcatattatatatagtattgtgagaatgtgaatattggatatttgtattgaaccccgtgagttatttaaacaatcctagagatagaaat

SEQ ID NO: 23081 - DNA, 1904 bp, Zea Mays
caaataatccaactcaaacgcacccttaatgtgcacgaactaattagctttcaaaaacttagcatatctcaggcgcaatctgaagcagcagtcatatcagagatcagaatgagaaggtttcttccccctctcgataatgtacacgcatgggcatggcacgttcttcacttcagaccctcacacacagctctttccccggtaaaatcaaggacggcagcagcgcatgacttggcatcgctgccggcttgtggcgcgtcctcacaggctgggcgtcctctcggcggcgccggagatgacggtgagcaggttgttgccgaaggggtcgctgaggtgcttggcgaggttctcgacggggccttcgccggtgacgtaggcctggatgaagaaggcgaacatggagaacatggcgagccggccgttcttgatctccttcaccttgaggatggcggcctggtcggggtcgctggccaagcccagggggtcgaaggggccaccggggtgcagcttgtcctcgaggtccagtccgttgatgatccggtagtactcggcgccgccgacgaggacgacctccgcgatcacggcgaccaccaggttgatggggatgctgttgccgaaatagctgagggtgtttccgtcgaggagcagggctccggtctgcaaccagacggcctcggggccgcagttagcgccgaacttgttgcacgcctctgggatgacagcgccagcggcaccgagcatggcccatctggcatggatcagctcgtaggcctggtactggcgaagtcctctggcttcttgcccaggccaaaagggtcgtagccatagctgccagttgtaggagcaagatagttcagttcagataccttaacttcgattctctgcagtttttcatatatgaacaaaactagaggaaatgacggccgtagattgttgtttaaaactgacgaagattatttcaaatgctggttgagagacgtgtgtgctttcagaacgaattctacaagctgcaatgaagcaccactttggtgaaaaatcggattttgaccacaaactatttttttccaagaaaaaaaaactttttttttgttttggtcgatgaaattggtaccgttgtttaaactatcttgtagcgctaacctgatttcattaaactaccaactggaatctagaatttctgaaacaagcaaaaacctttatggaaggcaaagttggagtgatgtgacttactctccagggacctctccggtgaggtactccggtacctccgagcggtccaagagcccatccggcaggtagatcctcctgtcaggacctaattggacatagaacaggagacagttactatacagggagcttctgaaggttttcatgggcaaagttctatatctcaaacatgaaacaccaaacaagatacaattagtgcagaggaagcttctgaagattttcatgccaaagttctatcaaacgcccaacacaagggagccctgaagcaaatctgggtcctagaagtcgtgcgctgccagcagttggggccaggtctactcaccgtaccacttggcgagctcgtcgctgatgtccggagaagaggacgacaccgcagagggcttgggcttctgggcaggcttcttgctgaagagggagacgatcttctgagcccccgcggtgggcgctgcggtggcgtagcgggaggagccggcgaagttgagcttggtgcccagaatcttggatggagcaagagccgccatcgccggagacccacaattcagagagacttgccgcgggaggggatggctgatgggggcttgtggaggaaaaggcgagctagtttaaatggatgaaaatgaggatcggaggatgctgtgggcctagcagagatttggccatcggagctgccattggatggg

SEQ ID NO: 23082 - DNA, 1905 bp, Zea Mays
caaataatccaactcaaacgcacccttaatgtgcacgaactaattagctttcaaaaacttagcatatctcaggcgcaatctgaagcagcagtcatatcagagatcagaatgagaaggtttcttccccctctcgataatgtacacgcatgggcatggcacgttcttcacttcagaccctcacacacagctctttccccggtaaaatcaaggacggcagcagcgcatgacttggcatcgctgccggcttgtggcgcgtcctcacaggctgggcgtcctctcggcggcgccggagatgacggtgagcaggttgttgccgaaggggtcgctgaggtgcttggcgaggttctcgacggggccttcgccggtgacgtaggcctggatgaagaaggcgaacatggagaacatggcgagccggccgttcttgatctccttcaccttgaggatggcggcctggtcggggtcgctggccaagcccagggggtcgaaggggccaccggggtgcagcttgtcctcgaggtccagtccgttgatgatccggtagtactcggcgccgccgacgaggacgacctccgcgatcacggcgaccaccaggttgatggggatgctgttgccgaaatagctgagggtgtttccgtcgaggagcagggctccggtctgcaaccagacggcctcggggccgcagttagcgccgaacttgttgcacgcctctgggatgacagcgccagcggcaccgagcatggcccatctggcatggatcagctcgtaggcctggtacttggcgaagtcctctggcttcttgcccaggccaaaagggtcgtagccatagctgccagttgtaggagcaagatagttcagttcagataccttaacttcgattctctgcagtttttcatatatgaacaaaactagaggaaatgacggccgtagattgttgtttaaaactgacgaagattatttcaaatgctggttgagagacgtgtgtgctttcagaacgaattctacaagctgcaatgaagcaccactttggtgaaaaatcggattttgaccacaaactatttttttccaagaaaaaaaaactttttttttgttttggtcgatgaaattggtaccgttgtttaaactatcttgtagcgctaacctgatttcattaaactaccaactggaatctagaatttctgaaacaagcaaaaacctttatggaaggcaaagttggagtgatgtgacttactctccagggacctctccggtgaggtactccggtacctccgagcggtccaagagcccatccggcaggtagatcctcctgtcaggacctaattggacatagaacaggagacagttactatacagggagcttctgaaggttttcatgggcaaagttctatatctcaaacatgaaacaccaaacaagatacaattagtgcagaggaagcttctgaagattttcatgccaaagttctatcaaacgcccaacacaagggagccctgaagcaaatctgggtcctagaagtcgtgcgctgccagcagttggggccaggtctactcaccgtaccacttggcgagctcgtcgctgatgtccggagaagaggacgacaccgcagagggcttgggcttctgggcaggcttcttgctgaagagggagacgatcttctgagcccccgcggtgggcgctgcggtggcgtagcgggaggagccggcgaagttgagcttggtgcccagaatcttggatggagcaagagccgccatcgccggagacccacaattcagagagacttgccgcgggaggggatggctgatgggggcttgtggaggaaaaggcgagctagtttaaatggatgaaaatgaggatcggaggatgctgtgggcctagcagagatttggccatcggagctgccattggatggg

SEQ ID NO: 23083 - DNA, 1910 bp, Zea Mays
tccaactcaaacgcacccttaatgtgcacgaactaattagctttcaaaaacttagcatatctcaggcgcaatctgaagcagcagtcatatcagagatcagaatgagaaggtttcttccccctctcgataatgtacacgcatgggcatggcacgttcttcacttcagaccctcacacacagctctttccccggtaaaatcaaggacggcagcagcgcatgacttggcatcgctgccggcttgtggcgcgtcctcacaggctgggcgtcctctcggcggcgccggagatgacggtgagcaggttgttgccgaaggggtcgctgaggtgcttggcgaggttctcgacggggccttcgccggtgacgtaggcctggatgaagaaggcgaacatggagaacatggcgagccggccgttcttgatctccttcaccttgaggatggcggcctggtcggggtcgctggccaagcccagggggtcgaaggggccaccggggtgcagcttgtcctcgaggtccagtccgttgatgatccggtagtactcggcgccgccgacgaggacgacctccgcgatcacggcgaccaccaggttgatggggatgctgttgccgaaatagctgagggtgtttccgtcgaggagcagggctccggtctgcatgcattcaggtgacagacaccatccgtgaactttgagttcaaactctcagagtcagatattgatactttgcatctagcaactaacatgtaaaaccttaatttgttaaaatgaaatgctattgaagtactatgtgattctgagatctgggatgacatgcaggaccttgaaccagacggcctcggggccgcagttagcgccgaacttgttgcacgcctctgggatgacagcgccagcggcaccgagcatggcccatctggcatggatcagctcgtaggcctggtacctgcacggcgttgatggtagtaggataagtttggtgatgatgtgaaattgtatgtttgagaccgtgatcgatgtgagactcacttggcgaagtcctctggcttcttgcccaggccaaaagggtcgtagccatagctgccagttgtaggagcaagatagttcagttcagataccttaacttcgattctctgcagtttttcatatatgaacaaaactagaggaaatgacggccgtagattgttgtttaaaactgacgaagattatttcaaatgctggttgagagacgtgtgtgctttcagaacgaattctacaagctgcaatgaagcaccactttggtgaaaaatcggattttgaccacaaactatttttttccaagaaaaaaaaactttttttttgttttggtcgatgaaattggtaccgttgtttaaactatcttgtagcgctaacctgatttcattaaactaccaactggaatctagaatttctgaaacaagcaaaaacctttatggaaggcaaagttggagtgatgtgacttactctccagggacctctccggtgaggtactccggtacctccgagcggtccaagagcccatccggcaggtagatcctcctgtcaggaccacttggcgagctcgtcgctgatgtccggagaagaggacgacaccgcagagggcttgggcttctgggcaggcttcttgctgaagagggagacgatcttctgagcccccgcggtgggcgctgcggtggcgtagcgggaggagccggcgaagttgagcttggtgcccagaatcttggatggagcaagagccgccatcgccggagacccacaattcagagagacttgccgcgggaggggatggctgatgggggcttgtggaggaaaaggcgagctagtttaaatggatgaaaatgaggatcggaggatgctgtgggcctagcagagatttggccatcggagctgccattggatggg

SEQ ID NO: 23084 - DNA, 244 bp, Zea Mays
tgcctggataacactaggttagtgttgttagaagtcgtccacttggcaatcatcttgcgaattagtccacccgttacgtcatcttggcgtcgactcagctttggttctccgcatcacgtggtcaataaacgtacctaaatgatttgcataatgcacatgaatgcatagcactgacttcattcctcaactaaaattcctcgcataaaatgccgataacgcctaacggcaaagcactaaaattact

SEQ ID NO: 23085 - DNA, 167 bp, Zea Mays
ctcaccacttttttttcagattttacaaccgcccatggctcccgctcctccatgtatatctctcattgttggcaaggcggactagtaagtcagcggatgcgcagatccatccattgcaaacgtagatcttggaggggatgagtcttcatcggatccagcaacgacga

SEQ ID NO: 23086 - DNA, 460 bp, Zea Mays
acaatcgagcagtaacaaagtttgagctgttgtaccttcacccaatccacatatagcactacaaaatggtcactgggaaagtagcagtcgtcctcctagcctgctggacgctagttctctaccaaccagtgcttggccgtttaccgtgtaacaatgatcagaagagagagatcctgcgcgagtgtgatccactgaactcaacacctgactatactccatcccggcacggtgcgtgctgcgtggcggtgagaaaggtgccaggaaccaacatgctttgcattgcctccatactctcacttgctgacaaggccaaatacagtgtcatggcctaaaagagtgtagctgccagcctgccatcgcttatggaatcatcgtccaaacatgatgttgaaatgagatgtatctccggctggttaataaaaaccaagttatattaatcctcttgtgccttcttgtgata

SEQ ID NO: 23087 - DNA, 2030 bp, Zea Mays
gtcgctgcggcgcctactgagagtctgagaccgacccccgacctagccgcggtaaataaatacccgacttcgccggcgtccgcgagcttcgagaatacatccttccccgcgttttaccctaacaacctaactagctgcggttctccactatcactcgctgctactgcacctacttcctttccgctctggtactgttgctggcttgctgctgctcttggtggtggtggtggtggcaccgaaaccctagcccttgccctcatgtcgcagcaggaggctgtggacccgccttcggcgacggacgagcggctgggaggtctaccgcggagcggctccaccagccgcctcaacgcgcaggcgccggagttcgtgccgcgcgctgccgcggttccccctccccctccgcagcagaaggtggtgcgtttgttcgcgccgcctccccacgcggcgttcttcgtcgcggcaccccggcccccaccgcccccgttcgagtactatgcggcggttgccaccggtgggggtggcaggttcggtccccccgccgccgctgcagagcaggaggccgaggctgagcagccgccgagggacgggagctttgatgaccccgtgcccaagatcagaaagcaggtggagtattatttcagtgatataaacctggccaccactgaacatttgatgaggtttatttcaaaggatcctgaaggatatgtgccaatatcagttgttgctggctttaagaaaattaaggctttggttcaaagtaactccatgcttgcttctgctcttcggacttcatcaaagcttgtggtcagtgacgatggtgcaagagtaaaacgtgagcaaccatttacagaatcggatttagaagaactccaggcccgaattgttgttgcagaaaatctcccagatgatcattgttaccagaacctgatgaggctcttttcagttgttggcagtgtcaggacaattagaacttgctatcctcagaccccaaatggcactggtccagctactaacagatctgcaaagctagatatgctttttgccaacaaacttcatgcttttgttgagtatgatactattgaagatgctgctagagcgattgtggaacttaatgatgagaggaactggagaagtgggcttagagttcgattgttgagcacttgcatgggaggtaaagggaaaaagggtgggcatgaatctgatgggtatggtgacgaggagaatgtctctacttctgatcaaccatatgataaatatttagaagaaacacctcagatgtcagatgtgcctggagaacacatgactgaggatagcgctggagatatgggacgaggacgtgtccgggggcgtggtcgtggtggcaggggccgggggcgtggttaccatcaacagaacaacaatcaacaccaccagcactaccaaaacagtagccaccacagtaacagtagtagtacccgtccagtgggaaccccaccgccatctggccacccagtcatgattgagcagcagcaacagcagcaggcagctcaaccacagcccctcacagcggctaacaaacagcctccaggtcctcgcatgccggatggctcacggggattcagcatgggcagagggaagccgcaaacattgacgcccaaagtatccgagtctgaacctgaacaatgaattcgaacctcgcagagagactaatgggttccggtttgccatgttgatacatatgctgagagacttgccttttagaagtctgtcctcgaggtcgctttctaatttatgggaccatatacatttctgcatgtgctgtgtgtgtacttccaaagccagcagacactggttcgcgaatagtacggttgcggccattctgtaattccatttttgccccccttatgcagttttgggtgcaatactgaaaatcaaaaactcatgctaaaaaggttgaaaagaatcgagtcgttgtaaaataagattgtttcttcgctgtttgcgggggactgatcatttcgatgcttttaccattttgttgtttattatcc

SEQ ID NO: 23088 - DNA, 2934 bp, Zea Mays
cggcgcctactgagagtctgagaccgacccccgacctagccgcggtaaataaatacccgacttcgccggcgtccgcgagcttcgagaatacatccttccccgcgttttaccctaacaacctaactagctgcggttctccactatcactcgctgctactgcacctacttcctttccgctctggtactgttgctggcttgctgctgctcttggtggtggtggtggtggcaccgaaaccctagcccttgccctcatgtcgcagcaggaggctgtggacccgccttcggcgacggacgagcggctgggaggtctaccgcggagcggctccaccagccgcctcaacgcgcaggcgccggagttcgtgccgcgcgctgccgcggttccccctccccctccgcagcagaaggtggtgcgtttgttcgcgccgcctccccacgcggcgttcttcgtcgcggcaccccggcccccaccgcccccgttcgagtactatgcggcggttgccaccggtgggggtggcaggttcggtccccccgccgccgctgcagagcaggaggccgaggctgagcagccgccgagggacgggagctttgatgaccccgtgcccaagatcagaaagcaggtggagtattatttcagtgatataaacctggccaccactgaacatttgatgaggtttatttcaaaggatcctgaaggatatgtgccaatatcagttgttgctggctttaagaaaattaaggctttggttcaaagtaactccatgcttgcttctgctcttcggacttcatcaaagcttgtggtcagtgacgatggtgcaagagtaaaacgtgagcaaccatttacagaatcggatttagaagaactccaggcccgaattgttgttgcagaaaatctcccagatgatcattgttaccagaacctgatgaggctcttttcagttgttggcagtgtcaggacaattagaacttgctatcctcagaccccaaatggcactggtccagctactaacagatctgcaaagctagatatgctttttgccaacaaacttcatgcttttgttgagtatgatactattgaagatgctgctagagcgattgtggaacttaatgatgagaggaactggagaagtgggcttagagttcgattgttgagcacttgcatggtaaccttccattgaacttcattaattgccgatgagatggcttattggtgttcaaccgcttgtacatacatattacaaggaatattccaaaaatcctctggggcctcggaacagctatacaggaatcatattacaaagccctggatgaactctgcagaaatacatttattttgaatctactttttagtgaagcagataccacccaatgaccgaccagatccatagggggtgatggggataacttcttttggaaacttgaaagctctcttgaactgctgtgctatagcattataacacagttttttcttaaaaaatcagggagaagtctatggccatccaacgttcatatttggcgattcagctattttgatgggtggttttggtgacgtggatgacaagtggcagtcagtcccgcttgtcatcattgttcaattttttagaatggctcaaaatggagaaatgaccaaaaccaaagttgttatagttgagatctactttgcacttgacttgttcatttgaaattatttacattctcaaaactctgtttgacgttctcatattttgaaatccaaaatttttgaactgttcaaattaacttggatggggaaatgacccaaactgaagatgtagatctcatcgatgagatctacaactttgtagctggcaactttttttagtgaaaatcatttatggtcccaaaattttgtttgaagtcacattttgaagttcaaaattttcaaacctccttggatggagaaaaaacggccagaaacaaagatttacttctccaccagatggagggggaagaagataatgctgacatgtgggcttgctgtttccctaacttgtttttgtgtcacaaaacaattttctaatttatttgctgcctgctctttgcaattcagacaaagggaggtaaagggaaaaagggtgggcatgaatctgatgggtatggtgacgaggagaatgtctctacttctgatcaaccatatgataaatatttagaagaaacacctcagatgtcagatgtgcctggagaacacatgactgaggatagcgctggagatatgggacgaggacgtgtccgggggcgtggtcgtggtggcaggggccgggggcgtggttaccatcaacagaacaacaatcaacaccaccagcactaccaaaacagtagccaccacagtaacagtagtagtacccgtccagtgggaaccccaccgccatctggccacccagtcatgattgagcagcagcaacagcagcaggcagctcaaccacagcccctcacagcggctaacaaacagcctccaggtcctcgcatgccggatggctcacggggattcagcatgggcagagggaagccgcaaacattgacgcccaaagtatccgagtctgaacctgaacaatgaattcgaacctcgcagagagactaatgggttccggtttgccatgttgatacatatgctgagagacttgccttttagaagtctgtcctcgaggtcgctttctaatttatgggaccatatacatttctgcatgtgctgtgtgtgtacttccaaagccagcagacactggttcgcgaatagtacggttgcggccattctgtaattccatttttgccccccttatgcagttttgggtgcaatactgaaaatcaaaaactcatgctaaaaaggttgaaaagaatcgagtcgttgtaaaataagattgtttcttcgctgtttgcgggggactgatcatttcgatgcttttaccattttgttgtttattatcc

SEQ ID NO: 23089 - DNA, 2350 bp, Zea Mays
gagagtctgagaccgacccccgacctagccgcggtggagtattatttcagtgatataaacctggccaccactgaacatttgatgaggtttatttcaaaggatcctgaaggatatgtgccaatatcagttgttgctggctttaagaaaattaaggctttggttcaaagtaactccatgcttgcttctgctcttcggacttcatcaaagcttgtggtcagtgacgatggtgcaagagtaaaacgtgagcaaccatttacagaatcggatttagaagaactccaggcccgaattgttgttgcagaaaatctcccagatgatcattgttaccagaacctgatgaggctcttttcagttgttggcagtgtcaggacaattagaacttgctatcctcagaccccaaatggcactggtccagctactaacagatctgcaaagctagatatgctttttgccaacaaacttcatgcttttgttgagtatgatactattgaagatgctgctagagcgattgtggaacttaatgatgagaggaactggagaagtgggcttagagttcgattgttgagcacttgcatggtaaccttccattgaacttcattaattgccgatgagatggcttattggtgttcaaccgcttgtacatacatattacaaggaatattccaaaaatcctctggggcctcggaacagctatacaggaatcatattacaaagccctggatgaactctgcagaaatacatttattttgaatctactttttagtgaagcagataccacccaatgaccgaccagatccatagggggtgatggggataacttcttttggaaacttgaaagctctcttgaactgctgtgctatagcattataacacagttttttcttaaaaaatcagggagaagtctatggccatccaacgttcatatttggcgattcagctattttgatgggtggttttggtgacgtggatgacaagtggcagtcagtcccgcttgtcatcattgttcaattttttagaatggctcaaaatggagaaatgaccaaaaccaaagttgttatagttgagatctactttgcacttgacttgttcatttgaaattatttacattctcaaaactctgtttgacgttctcatattttgaaatccaaaatttttgaactgttcaaattaacttggatggggaaatgacccaaactgaagatgtagatctcatcgatgagatctacaactttgtagctggcaactttttttagtgaaaatcatttatggtcccaaaattttgtttgaagtcacattttgaagttcaaaattttcaaacctccttggatggagaaaaaacggccagaaacaaagatttacttctccaccagatggagggggaagaagataatgctgacatgtgggcttgctgtttccctaacttgtttttgtgtcacaaaacaattttctaatttatttgctgcctgctctttgcaattcagacaaagggaggtaaagggaaaaagggtgggcatgaatctgatgggtatggtgacgaggagaatgtctctacttctgatcaaccatatgataaatatttagaagaaacacctcagatgtcagatgtgcctggagaacacatgactgaggatagcgctggagatatgggacgaggacgtgtccgggggcgtggtcgtggtggcaggggccgggggcgtggttaccatcaacagaacaacaatcaacaccaccagcactaccaaaacagtagccaccacagtaacagtagtagtacccgtccagtgggaaccccaccgccatctggccacccagtcatgattgagcagcagcaacagcagcaggcagctcaaccacagcccctcacagcggctaacaaacagcctccaggtcctcgcatgccggatggctcacggggattcagcatgggcagagggaagccgcaaacattgacgcccaaagtatccgagtctgaacctgaacaatgaattcgaacctcgcagagagactaatgggttccggtttgccatgttgatacatatgctgagagacttgccttttagaagtctgtcctcgaggtcgctttctaatttatgggaccatatacatttctgcatgtgctgtgtgtgtacttccaaagccagcagacactggttcgcgaatagtacggttgcggccattctgtaattccatttttgccccccttatgcagttttgggtgcaatactgaaaatcaaaaactcatgctaaaaaggttgaaaagaatcgagtcgttgtaaaataagattgtttcttcgctgtttgcgggggactgatcatttcgatgcttttaccattttgttgtttattatcc

SEQ ID NO: 23090 - DNA, 1566 bp, Zea Mays
cgccgctcggcgccgcctaggcgctccaaacgcctagcagcccgcctacccccctagtccaggtgggaggccgtggcctagcgcctaggcgtgtcgtagttgtggattttcaaaaccctgctctgcccctgaatggacctgctagcaattgaaaattctggtggagtattatttcagtgatataaacctggccaccactgaacatttgatgaggtttatttcaaaggatcctgaaggatatgtgccaatatcagttgttgctggctttaagaaaattaaggctttggttcaaagtaactccatgcttgcttctgctcttcggacttcatcaaagcttgtggtcagtgacgatggtgcaagagtaaaacgtgagcaaccatttacagaatcggatttagaagaactccaggcccgaattgttgttgcagaaaatctcccagatgatcattgttaccagaacctgatgaggctcttttcagttgttggcagtgtcaggacaattagaacttgctatcctcagaccccaaatggcactggtccagctactaacagatctgcaaagctagatatgctttttgccaacaaacttcatgcttttgttgagtatgatactattgaagatgctgctagagcgattgtggaacttaatgatgagaggaactggagaagtgggcttagagttcgattgttgagcacttgcatgggaggtaaagggaaaaagggtgggcatgaatctgatgggtatggtgacgaggagaatgtctctacttctgatcaaccatatgataaatatttagaagaaacacctcagatgtcagatgtgcctggagaacacatgactgaggatagcgctggagatatgggacgaggacgtgtccgggggcgtggtcgtggtggcaggggccgggggcgtggttaccatcaacagaacaacaatcaacaccaccagcactaccaaaacagtagccaccacagtaacagtagtagtacccgtccagtgggaaccccaccgccatctggccacccagtcatgattgagcagcagcaacagcagcaggcagctcaaccacagcccctcacagcggctaacaaacagcctccaggtcctcgcatgccggatggctcacggggattcagcatgggcagagggaagccgcaaacattgacgcccaaagtatccgagtctgaacctgaacaatgaattcgaacctcgcagagagactaatgggttccggtttgccatgttgatacatatgctgagagacttgccttttagaagtctgtcctcgaggtcgctttctaatttatgggaccatatacatttctgcatgtgctgtgtgtgtacttccaaagccagcagacactggttcgcgaatagtacggttgcggccattctgtaattccatttttgccccccttatgcagttttgggtgcaatactgaaaatcaaaaactcatgctaaaaaggttgaaaagaatcgagtcgttgtaaaataagattgtttcttcgctgtttgcgggggactgatcatttcgatgcttttaccattttgttgtttattatcc

SEQ ID NO: 23091 - DNA, 1469 bp, Zea Mays
ggattttcaaaaccctgctctgcccctgaatggacctgctagcaattgaaaattctggtggagtattatttcagtgatataaacctggccaccactgaacatttgatgaggtttatttcaaaggatcctgaaggatatgtgccaatatcagttgttgctggctttaagaaaattaaggctttggttcaaagtaactccatgcttgcttctgctcttcggacttcatcaaagcttgtggtcagtgacgatggtgcaagagtaaaacgtgagcaaccatttacagaatcggatttagaagaactccaggcccgaattgttgttgcagaaaatctcccagatgatcattgttaccagaacctgatgaggctcttttcagttgttggcagtgtcaggacaattagaacttgctatcctcagaccccaaatggcactggtccagctactaacagatctgcaaagctagatatgctttttgccaacaaacttcatgcttttgttgagtatgatactattgaagatgctgctagagcgattgtggaacttaatgatgagaggaactggagaagtgggcttagagttcgattgttgagcacttgcatgacaaagggaggtaaagggaaaaagggtgggcatgaatctgatgggtatggtgacgaggagaatgtctctacttctgatcaaccatatgataaatatttagaagaaacacctcagatgtcagatgtgcctggagaacacatgactgaggatagcgctggagatatgggacgaggacgtgtccgggggcgtggtcgtggtggcaggggccgggggcgtggttaccatcaacagaacaacaatcaacaccaccagcactaccaaaacagtagccaccacagtaacagtagtagtacccgtccagtgggaaccccaccgccatctggccacccagtcatgattgagcagcagcaacagcagcaggcagctcaaccacagcccctcacagcggctaacaaacagcctccaggtcctcgcatgccggatggctcacggggattcagcatgggcagagggaagccgcaaacattgacgcccaaagtatccgagtctgaacctgaacaatgaattcgaacctcgcagagagactaatgggttccggtttgccatgttgatacatatgctgagagacttgccttttagaagtctgtcctcgaggtcgctttctaatttatgggaccatatacatttctgcatgtgctgtgtgtgtacttccaaagccagcagacactggttcgcgaatagtacggttgcggccattctgtaattccatttttgccccccttatgcagttttgggtgcaatactgaaaatcaaaaactcatgctaaaaaggttgaaaagaatcgagtcgttgtaaaataagattgtttcttcgctgtttgcgggggactgatcatttcgatgcttttaccattttgttgtttattatcc

SEQ ID NO: 23092 - DNA, 538 bp, Zea Mays
atactttttggtccatttggaagacaaacaccccggtccagtcctcccccgatgctgagggatacccgtggaagccctcatggccacctgaggccgggcaaccttccccagtttggaagggacacaagcggatccgagcaaccacgccctccgccgccactatcgtccacaccgctgccatccgctctgctgccgctccatcgtcgtccttccccgacgcagtcgcgagcgggacgtgaggcgacagtgccctccaccaccgccaccgtctcggatttgtcgccctccgccgccatctctgccctcggttcactgtcctccaccgtcgtcttccgcgacacgatgtacaatacaatgttgtctccaagacacagtacatggtcttctccaagatccagtacaaggtcgtctcctccaagatccaaaccccaacgctagtgagaggaagttgctggtttcagtttggggcacagtttttggaccagttaagtgatgcctatttttggttcagaactatacatcgattgatctatttaaa

SEQ ID NO: 23093 - DNA, 651 bp, Zea Mays
atactttttggtccatttggaagacaaacaccccggtccagtcctcccccgatgctgagggatacccgtggaagccctcatggccacctgaggccgggcaaccttccccagtttggaagggacacaagcggatccgagcaaccacgccctccgccgccactatcgtccacaccgctgccatccgctctgctgccgctccatcgtcgtccttccccgacgcagtcgcgagcgggacgtgaggcgacagtgccctccaccaccgccaccgtctcggatttgtcgccctccgccgccatctctgccctcggttcactgtcctccaccgtcgtcttccgcgacacgatgtacaatacaatgttgtctccaagacacagtacatggtcttctccaagatccagtacaaggtcgtctcctccaagatccaaaccccaacgctagtgagagtggaaacaacacatgaaaccaacatggagaagaaaaatgaaatggcattccacatgaagcttgtgaaaaagtgttaaactcgtaatttattctagtgccgaagttcttaaccaacagacttgtaccatttttatattatatttctaatagagatgacattatatgatgtgatgatggatgaattagctttgatggatattatatggt

SEQ ID NO: 23094 - DNA, 610 bp, Zea Mays
ctcgtgcgagagcactataaaatgccctcgcggcctcacctccattattgccatccatcacatcctctcccaccttactcaagctagtgcgagcatagcaatggggttcgcccggaagagtggagttgcagtaggggtttggtggctcctcctgctcgccggcgtgctgttgccagccaccgcatttggccggcacgccgatgccggcaaagacatgtgcgacatcaagtgccagcatcacagcgacccggccaggaggcagcagtgcgtggatgagtgccatagccgggagcaccatcaccctagcagagagttttgcgagatgaagtgtcagcaccaccaggaccctgcaaggaaagagatctgcgtacagcagtgcatgagctatggtctcagcctccgccgtgcgagtgccggtgttgatgagggtgaaaagcgcttccatggctgggaaacgacggtggccggaggaatcctcgaggtggtgtgacgacgtacgacgttatataacagagtgtggaagacagtagggtcaactggggggaacaatggaggtggcggagcgatgccctgtgcggcgccaaggctctgcatgtactggaacatctcc

SEQ ID NO: 23095 - DNA, 579 bp, Zea Mays
ctcgtgcgagagcactataaaatgccctcgcggcctcacctccattattgccatccatcacatcctctcccaccttactcaagctagtgcgagcatagcaatggggttcgcccggaagagtggagttgcagtaggggtttggtggctcctcctgctcgccggcgtgctgttgccagccaccgcatttggccggcacgccgatgccggcaaagacatgtgcgacatcaagtgccagcatcacagcgacccggccaggaggcagcagtgcgtggatgagtgccatagccgggagcaccatcaccctagcagagagttttgcgagatgaagtgtcagcaccaccaggaccctgcaaggaaagagatctgcgtacagcagtgcatgagctatggtctcagcctccgccgtgcgagtgccggtgttgatgagggtgaaaagcgcttccatggctgggaaacgacggtggccggaggaatcctcgaggagtgtggaagacagtagggtcaactggggggaacaatggaggtggcggagcgatgccctgtgcggcgccaaggctctgcatgtactggaacatctcc

SEQ ID NO: 23096 - DNA, 1138 bp, Zea Mays
cggaaccagcaagcggaccggaggcgcggcgagcggagccccggcgcacggacgcgcgcccccctggcggcgagctaggatcttcacggatggagccgtggcacgtggacaagaggagaatggggatggaggccgacgccgcagccgtggacctactccgatcgcagatcccgttccagatcgacgggaagttcgttctcccgccgcgcgacgtcggggtcgtcctcgtcggcctctgcaacggcttctgcaccgttggcgccgggaacctcatagctgagaaccataaggcatatgctgaagggaaggatgaaaaagtaaaggtggaaattgtcaaggaagaagcagggtgacaaagaatgcagcgagaagaactagaagtggacctgcagaaagttcgggaacaaatgctagctgtacaaccctctgggaaagcaaggagatatatggaagatggaatggttgatttagctgattcatctaggcacccaatagatatgcataatgagctcctctgtgctcaagagactattagaatacttagaagggaggtttctgagaaggaatcagagattgctcagtgcaatgcacatatctcagagctaaacgttcatgttgaggcagtggcacaagaatacaagcacaaggtgagcgcttcgtgtgtctgtttgttttcaagaactttaacttattaatactcaaaacaaaaataaaataaaaatgctctggttagtttatggagctggaaatagatgaactcaaaacctcggggttcaggttctccatttagatgtatcggtatcgactttgtgcaacagatgaattctaagaaagatgaagagcttagtgctgcgaaacaacgtattgtggaactcgagggcatagcagctaggagacaaagggaggtgaggttattcttaatttttcacttctttttgcctacctttttttatttttccaacttatatttattgttattttgtttgaggatattcatgttgaatgcgaaattagcaccagtagagagcatggcgcccatatggggttcgagatatgcttggggttaaaataaacatgacaacttggacgctgtagacagaccctagagcatctatcaaaggaaccagacagcgatcat

SEQ ID NO: 23097 - DNA, 3531 bp, Zea Mays
atggagccgtggcacgtggacaagaggagaatggggatggaggccgacgccgcagccgtggacctactccgatcgcagatcccgttccagatcgacgggaagttcgttctcccgccgcgcgacgtcggggtcgtcctcgtcggcctctgcaacggcttctgcaccgttggcgccgggaacctcatagctgagaaccataaggcatatgctgaagggaaggatgaaaaagtaaaggtattggagaggcacccaatagatatgcataatgagctcctctgtgctcaagagactattagaatacttagaagggaggtttctgagaaggaatcagagattgctcagtgcaatgcacatatctcagagctaaacgttcatgttgaggcagtggcacaagaatacaagcacaagatgaattctaagaaagatgaagagcttagtgctgcgaaacaacgtattgtggaactcgagggcatagcagctaggagacaaagggagtgcgttgttaatgctgttaagagcgtgtatgaggcacggagggcaataacaaggactcatctgacacacaaggtgttgtcagcagcagtttataaccactataaaacgatctattgtgaatcactcatcgttaaactgaagttccaacaggtcttgcatcttatggcttcacattcgccatttatgtttcatctatacattaaggtattgtagtatatcagtgttgagtataatttaaagactatcggagtggctactgattgcaaatcaaattttcaggcacgttctgttcctatactgtctgctatcaaaaatagatattataaggttactgatggggctttgcgggcgtgcggagagacaacctcggttgtttttagaccatacaactctatgtggtcgattacaacatgctttgggattgatttcaaaaaaacaaaaaacaaatgcataaatatgagaaagaagctaaagaaaaggtcagttcgattattcagattgctagcacatctcagcctgtacttctggtcgtgtcttctaagggcccctttggcagggctctggcttctccaaaaacggctttggctctgactcacgaggtgaagccacttctttagatgagccaaagccattctgaaaaatcatttggcaaaacggcttataggttgtttttagaaagacccttgtatagtttactttttatagatctctcctgtacgtggctagggattgagggcaggaccaaaaaaattagtttggattggtgggagggctattgtgcaaaaataacgtgagctgaagccgggtgagccacttttttggctcatgccctctagttcattttggaaaagcacttcactagtgaagccatttgaaaaagaggtgtttggcacaacttttgcatgagccagagccgaagctgaaaaataagccctaccaaaggggccctaagtcttgccattgtaagcaacaattgcatgcatatttttttcagttgtttacatgtagataattgcctccaatcagaagagaattaatatgtttgatcattgagttttcatttgcaccctatcaattttgtcatgccttgttgactctttggtggcatgattgtctcattgtcctggacctgtatctggtgtcctgctttagggaaaggaacgtgtcctggtttatttgtttatttactcaacaactgctatacacctaaatgtgtacagattactgtgttcttggatggctatatataatataataggcaacctttatttggtagtgccgtgaattttttgttgcagctttgctgtattctttaaccctagatcatgtggtatccatttatgttttttttggcctatcctgtcactttggaactgtggtgaatcactgcttactttgattgcacttaatgaaactaagcattaaaagtctggtaaaaaaatatctgatattgttaaatactccctccgttcacttatgatagtcctatttcaccttgacacaatgaccaaggagaagaactcttgcttataatctaattaattacatcatcaaacagtccttgttttttgcgaaaactcctcgattttgatgtttttatatacatgcaccagtcttttttctagatgagttactctgcacggggacccaaacagtcatttatatcagatttgggaccacaactcaaataagactataaaaaatgaacaactcaattttgaaaataggactatcaaaagtgaatggagggagtattgctgtgagatggtccaaaacaactcttaattgctgtaattttggtttcttatttaagtctatttgtaaacaagtcatgcaaataactgtagatgagacaaaagtctgaaatgttgtaaatgtgtgtagttgatctctttcaggttccttttccatatcacaatatagtaatttagttgcttctttattttgcttttgtcatttgaggattctgggagttgaggagagtgcttcacaacaagagatagagaaggtgtatcacaaattggctctgcgcctccacccggatacgaatcctgggaacgagccaaagagaagtttcagcggttgcagaaggttatatccattcttggagatacagagaaaagagctttatatgatgagactgacatcagtgatgaccatacaatcttcaggagtacttccgaacaatgtacaaaaaggtgtttttgtttcatgattattgccagtttcatgatctatgtcctattgtatatgtaatcttctccctagatttagctagagagcttctacacgatttcaacttccacaatggacaaatcaccatttcaagttctacaatgggttgtctcatttactagacattagatcctgttttcaaccactgtagggcgcccgaaggggcgcctgatgttctagtatattaatggcagagccagatcatgtctttgtgaagcctttgccaaacttatctcttggtgataagccagcggcatttctatttttctacatcaaaccgactgagaatgataagaagttgaggaagttttttccagaagaaaaagggcctatttcaaatattgatcctattggtaattctccggttataattaagaagaggtagaagcagcagaattgagtgcttgcctgttcagtcatattggttcaagcgcatctaatttggtctcggtctcgaggaggagtataatggtatgaaggttcatatggaggctgttggaacatcaccgagggatggacagttcgaggatcccatgtctgcggcagaagaggccgcgttctgcaatcccgtgtctgcggcagaagaggtcgcgttttgcaatgcgttcactagagttctaaaaccaaaaatggaagaatagaacattacccaaaactttgtattaataattatgaagatatatcatacattaggaattcaaatcatgtatcaggagtcacattctttctttgcatattcttcatctctctcctcaaacatagtgttcaggacaatttttcaggatacccggacaatctaac

SEQ ID NO: 23098 - DNA, 2190 bp, Zea Mays
atggagccgtggcacgtggacaagaggagaatggggatggaggccgacgccgcagccgtggacctactccgatcgcagatcccgttccagatcgacgggaagttcgttctcccgccgcgcgacgtcggggtcgtcctcgtcggcctctgcaacggcttctgcaccgttggcgccgggaacctcatagctgagaaccataaggcatatgctgaagggaaggatgaaaaagtaaaggtattggagaggtcaattgaagaacttgagaatattgtttgtgttttagaaagcaaagtaacttgtgttgtttgttctatttaggtgttgattaatcgctcacttttctttgtcgtcgttttatttttaaagtattcattcttagcactaatttctgctatttcttctaaggtggaaattgtcaaggaagaagcagggtgacaaagaatgcagcgagaagaactagaagtggacctgcagaaagttcgggaacaaatgctagctgtacaaccctctgggaaagcaaggagatatatggaagatggaatggttgatttagctgattcatctaggcacccaatagatatgcataatgagctcctctgtgctcaagagactattagaatacttagaagggaggtttctgagaaggaatcagagattgctcagtgcaatgcacatatctcagagctaaacgttcatgttgaggcagtggcacaagaatacaagcacaagatgaattctaagaaagatgaagagcttagtgctgcgaaacaacgtattgtggaactcgagggcatagcagctaggagacaaagggagtgcgttgttaatgctgttaagagcgtgtatgaggcacggagggcaataacaaggactcatctgacacacaaggtgttgtcagcagcagtttataaccactataaaacgatctattgtgaatcactcatcgttaaactgaagttccaacaggtcttgcatcttatggcttcacattcgccatttatgtttcatctatacattaaggcacgttctgttcctatactgtctgctatcaaaaatagatattataaggttactgatggggctttgcgggcgtgcggagagacaacctcggttgtttttagaccatacaactctatgtggtcgattacaacatgctttgggattgatttcaaaaaaacaaaaaacaaatgcataaatatgagaaagaagctaaagaaaaggattctgggagttgaggagagtgcttcacaacaagagatagagaaggtgtatcacaaattggctctgcgcctccacccggatacgaatcctgggaacgagccaaagagaagtttcagcggttgcagaaggttatatccattcttggagatacagagaaaagagctttatatgatgagactgacatcagtgatgaccatacaatcttcaggagtacttccgaacaatgtacaaaaagatttagctagagagcttctacacgatttcaacttccacaatggacaaatcaccatttcaagttctacaatgggttgtctcatttactagacattagatcctgttttcaaccactgtagggcgcccgaaggggcgcctgatgttctagtatattaatggcagagccagatcatgtctttgtgaagcctttgccaaacttatctcttggtgataagccagcggcatttctatttttctacatcaaaccgactgagaatgataagaagttgaggaagttttttccagaagaaaaagggcctatttcaaatattgatcctattgaggtagaagcagcagaattgagtgcttgcctgttcagtcatattggttcaagcgcatctaatttggtctcggtctcgaggaggagtataatggttcatatggaggctgttggaacatcaccgagggatggacagttcgaggatcccatgtctgcggcagaagaggccgcgttctgcaatcccgtgtctgcggcagaagaggtcgcgttttgcaatgcgttcactagagttctaaaaccaaaaatggaagaatagaacattacccaaaactttgtattaataattatgaagatatatcatacattaggaattcaaatcatgtatcaggagtcacattctttctttgcatattcttcatctctctcctcaaacatagtgttcaggacaatttttcaggatacccggacaatctaac

SEQ ID NO: 23099 - DNA, 2872 bp, Zea Mays
atggagccgtggcacgtggacaagaggagaatggggatggaggccgacgccgcagccgtggacctactccgatcgcagatcccgttccagatcgacgggaagttcgttctcccgccgcgcgacgtcggggtcgtcctcgtcggcctctgcaacggcttctgcaccgttggcgccgggaacctcgtggaaattgtcaaggaagaagcagggtgacaaagaatgcagcgagaagaactagaagtggacctgcagaaagttcgggaacaaatgctagctgtacaaccctctgggaaagcaaggagatatatggaagatggaatggttgatttagctgattcatctaggcacccaatagatatgcataatgagctcctctgtgctcaagagactattagaatacttagaagggaggtttctgagaaggaatcagagattgctcagtgcaatgcacatatctcagagctaaacgttcatgttgaggcagtggcacaagaatacaagcacaaggtgagcgcttcgtgtgtctgtttgttttcaagaactttaacttattaatactcaaaacaaaaataaaataaaaatgctctggttagtttatggagctggaaatagatgaactcaaaacctcggggttcaggttctccatttagatgtatcggtatcgactttgtgcaacagatgaattctaagaaagatgaagagcttagtgctgcgaaacaacgtattgtggaactcgagggcatagcagctaggagacaaagggagtgcgttgttaatgctgttaagagcgtgtatgaggcacggagggcaataacaaggactcatctgacacacaaggtgttgtcagcagcagtttataaccactataaaacgatctattgtgaatcactcatcgttaaactgaagttccaacaggtcttgcatcttatggcttcacattcgccatttatgtttcatctatacattaaggcacgttctgttcctatactgtctgctatcaaaaatagatattataaggttactgatggggctttgcgggcgtgcggagagacaacctcggttgtttttagaccatacaactctatgtggtcgattacaacatgctttgggattgatttcaaaaaaacaaaaaacaaatgcataaatatgagaaagaagctaaagaaaaggattctgggagttgaggagagtgcttcacaacaagagatagagaaggtgtatcacaaattggctctgcgcctccacccggatacgaatcctgggaacgagccaaagagaagtttcagcggttgcagaaggttatatccattcttggagatacagagaaaagagctttatatgatgagactgacatcagtgatgaccatacaatcttcaggagtacttccgaacaatgtacaaaaaggtatgattgcttctatgttagttgtcggctaaaagagttaagtgtactactttggcaatttgccaaattagtaattttgtgcaaatgtatctgaataattttgattcaaaagctagaggacagacaaccatggccaaaagggtcatagcagacttgctattgtgtttcttatttaatgattgacacctttgttttgaatgaatgagaataattaggaatatggcttggtttgttgtatggattctacactatcaaaattattctgttaatagtagtttagaacagctatttgaacgaccactaaatactatagaaaaaaaggactagcatgactatagccaaaaccattgcatgtgattttataccacacattgccaccggcttcagattgcagagcactcaaactttgtctctgctaaccctttgttgccatctgttgccatcgacttagttattgccaactgacatttttaaactcctttggtagcttgctattgaggactgatgaaatgttgttgcttggcatcacacgacacaaaatgttttataaattagattttttgtaatatgccattgatttttaaataccatcccatgtgatacttgccctgaaagcgttatatgtgttttttgttaggtgtttttgtttcatgattattgccagtttcatgatctatgtcctattgtatatgtaatcttctccctagatttagctagagagcttctacacgatttcaacttccacaatggacaaatcaccatttcaagttctacaatgggttgtctcatttactagacattagatcctgttttcaaccactgtagggcgcccgaaggggcgcctgatgttctagtatattaatggcagagccagatcatgtctttgtgaagcctttgccaaacttatctcttggtgataagccagcggcatttctatttttctacatcaaaccgactgagaatgataagaagttgaggaagttttttccagaagaaaaagggcctatttcaaatattgatcctattggtaattctccggttataattaagaagaggtagaagcagcagaattgagtgcttgcctgttcagtcatattggttcaagcgcatctaatttggtctcggtctcgaggaggagtataatggttcatatggaggctgttggaacatcaccgagggatggacagttcgaggatcccatgtctgcggcagaagaggccgcgttctgcaatcccgtgtctgcggcagaagaggtcgcgttttgcaatgcgttcactagagttctaaaaccaaaaatggaagaatagaacattacccaaaactttgtattaataattatgaagatatatcatacattaggaattcaaatcatgtatcaggagtcacattctttctttgcatattcttcatctctctcctcaaacatagtgttcaggacaatttttcaggatacccggacaatctaac

SEQ ID NO: 23100 - DNA, 1563 bp, Zea Mays
atggagccgtggcacgtggacaagaggagaatggggatggaggccgacgccgcagccgtggacctactccgatcgcagatcccgttccagatcgacgggaagttcgttctcccgccgcgcgacgtcggggtcgtcctcgtcggcctctgcaacggcttctgcaccgttggcgccgggaacctcatagctgagaaccataaggcatatgctgaagggaaggatgaaaaagtaaaggtattggagaggcacccaatagatatgcataatgagctcctctgtgctcaagagactattagaatacttagaagggaggtttctgagaaggaatcagagattgctcagtgcaatgcacatatctcagagctaaacgttcatgttgaggcagtggcacaagaatacaagcacaagatgaattctaagaaagatgaagagcttagtgctgcgaaacaacgtattgtggaactcgagggcatagcagctaggagacaaagggagtgcgttgttaatgctgttaagagcgtgtatgaggcacggagggcaataacaaggactcatctgacacacaaggattctgggagttgaggagagtgcttcacaacaagagatagagaaggtgtatcacaaattggctctgcgcctccacccggatacgaatcctgggaacgagccaaagagaagtttcagcggttgcagaaggttatatccattcttggagatacagagaaaagagctttatatgatgagactgacatcagtgatgaccatacaatcttcaggagtacttccgaacaatgtacaaaaagatttagctagagagcttctacacgatttcaacttccacaatggacaaatcaccatttcaagttctacaatgggttgtctcatttactagacattagatcctgttttcaaccactgtagggcgcccgaaggggcgcctgatgttctagtatattaatggcagagccagatcatgtctttgtgaagcctttgccaaacttatctcttggtgataagccagcggcatttctatttttctacatcaaaccgactgagaatgataagaagttgaggaagttttttccagaagaaaaagggcctatttcaaatattgatcctattggtaattctccggttataattaagaagaggtagaagcagcagaattgagtgcttgcctgttcagtcatattggttcaagcgcatctaatttggtctcggtctcgaggaggagtataatggttcatatggaggctgttggaacatcaccgagggatggacagttcgaggatcccatgtctgcggcagaagaggccgcgttctgcaatcccgtgtctgcggcagaagaggtcgcgttttgcaatgcgttcactagagttctaaaaccaaaaatggaagaatagaacattacccaaaactttgtattaataattatgaagatatatcatacattaggaattcaaatcatgtatcaggagtcacattctttctttgcatattcttcatctctctcctcaaacatagtgttcaggacaatttttcaggatacccggacaatctaac

SEQ ID NO: 23101 - DNA, 2270 bp, Zea Mays
atggagccgtggcacgtggacaagaggagaatggggatggaggccgacgccgcagccgtggacctactccgatcgcagatcccgttccagatcgacgggaagttcgttctcccgccgcgcgacgtcggggtcgtcctcgtcggcctctgcaacggcttctgcaccgttggcgccgggaacctcatagctgagaaccataaggcatatgctgaagggaaggatgaaaaagtaaaggtattggagaggcacccaatagatatgcataatgagctcctctgtgctcaagagactattagaatacttagaagggaggtttctgagaaggaatcagagattgctcagtgcaatgcacatatctcagagctaaacgttcatgttgaggcagtggcacaagaatacaagcacaagatgaattctaagaaagatgaagagcttagtgctgcgaaacaacgtattgtggaactcgagggcatagcagctaggagacaaagggagtgcgttgttaatgctgttaagagcgtgtatgaggcacggagggcaataacaaggactcatctgacacacaaggattctgggagttgaggagagtgcttcacaacaagagatagagaaggtgtatcacaaattggctctgcgcctccacccggatacgaatcctgggaacgagccaaagagaagtttcagcggttgcagaaggttatatccattcttggagatacagagaaaagagctttatatgatgagactgacatcagtgatgaccatacaatcttcaggagtacttccgaacaatgtacaaaaaggtatgattgcttctatgttagttgtcggctaaaagagttaagtgtactactttggcaatttgccaaattagtaattttgtgcaaatgtatctgaataattttgattcaaaagctagaggacagacaaccatggccaaaagggtcatagcagacttgctattgtgtttcttatttaatgattgacacctttgttttgaatgaatgagaataattaggaatatggcttggtttgttgtatggattctacactatcaaaattattctgttaatagtagtttagaacagctatttgaacgaccactaaatactatagaaaaaaaggactagcatgactatagccaaaaccattgcatgtgattttataccacacattgccaccggcttcagattgcagagcactcaaactttgtctctgctaaccctttgttgccatctgttgccatcgacttagttattgccaactgacatttttaaactcctttggtagcttgctattgaggactgatgaaatgttgttgcttggcatcacacgacacaaaatgttttataaattagattttttgtaatatgccattgatttttaaataccatcccatgtgatacttgccctgaaagcgttatatgtgttttttgttaggtgtttttgtttcatgattattgccagtttcatgatctatgtcctattgtatatgtaatcttctccctagatttagctagagagcttctacacgatttcaacttccacaatggacaaatcaccatttcaagttctacaatgggttgtctcatttactagacattagatcctgttttcaaccactgtagggcgcccgaaggggcgcctgatgttctagtatattaatggcagagccagatcatgtctttgtgaagcctttgccaaacttatctcttggtgataagccagcggcatttctatttttctacatcaaaccgactgagaatgataagaagttgaggaagttttttccagaagaaaaagggcctatttcaaatattgatcctattggtaattctccggttataattaagaagaggtagaagcagcagaattgagtgcttgcctgttcagtcatattggttcaagcgcatctaatttggtctcggtctcgaggaggagtataatggttcatatggaggctgttggaacatcaccgagggatggacagttcgaggatcccatgtctgcggcagaagaggccgcgttctgcaatcccgtgtctgcggcagaagaggtcgcgttttgcaatgcgttcactagagttctaaaaccaaaaatggaagaatagaacattacccaaaactttgtattaataattatgaagatatatcatacattaggaattcaaatcatgtatcaggagtcacattctttctttgcatattcttcatctctctcctcaaacatagtgttcaggacaatttttcaggatacccggacaatctaac

SEQ ID NO: 23102 - DNA, 1895 bp, Zea Mays
ctggccgaccaggaacggagttgcatagccggccgcgcgtccgtccgccccaagacccaagattgcgaggttattgcccccacaaatttctttcccctccgggccttccgtgcaaaccaaatctcaacgaaacattgccgcctccccctgaccgcgccccactccccagacgccgtcgcctagatccatgagacttcccgatcttcctgcggcccgaggatgtcccagagcgacgtcgactacagccgatttactcaggtggacgaggtatcttgctttcccctcacctggcgtggttacaggccaaaaactaagcttctgtgccgaatatgtggggcatctattggctacggatacggtgagccggctgttttgtgtagttttgatccagcaagttcatcttcctccagtacatcccagaagtatttaataaagatccaagcactccaaccttcagacaggactcagtaagtgaaatatggaaagagaggaaataggtgtcagcctagagaactccatcagttacctatctgatgattgcttgctttctatatttaacaagctagaaagcgggtcagagaggagtgctttcggtttaacttgcaagaattggttcaaggttcggaaccttggccggaaatcactaacattccattgttcttttaatcctgccatagacaaggagcatgccaagtgcatccccaagatactggctcactcaccttgtctgaaccggatatcccttgctgggctcacagagctacctgactcggctttgagcacgctgagagtgtctggatcatctctaaaatccttttcattgtactgctgttctggcataacagatgatggtctagcacaggtggcgattgggtgccctaatttggtggtggttgaacttcaaagctgcttcaacattacagatgctgccttggaaagtctttcaaaaggctgccgtggtttgaagagtctaaaccttggttcttgcatgggcattacagaccaaggggtttctgcaatcttcagcaattgtccaaacatctgcacgctaatcgttacaggttgcaggcgtctgtccggtgctggattcagaggttgttcaagttcatttcgttaccttgaagccgagtcttgcatgctttctccagacggtttgttggatatagctagtggcagtggactcaagtatctgaacttgcagaagttaagaagctccactggtctggatggcctgggtaaccttgcgctcgctaaaagcctctgcattctgaatctcaggatgtgtcgctacctcacagacgattccgtggcagcaatagccagtgggtgcccgttgctcgaggagtggaaccttgctgtttgccatggggtccatctacctggctggtctgcgatcgggctgtactgcagtaagctaagagtgctgcatgtgaaccgctgccggcacatctgcgaccagagcttgctggccctcggcaatggctgtccgcgccttgaagctgtgcatatcaatggctgtgccaaggtcaccaacaatggcctggccttgtttaccctttccaggccccacgtgaacctaagggtgtatgaagttatgtccattggcccttccattgagaatttgttccggttgcattgaggtgaaattgttagttaggttttcgaagtttgggattaaaagtataataccctgtccattacaggtgattggtttcttcagtcaattatgcacagtgtgtttgctctggtgcttactgtaagataacaatagcgaatatgttgttagttaagctgctgttttgtcaaggccatatttgtcaatccttcgttcacaaagttaggtagcattaatagagtttgacaaacattttatcagttgccaagatatctttttg

SEQ ID NO: 23103 - DNA, 1915 bp, Zea Mays
ctggccgaccaggaacggagttgcatagccggccgcgcgtccgtccgccccaagacccaagattgcgagacgccgtcgcctagatccatgagacttcccgatcttcctgcggcccgaggatgtcccagagcgacgtcgactacagttgcggatcttgtggataccctctaaacctttcatcttctaaccgaagcacatctgaagtaggctcatataagaagtctctgaagaaaggactgatttcattcatttctgttgatctcagccgatttactcaggtggacgaggtatcttgctttcccctcacctggcgtggttacaggccaaaaactaagcttctgtgccgaatatgtggggcatctattggctacggatacggtgagccggctgttttgtgtagttttgatccagcaagttcatcttcctccagtacatcccagaagtatttaataaagatccaagcactccaaccttcagacaggactcagtaagtgaaatatggaaagagaggaaataggtgtcagcctagagaactccatcagttacctatctgatgattgcttgctttctatatttaacaagctagaaagcgggtcagagaggagtgctttcggtttaacttgcaagaattggttcaaggttcggaaccttggccggaaatcactaacattccattgttcttttaatcctgccatagacaaggagcatgccaagtgcatccccaagatactggctcactcaccttgtctgaaccggatatcccttgctgggctcacagagctacctgactcggctttgagcacgctgagagtgtctggatcatctctaaaatccttttcattgtactgctgttctggcataacagatgatggtctagcacaggtggcgattgggtgccctaatttggtggtggttgaacttcaaagctgcttcaacattacagatgctgccttggaaagtctttcaaaaggctgccgtggtttgaagagtctaaaccttggttcttgcatgggcattacagaccaaggggtttctgcaatcttcagcaattgtccaaacatctgcacgctaatcgttacaggttgcaggcgtctgtccggtgctggattcagaggttgttcaagttcatttcgttaccttgaagccgagtcttgcatgctttctccagacggtttgttggatatagctagtggcagtggactcaagtatctgaacttgcagaagttaagaagctccactggtctggatggcctgggtaaccttgcgctcgctaaaagcctctgcattctgaatctcaggatgtgtcgctacctcacagacgattccgtggcagcaatagccagtgggtgcccgttgctcgaggagtggaaccttgctgtttgccatggggtccatctacctggctggtctgcgatcgggctgtactgcagtaagctaagagtgctgcatgtgaaccgctgccggcacatctgcgaccagagcttgctggccctcggcaatggctgtccgcgccttgaagctgtgcatatcaatggctgtgccaaggtcaccaacaatggcctggccttgtttaccctttccaggccccacgtgaacctaagggtgtatgaagttatgtccattggcccttccattgagaatttgttccggttgcattgaggtgaaattgttagttaggttttcgaagtttgggattaaaagtataataccctgtccattacaggtgattggtttcttcagtcaattatgcacagtgtgtttgctctggtgcttactgtaagataacaatagcgaatatgttgttagttaagctgctgttttgtcaaggccatatttgtcaatccttcgttcacaaagttaggtagcattaatagagtttgacaaacattttatcagttgccaagatatctttttg
